United States Patent Application Publication US 2011/0183924 A1 - sequence listing, part 14

SEQ ID NO: 33754 - DNA, 1536 bp, Homo sapiens
  misc_feature (348)..(348): n is a, c, g, or t
  misc_feature (741)..(741): n is a, c, g, or t
  misc_feature (1110)..(1110): n is a, c, g, or t
atggatgtgtgtggctggaaagaaatggaggttgcgctggtcaattttgataattcagatgaaatccaagaagagccaggctatgccacagacttcgactcaaccagcccaaaaggccggcctgggggcagctccttctccaacgggaagatcctcatcagcgaaagcaccaaccatgagacggccttctccaagcttccgggagactatgctgaccccccagggcctgagccagtggtcctaaatgaaggaaaccagcgggtgatcatcaacattgctgggctgagatttgagacccagctcagaacccttagtcagttcccagagactctcctgggagaccggganaaaaggatgcagttctttgactccatgagaaatgagtatttctttgatcggaaccggcccagttttgatggaatcctatattattaccaatctggtgggaaaattcggcgcccagccaatgttcccattgatatctttgctgatgaaatctccttctatgagctgggtagtgaggccatggaccagttccgggaggatgaaggcttcatcaaagaccctgaaacactgctacccaccaatgacatccaccgtcagttctggctcctctttgagtaccctgaaagttccagcgctgcccgtgctgtggccgtggtctcggtgttggttgtggtcatctccatcaccatcttctgcctggagacactgccagagttccgggaggatagggagctnaaggtggtcagagaccccaatctcaacatgagcaagacagtcctctcccagaccatgttcaccgaccctttcttcatggtggagtctacctgcatcgtgtggttcaccttcgagctggtgctccggttcgtggtctgccccagcaagactgacttcttcaggaacatcatgaacatcattgacatcatctccattatcccctactttgcaactctcatcacagagctagtccaggagacagagccgagtgcccaacagaacatgtccctggccatcctgaggatcatccgcctggtgagggtcttccgcatcttcaagctctcgcgccactccaaggggctgcagatcctcgggcaaacactgaaggcntccatgcgggagttggggttgctcatcttctttctcttcattggagtcatcctcttctccagtgcagtctactttgctgaggtggatgagccagagtcccatttctctagcattcctgatggcttctggtgggcagtggtcaccatgacaactgtaggctatggggacatgtgcccgaccaccccaggggggaagattgtgggcactctgtgtgccattgcaggggtcctcaccattgccctccctgtgcctgtcattgtctccaacttcaattacttctaccaccgggagactgagaatgaagaaaagcagaacatcccaggagaaattgaaagaatcctcaacagtgtaggctcaagaatgggcagcacagactctcttaataagaccaatggtggctgttccacagagaagtctaggaaatga

SEQ ID NO: 33755 - DNA, 334 bp, Homo sapiens
aaaaaaaaacaacaaacaaacaaaaaaaccagaaaatatggtggatgtggtggctcacgcctgtaatcccagcatttgggaggccaagtcaggaggatcacttgagccctgaagtattgagaccaacctgggtagcatagcaagacccctgcctatatccatccccctcctcgcaaaaaaaaaggccaggtatggtgggcaggagcctctggtcccagctactcagaaggctgaagcaggaggatcctttcagctcaggaagttgagcctgcagtgagccatgattgcaccacggcattccagcttgggcaacagagtgagaccctctttcaaa

SEQ ID NO: 33756 - DNA, 386 bp, Homo sapiens
cctgagtagctgggactacaggtgcacaccaccacacctggctcccaattcctggtgttttgttttgttttttcaagacaagagtctcactctgtcacccaggctgcagtgcagtggtgcaatcacagcttactgccttgaccttctgggcttaagcaattctcccgcctcagcctcccaaagtgctgggattacctgcatgtgccactgcacctggccccaattccaaatttctgatgtatctatccaacacagactttcccctcctgagacagtctgagtgcatcccacatactgaatactcgatactcaattaaggggtaaaatttccccaaagcagagttaaattactgcaaaacggcacagaagctgccagccagaaacca

SEQ ID NO: 33757 - DNA, 474 bp, Homo sapiens
gcttgaaaatattattgtattctgcttagtaattttatattctagtaaaggcattgtaagtccaaagatgtatgaagatgtatgctaaagcagatagaattaggcacttgtcctgtccaaatgaggaatttttaaatttttaaatggtttttttttctatttttagacatctaatgctatagattcaaactttttctactcttgtctagatatgccaaatgctggcaaaaaattgcttttgttgttgttgttgttctttttttttgagacagagtcttgttttattggccaggctggagtgcagtggcaccatctcggctcactgcaacctctgcctcctggggttcaagccactgtgcccagcctaagaattgctatttggatgttgccgaatttgtaaaaacacagcaataagcaaaatccttttgaacaaagaagtcctgagttcatctcattggtggactgaagcaattc

SEQ ID NO: 33758 - DNA, 436 bp, Homo sapiens
agaatgttctcacaaatgtgtgtctgccaacaaattaatactccacaaagagaaactctgccccacatggcagcttccaataaatgctctgattcaaatcacaactctttcattttttttttatccccttcccccttgagggagcacatttagacaatatttgaggatgtcatctttctgctttttaaaactctctagagttttcatttaagactcttaatggttgatgactaaaactacagatctggatagtggaaaaactaataatcttaaaaaacacttctgaaatgtggtaaagtgcattcattctcttccctcctctttgtccttttcaaagaaagaaagttcaatatgaaaccaatgcaaattatgactttactcagtgagatattttaccttctttcagactgtttcatactgaagtttataaaaaaaa

SEQ ID NO: 33759 - DNA, 404 bp, Homo sapiens
ctattaattcgcggccgcgtggacatccaattagttcagtcagttgcctcccctcttcagtggaagattttgtttttagttcagtttaggaaggaagatttcctttcaggaggccaggtgtggtggctcacacctgtaatcaatcacagcactttgggaggccaaggcgggagcccagaatttccagaccagtctaggcgacatagtgagacaccctgtctttacaaaaaaaattaaaacaatatagctgagtgtggtggagaatgcatacctgtagtcccagctactcgggaggctgaggtgagaggatcacttgagcctgtgaggtcaaggctgcagtgagctgtgatcacgccactgcactatagcctgggcaatagagcaaagccttgtctccaaaaaaa

SEQ ID NO: 33760 - DNA, 383 bp, Homo sapiens
gtcgtagaatttactagggaagctatctaggcctagagtttccttagtggaaggttttgttttgttgtttgtttgtttattttgagacggagtctcgctctgttgcccaggctggagaggctggagtgcagcggcgggatcacggctcattgcagcctctgcctcctaggttcaagcaattaccgtgcctcagccacatgagtagctgggattacaggtgaacgtcaccatgcccggctaatttttgtacttttagtagaaatgaagtttcaccatgttgcccaggctggtctcaaactcctgacctcaagtgatctgccctcctcagcctcccaaagtgctaggattacaggcgtgagtcagcacgcctggcctagaagttt

SEQ ID NO: 33761 - DNA, 389 bp, Homo sapiens
tttttttttgagacagtcttgctctgttgcccaggctggagtgcagtggtgtgatctcagctcactgcaacctctgcctcctgtgttaaagtgattctcctgcctcagcctcctgagtagctgggattacaggcatgcaccaccacaccaggctaattttgtatctttagtagagacggggtttctccatgttggtcagactggtcttgaactcccgacctcaggtgatccgcccgcctcagtctcccaaaagtgctgggattacaggtgtgagccactgcgcctggctgaaaccacgtgttctaatgcagttttttttctacaggacttaaaaaagacaatgtcctcatttactactcatatgaagtaaatgttaaaaatcatctcta

SEQ ID NO: 33762 - DNA, 345 bp, Homo sapiens
ttccaaacctggggtggggagattagataaccacggtcaacccactggtcccagagcttccccatttgcaaactggggctgtaatttgaaaaagcaaaagaaggggatggtgtgagtaatgatgaaaaccagggtttctgagaccaccacttagtaattaaacttggaagcagtgggtgggaaaagaagcaaactagtggcttctcaaaactagcctgagttaactactatggatatggccctggatggacctgggagggatcttgccccagtatccgctgcataacctcaacctgtctccttgggatggtggtgagaacaggcctgactcgggagcagtgccct

SEQ ID NO: 33763 - DNA, 438 bp, Homo sapiens
gagtagtggtctaggagttgagagatcgggttctactcctgggagccactagctgtgtgttgctagagaagtcacctaaccattctggcctcgccgttgataaaatgagggtgttagacccacagacagacctagtcaaaacagcaagctaatgtgtaatggcagaatatcctgtaagtcaagtatttcttgcagtaagttcattcagaacatcatttagtgaagccagtgctccacatttaacccttccaacctcatctcatttaacaagagtttgtggaactagccaggcctgatggcacgcacctctgtattcccagctactcaggaggctgagataggaggattgtttgagcctgggaggtcgaggctgcagaaagctgtgttcatgccactacacttcagcctgggtgacagagtgagaccctgtctccaaga

SEQ ID NO: 33764 - DNA, 453 bp, Homo sapiens
ttcttgaaagaaagaaaacaaagttcagatggtcagcaacttcatattgacagtgtccagccaacagtagaaaaggtactcagtttatgaagaaagtcagtcaatagaaacagacctagagatgactttaaaaaatttcttcgtttctttaaaagataattgactgtttagatatgtttaaagatttaaaataagtcagtagagaaatggaactaaaggaaaattctagatgaaaattacaacatctgatgaaaaatttgctagatgagtttaatagtagatcagatgctgtaaaaaaaaataaagactagtgaacatgcagtcagggcaatagaaagtattcaagtgaggctgggtacagtggctcacacctgtaaccccaacactttggaagactgaggttggaggatcccttgaactcaggagttcaagaccagcctgggcaacatggtg

SEQ ID NO: 33765 - DNA, 450 bp, Homo sapiens
gtcatcccctttagagtataagctccaggaactttgattattcaccatcattttggcaacttgcatagcctctggcacatagagaggtgccaatatttgttaaatatttgtgaactaaataaatgcgctaattaagcctcttaccaagggcctggcagaccccatgctaagcactccagaaaacatgatcgtgttaattcctgggcaacatcctctgacggtagatattagtggttctgttttccagaccaagacacaggctcagagtatttaaatgacttggccaaggtcctgtggcttagaggcactaggacccatatttgcaccaggtctgctgggatgggcagaggccagtcttctgaaccacgggcatcactgctttgtggccctgtgccctgtgccagtcacagaggggacatacaatatctgcaggagggcagggtgtttgct

SEQ ID NO: 33766 - DNA, 736 bp, Homo sapiens
tgtcttagggttggagaagggaccaagcctcccctgaaagctgaggggtttatggtcaagaagaaagagtaactatggccacctttaggtcaccagccaataatactgcttctctatcctgttctgctgtgacatttgtcccagcaggtgttccagtctgtcctacagtagtgagaccacctgatatggtgaggaaggcaggtaattgatcttactccatcatatcatcacatctatttccaccccccgcccttggagacaaggtctcactccatcatttaggccggaatgcagtggtgcaatcatagctcattgtagtctcaaacacctgggcccaagtgatcctcactgtagtctcccaagtagctaggactacaggcacatgccaccacacctggctaattaaaaaaaattttttttgcacagagatgggggtcttgatatgttgcccaggctggtctggaactcctggccacaagtgatcctcccacctcagcctcccaaagcactgggattactgttgtgagccaccatgaccagccccatcacttcttttgtaggtttgtatttgtttttatttttgacaaagacttttatttcacggtgacttcttcacaagtttcctcagatgctagtctgaacaaaggagagcagggaactagaaatgtagactttctgttttttccagctatggcatcactgatctcatccatcttactaaagtttgtgcagtctc

SEQ ID NO: 33767 - DNA, 1324 bp, Homo sapiens
aggcgtgagtcaccgcccctggcctccaagtgatcttaattgcatactaatgtgttaaggactttaatgtgttaactctttaagatagagttaaacacactgtttcctaagggtttgtttttacatcttctgtaaaaacaaaggtatatgttttactaaaccagcattttagttgtggaccctaagtctaccttgaaaaaaaaaatgatatgatttttaacattctaatgagtacaagatgacagtgaacaacagtaatgtaccaagtcagggaaagtaggtggtgggggtggctacaggctgggaacatggtgagttgcttggtattgttttaaaattctctacagccaatacactccccttattgtctgtatcttgcctctgccctgatcttagccatccattgcattattatgaattggtaatcaacaactctgatagaaattgacttgctattttctctaattgggctggttatatattgccctattgtccttagcgccttttcgattctcaagaaggttgcataattccagcagccttccatgtaaatggcagtagtatagagtagctgagataaagaatagtctccaggggactgactatataatataggaagttgaagcagtagggtagttcctaaatgttaataaatttcccccagtaagccctgtaaaggcagggaattggagcggggggtggggggtagggggcaggtgttctcccaagggcaaggagaaaggaccttacaaaattattgtattaaagtctgaaatgctttataggatttagagcctaagtaggagcatggtgttcttgtaatagcaatccaaatctgttattttagttgttaagggagaaattctttaaaagtcttcaaagaaattagagataggcattaatttattaaacagtgataatagaggttattggaatctattttgggaaactttaagtcatttggtattgggaagagagtacttcaaggttaatttgtataaatttaattttgttataagaggctgtactctgtttgcactctagaattaggaaggttactttcctgacttttgtatttctcaggaaaaaaagaattggaagaaacttaagaggtctgttaatgccagtacctaaacgtgacatttaacatggcatggaagctatgctttgaataaacacttgagaaaaggaattacataatttcttttttgttgtatggatggctttggattatacagagcttaacatttatataaaacaccagtctgagactgatgaagtgaaaacctttttattataaaataaaaattggaagaatggcatt

SEQ ID NO: 33768 - DNA, 1448 bp, Homo sapiens
ctttatgtgactgataaaaaacatcttaaagctcccatgttaaaatataaaaatggtttgacaatttttgattaccatgactgtcagttatatactatattatgaatatgcagtgtggttcttgttggttgatctgtttaccctgcatagattttaatctgtactttaaaacatctatgataaaaatagtgacagacagaaattaccccaaaaagagacctaggccaggaagggggtgggagctttcataggaatacagcctagaactctccattgtagccacgtatggaatcagccttacttacatgtaggacctttgtgctttaagagctctgggacatattggccaaatagaaaagaagaggacagtatttcaactcagtcatactcaatatttccaattaagatataatcctgacaccattgttcaattaactttgacgccagaagtcaaagccagaactgggaccccacagctcttaagtactggtccctatcctgcctatgcctatagccagccacactggtttccaagttctgtgatcattttgctacaatcatgttagggtgaaaatctgtacgtcagaactgttaaatgctaattatttttaagtgcatgagacctggggccttctctttctacttgcactctgcttatactagtttctatttgtagatctcaggccttcatcataaagacctctatcaactcacaaaagtatttgtctctattagagtggcatgtggtcatttgagtaaaaaaaaaaaaattacatgggtatcggattcataggcatcctgtccatctaagacaagtgttaattttattggcccatcagctggagcccctttcctcttagccataccattgttttctaccaaattaccactcaatatcttaatgaaagcactcaacattaagtgacataaacagtggcatttgggtaagcaacactcagtggggtgctgacatacagtttgggtaagattaaaaaacaccaaaggctgaaatctgtgagtaccaagaactgtgcatataggtttagaaattgactgtgtaccctagaatgtgcagtgtaatattttcaataggtgtttttttaaagaacactagatttttggaataatatatttctaattaggactatactgtttttcaatggtctgttaaaacatcatacagaatatttatttagtttattgtcatgtattggctaactttcaggggcctcagattccatatgtcttcagtggattgatgaatatcaggttaatttgtgcctgccccagccatctctactttattctgaggtattccacaatcctcttgttgcaggtgctgctaaaaaaaactcaaaattgtgtatcaaatattttctttcaactgtaaaaaatcatctgtgttaaagtgaataaaaagtgcattttgaataaccagcaaaaaaagt

SEQ ID NO: 33769 - DNA, 427 bp, Homo sapiens
acttgagaaaggaatatcaatttcataaatcctttcaaagaaccaacttttgacattgctttttctctgtggtttatctgttttctgtttcatgatttgagctctttaattccttcccttctccttactttgggtttaatttgctcttttttccctagttttaagtgaaagcttagatcattgattttcgaaactccttttaaaaaacaattattaacatttaaagctataagtttccctgtaagcattctttagctgcatcccacagatattgatatgatttaattattattccattcaaaatatttttaaattcctcttggaatttatttgacccatgggttgtttgaaagaatgtttccaaataattttcaaatatttggtatttttcaggtatccttttgttactgtgttttcatttaatgcc

SEQ ID NO: 33770 - DNA, 1210 bp, Homo sapiens
ccatcactggatatgattgattctaaaactatctatacctttttataggatgcaatttatctgaacctatggtgatcacataaaattaactattttctacttaaaaatgaaataattaacttgtatctccttggggttgtaaggccttcataatatagccaaatcctttaaaattcatgtgttggggggacatctgacatgtcctttcacgtgggattgaaggaaaggagccactggccacagatattgtacatatggatctttttatgaacataagactttattttgctgtttccctaatacatagtcatgcagttcatatttgaacatttttggtaatctggtaagcctatttaaaagtttttcttatagtgacctaaaatatacttttctctgatttccgttccttccttttcttctgctgtttataactctgggaagtctggtgctgacacaagctggagcaccaagagcagagtcttaaagaaaagacaaataggaaagggaataactgtccttactatagacacaaaggtgaataaataggactacacaaacctcaagacctagatcatatgctccatactcaatacgtttaaattttgttggtgaaacacaagagacaaatgtggagaacgaattgtattcaaagccaactgcaacatctcaaacataactagtctattagaaggtggtgcatggtagacagggttcaacccccagaggaggaagtctttaaaagggagatggttggtaaggcacccttgagagggttcagagcaggggcccagtgccagtgggagaatgaagtcaaaatcggagctcaaatgcatgatgcctacacggtgaacaattagaaaggctatagcttagatgactagtagagtttgttaactcattaactcatcaaaaatgtttatggagtatctgatatgctttaggcagcaccctgataagtggtagagacacaatagagaagaagacagatcagatctttagccttcagattcactgactatcaagcctatggcattgaggctcaagattcaattgtcaggattatattaatctaccctatttttatacgtatgttatgttgcagcatcatagctctcaaaaatatactgaaataaggcaaaacaaatacattaacatgcccattttgtcttactcattatgatgtgaacaaggtgttcccatgtcattgtaa

SEQ ID NO: 33771 - DNA, 563 bp, Homo sapiens
gtatttaccatgcttggtgtcctctgagcttcctggatttggtgtttgtcattaattctgggaaatcctcaagttattattacttcaaatatttcttctgttcctttctttcttccacttctgatattcccattatgcttatgttacaccttttgtaattaaactatggaattgaactatggaattatgtaattgaactatgtaaatgaactatggaactatgttccatctttttcattcaactgaagcagcaaaccaagcatcagaaccagactcagatatgacagattttggaattatcagactgggaacttaaaaaaactatgattaagacactaagtgctctaaagaaaaaagaagataatgatgactaaacactatgtgtttaatttttttcatcagttcatttaatacacaattactgacactaaagattttagtttagaggaaaagtgtatacttacaatactttaaacttttaaaatgaggctgtaggattatattcaaaaacattaaaattatggaattatgaattccaccttggaggacttaagaatgattga

SEQ ID NO: 33772 - DNA, 397 bp, Homo sapiens
ctgcagttcctgatactggtttttctacatgcttcagccaaagacatatactctttgatccctgagaacactatttcctcagtgtctttgcacatggagttcacttctctgcttgtgaagtctatgaatattgcatggctgatttgtcacaattttaagtcttcaacatctggagtgttctggcaagaatttgtaggaaaaatttttgaatcatcagattaccatagcacaaccttggagaataaaactcttttgctctgaagctcatctaataacctgatatctctcaaatgaatctatccaatgacagggaataccccatgttaaacagctgattcttgttctgaatacgtttattatcttgtagttagtaaataaatcaattggacccttaaga

SEQ ID NO: 33773 - DNA, 325 bp, Homo sapiens
tgtttccctgaatttaagtaaatttttggaaacctaccaagagaaaactaagtaaaagcttagtgtaaaaaaaaaattgcataaataagttctgattatacttcagatttagaagcagaatatatttatcaatgaaaaatttcttgtaagctgagcatggtggcacatgtctttagttccagctacttgggaggctgaggcaggaggattgcttgaagccaggagtttaaggctgcaatgtgctaggctcatgcctgtgaatagccactacaccctagcctgggcaacaaagtgagaccctgtctctggggggggaaaaaaaaaa

SEQ ID NO: 33774 - DNA, 315 bp, Homo sapiens
tacccaatttggagtacatatgtaaatttgttacatagatatattgctgatgctgaggtgtggggtacaaatgatccaatcaccttggtagtaaacctagtactcaataagtagttgggtactactaaagattaggttcaactacaaggttcaactacttattgagtactatgttcactacaaggacccaacttgtagtgaacacagaggagaacaagtcattccttgtttccctgtctttctccctcctctagtgtttattgtttccatctttatgtccacatgtacccaatgattagctcctacttatatgtg

SEQ ID NO: 33775 - DNA, 743 bp, Homo sapiens
ttcccttgtcatatttctgaaactccattataacatatgtaactcctttgtaaccaaaatttaggtaagcaggcttcctttgctctgaaggttttgagtacctggctgtatttgttgagtatttttaaaattttggatagtctcttaggcaacaataatcacaatatattcatcccttcagttctggagaaagcctgataccaggcacagcctactgaccccaaggagcctggcactgattggcatcacattgatctagaactggtccagccgacgaagagtaggaaaagagaagggctgctcagggaaacattggctgggggcacggaataagcacatagtaaaaagggaacatcagggtcaaatggaaatcacctgagacaggaaacagggagttcatttggccacactggaagaaaggcaagaaagaggaagacaagtcttggagtaccctggctgttctccacactcacaagacatcagctatatactctgcttggtgcataagaaagagaaaagagatgccttttgtgttttgagtaagaataattaaaccataaggaagaccatgtataaaactgatggaaataatagtcaccaaagtacagcacataccattttgtgtctaataacaatgtagcacagtaatgactgtacatgtcattgtatgtataccaaacaagattgttgtaaatcatattttttattacaacactaagttctgcttctgcattcctaggttt

SEQ ID NO: 33776 - DNA, 714 bp, Homo sapiens
ctaggcagtgctgcagagcagggagagacccatgttctatcttttaagcctttctgtcctcccagattcaagtctcagtcatctccttcctccagtgtcgctactgatagatccaaagcaaagaatgggcctcacaggggcccagaaacgctcatgaactgggaggcaaccttctgtacatacgcgaatgtttgggagagggtccacataggcgaatgttcgggagagggtccacataggcgaatgttcgggagagggtccacataggcgaatgttcgggagagggtccacataggcgaatgtttgggagaggacccacagctttcattaggtactcaaagggggtcctccctttccaaagggaatggccactgatctggtctgtattttgtaacttaagtactgaacaggaaggccaggaatttactaaagagatcagtgaagcagaaatctgggtttaagtcccaaacaaacctacagggcaaatcccagttctacagtttttagttgtatacctttaagtaagttactaaaatttctgagcctttataaaaaggaatttttttaaaaatcaaattttttaagatcgttaattggactgagaatgtcaagcccttagcaagtactcccaaaccatagctattaatattaccaatattattcttagctctcggaagagagggatctttcggtgccttaagtaaaatctacaaa

SEQ ID NO: 33777 - DNA, 262 bp, Homo sapiens
ggctctgatgccagggctactcctccctctaggccatcattagcaaagcctttcctactgatggtgtgggccctgcccatgggggcgtgggacctgttgcatggatgatctggtttgtaggagagccagagaggtggcaggtagcaggtgaggtagcttgtaatctgaatttgcatcttccaacttgagtcttctgcaaaggtcagcatacagggtggaataatactgaggaaaagtagtaactgaaattcaagtactcaat

SEQ ID NO: 33778 - DNA, 938 bp, Homo sapiens
ttcctagtctgatttttctcagtctcggcccttctcacatccctaacccacccccaattctcagataaaaattttcaggtttcctgctatgtcatgtgttgatatatgccagagatttggtcatacagttttaccttagtgctgaaagagaccagacttcatctggttaattattaggaggcagctgctggcacatactctagccattccagactttcatggagagagcttgatctcagtgttttggaaaaacaaaaagtaactccttcctatgaaaaggggtggggtgctcagcctcatcagtaatcggaggaatgcaaattaaaactgcagtgatatattggttttatgttcatcagattggtaaaaattaaagtctgacaaaaaatgttgggaaggatgtgaagcaactagaactctgcaagcagaagtgtaaatgagcacaaccattttggaaaaacaatttggtattgtctcataattaaagatgtacatgccctgtgacccagaaattccactcctgggtatttaccctaaagaactttacatatgtggaccaggagacatgtacaaaaacatccatagcaacactgttgacaatagcaaaacaaactaacagaaaattcaaactggagaaaaaatcccaatgtcgatcaacttgagattggataagttaatcatgatatgttcctacaatagaatactatatagcagtgaaaaagtaaatcgcagctatagcaacataaactaatctcaagaacaaaaagttgcagaagggtatatacgttaatattagaaataaaaaaatcaggtcaagaccaacctgggcaatatagtgagacactgtctctacaaaaaaattttaaaagtggctgggcgcagtagttcatgcctgtaatcccagccttttgggaggccaaggcgggaggatcccttga

SEQ ID NO: 33779 - DNA, 410 bp, Homo sapiens
agacaaatacccaaattgttttccccaaagtggttgtgctcatttacacttctgcttgcagagttctagttgcttcacatccttcccaacattttttgtcagactttaatttttaccaatgtcgatcaacttgagattggataagttaatcatgatatgttcctacaatagaatactatatagcagtgaaaaagtaaatcgcagctatagcaacataaactaatctcaagaacaaaaagttgcagaagggtatatacgttaatattagaaataaaaaaatcaggtcaagaccaacctgggcaatatagtgagacactgtctctacaaaaaaattttaaaagtggctgggcgcagtagttcatgcctgtaatcccagccttttgggaggccaaggcgggaggatcccttga

SEQ ID NO: 33780 - DNA, 593 bp, Homo sapiens
agtttactccctgccatgtttgactattagatgtttggagaacaatgagatacccattttggtggggaggcgtgagttttaaggaaggaagtcgtgggaaaggaaggcaggcaggggaggccatttgaggatggactcttagtgcctggctgagggggttatctctaacttggggagccagggaaaggtaaaatgtacataacatcagatttaccattttaaccattttcagtgtatggttccctgggcattaattacactcacaatgttttacaaccatcaccactatccatctccagagccttttttaaaaatcatcccatacagaaactctgtacccgttacacaatcattccccatttccactcccaccagcctctggtaacctctgtactactttctgtcttgatgaatttgcctattctagttacctcatagaagcagaatcagacaatccttgtccttttgcatctggcttatttcacttagcatgatgttttccagccttatccgggctgtagaatgtgtcagaattttattccctttttttaagttaaaaaatatttatccttatgacctggcagtcacatgag

SEQ ID NO: 33781 - DNA, 410 bp, Homo sapiens
tttcaaatcaaatcaacaaacgtttgcactccagcaaggctctataggagataaaacgacatggtttacataaaaagatacatagtaattaagataacatatcctaggtgccaaatgagtggttcagataagtgctatggcatgagaggatggaatgattgccatgacctggaattgtcagagagaactttgcaaaggaaattggtgagctgagcctgaatggatgagtagaaataatatgaaatctttgtaatagactgataattgcactttgattaatttgcccagcacaccatgttagaaggtaccttttaggttgattattttaataccacctacatctcattatcttggaatatatctaataatagaaaaaaaaaaaagcccgttggagctggggccagtagcac

SEQ ID NO: 33782 - DNA, 482 bp, Homo sapiens
ggtgtgatcttggctcaccacaacctccgactcccaggttcaagtgattctcctgcctcagcctcccgagtacctgggattacaggcatgtgccaccaggcctggctaattttagtagagacaggatttctccatgttggtcaggttggtctcaaactcccaacttcaggtgatctgcctgccttggcctcccagagtgctaggattacaggcgtgagccaccgcacccagcctatttctgcaaccttctaagcccaacagtccctctctctgttccagcttgtgactttgccctttgcccccttttccaatggggaaaaatgagtgacaagaaagcatggggaagatgtgctaactactgtgtcccggacatgtaaggtacagttgctcttctcttaggattcaactcaactatattttctagtctgcctctcctaactaccttatgcatcaatgtaataaacttcctagtgttcaccttg

SEQ ID NO: 33783 - DNA, 3338 bp, Homo sapiens
catgtgggcatcactggcgagagcgacggaccatccaagggcaagcacaattttcctgagcaaatctcaaacggatgtgcgagaaaagaggaagagcaaccatttgaaccatgtatctccagggcagcttactaaaaagtatagctcatgctcaacaatatttctagatgacagcacagtcagccagcctaatcttagaaccacagtaaaatgtgtgaccttagcaatatattaccacataaagaacagagatgcaaatagatccctggatatttttgatgagagatcacatccacttacacgagaaaaagttccagaggaatactttaagcatgatcctgagcacaaatttatttacagatttgttcgtactctttttagtgctgcacagctaacagctgaatgtgcaatagtaactttggtttacttagaaaggcttttaacttatgctgaaatcgacatttgtcccaccaactggaaaaggattgttctgggagccattcttcttgcctccaaggtttgggacgatcaggctgtatggaatgtggactactgccagatcctcaaggacattacagttgaggacatgaatgaaatggaaaggcattttctggagcttcttcagtttaatattaatgttcctgccagtgtttatgccaaatactactttgaccttcgctccttagcagatgacaacaacctgaattttctatttgctcctcttagcaaagaaagagcacagaacctagaggctatttctagattgtgtgaagacaaagacttgtgtagagccgctatgagaaggtctttcagtgctgataacttcattggtattcagcgctctaaagccatcctctcttaaaaggagaaatgaggggttataacgtcatgggaccttcatctacaaagactggagaaataccacctttcctgctcaaaaaccagcaaaattagtgttttcatcaaaaggaaagatctcaaattcaagagactcatggacaacaaggattatactccacaggaaagaatgggaccttgtcaatgcaacaaaacactcttctgtcctttttaatgtaaacagagttacaaaaaccactccaaagtgaaggctcccatcctacacacagatatttgcttactgtgtgggccgatagctgtgaactatgtaaggttttttaaacaatagtttaaatttttagactttaaagacactaaccatataacttttatgtttcttccagtttctctccctccccccgcattttgctgcatatgcctttaaaatcaatgcagtattaccattaaaacatgggactctaactaaagccacttaggagcagacagcagcgttgttaggtactgaagggttcttcctccctactgttaaccattgaagctgctagtcattggcaatcattttaaaccaaaaagctgctggataacatttgtcattcatattctttgcaagcattactttagcattttagcatgtttggggtcataaacagaggaagtatcagttattgatatctacttctattggagtccatgttgcatttcttgtgaactataaatggtgcttctcattttctgataatttttctcttgctaaataaatgtattaaaagatattttcataatgccaaccaacatggtggttcagtgacgatgagaaaaagtgaagcagttttaagcttgaatatagtttgggccctccaaggcactgcagcatgagtataaatgctataaacctttaaaaaacatgatttgaaagttttttgttttgtttgtttgtttttaaagagatgggggtcttactgcgttgtccaggctggagtgcagtggcttttcacaggtgcaatcattgtgcactcactgcagcctagaacttcctggtctcaagccatcctctagcctcagccacacaagtagctgggactacaagtgcaactggcacctgtctcctgaatattaagcttttaattttttgtttcggtcactcttgatagcagacattgactgaaacaaaaaattaaaagctttatattcaaaatttgcaaaatgaagctgggtgtggtggtgcacgcctatagtcccagctacttgggaggctgaggctggaggattgcttgaggtcaagtattggaggctgcagtgtaccatgatggtgcctataggaatagctactgcactccaacctggacaacgttatcaagaccccatctcttagaaaaatgcaaaattaaatgcaaaagaaatgggctgggcatagtgattcatgcctgtaatctcagtaccctgggaggctgaggtggaaggattgcttgagtgcaggagttcaagaccagtctaggcaacatagtgagaccctgcctgtaaaaaaaaataataaaaatagttggatatggtggcatgtgtctgtagtcccagccactctggaggctaaggtgggaggatcagtagagcccaggaggtcaaggctgcagtgggccatgatcatgtcactgctctccaacctgggcgacatccagaccctgtctcaaagaaaaaagcagaagaaaaatgttcagacaaggttttgtaaaggtttgtagcatttatatttctacaagtatcaaagcttaaaattacactgaacttttggaataccttgtatctccataaaatgccctctttttaaaagtagttacccgcagagctgtgctctatatgctttgattaccgcagtttctttaaaggaagattttgaagagcagtgttaattaacatgtaataaaaggaattggaccctaattatagaaggtgatatgaacagctgttttatcatcctacatgctaccaagctgtaggtgtcccattaagtcctgctatttaagaaatacttacataacccttaggaactcttcaggctttaaaaggcaaggagcaaataattttaggagaccgataatgtcacctaaatttgaaatactaagaagaggttagtgttctcaactatgtgaaatctgtttctcctactttctcaaatctaatcctaggaatcttgcttataaacaaagcatttctgggacaggagtacttcctctattatagcaatgcttcacatcatattgtgctgcagtttccatcatttttaaaggacagagacataaatgataaataatggtatacaaatattacaatctaccacctcaaaaaaacaaatattgtttatggaattcagagtttggagattcaagtattgattgcagttttattttgaaaagaatgctacaatttatgtggtttttatttctcatgtttatattaaaagctaataaactctattttaattaaaa

SEQ ID NO: 33784 - DNA, 2858 bp, Homo sapiens
tggaactctgaagaatgaggcccgagtcagcagcacaagtgcatcggaggccgtaaccttcaaccttcatcccagttccagagtgctgggatgcagaagggaccacaagaatgaaatggaaaggcattttctggagcttcttcagtttaatattaatgttcctgccagtgtttatgccaaatactactttgaccttcgctccttagcagatgacaacaacctgaattttctatttgctcctcttagcaaagaaagagcacagaacctagaggctatttctagattgtgtgaagacaaagacttgtgtagagccgctatgagaaggtctttcagtgctgataacttcattggtattcagcgctctaaagccatcctctcttaaaaggagaaatgaggggttataacgtcatgggaccttcatctacaaagactggagaaataccacctttcctgctcaaaaaccagcaaaattagtgttttcatcaaaaggaaagatctcaaattcaagagactcatggacaacaaggattatactccacaggaaagaatgggaccttgtcaatgcaacaaaacactcttctgtcctttttaatgtaaacagagttacaaaaaccactccaaagtgaaggctcccatcctacacacagatatttgcttactgtgtgggccgatagctgtgaactatgtaaggttttttaaacaatagtttaaatttttagactttaaagacactaaccatataacttttatgtttcttccagtttctctccctccccccgcattttgctgcatatgcctttaaaatcaatgcagtattaccattaaaacatgggactctaactaaagccacttaggagcagacagcagcgttgttaggtactgaagggttcttcctccctactgttaaccattgaagctgctagtcattggcaatcattttaaaccaaaaagctgctggataacatttgtcattcatattctttgcaagcattactttagcattttagcatgtttggggtcataaacagaggaagtatcagttattgatatctacttctattggagtccatgttgcatttcttgtgaactataaatggtgcttctcattttctgataatttttctcttgctaaataaatgtattaaaagatattttcataatgccaaccaacatggtggttcagtgacgatgagaaaaagtgaagcagttttaagcttgaatatagtttgggccctccaaggcactgcagcatgagtataaatgctataaacctttaaaaaacatgatttgaaagttttttgttttgtttgtttgtttttaaagagatgggggtcttactgcgttgtccaggctggagtgcagtggcttttcacaggtgcaatcattgtgcactcactgcagcctagaacttcctggtctcaagccatcctctagcctcagccacacaagtagctgggactacaagtgcaactggcacctgtctcctgaatattaagcttttaattttttgtttcggtcactcttgatagcagacattgactgaaacaaaaaattaaaagctttatattcaaaatttgcaaaatgaagctgggtgtggtggtgcacgcctatagtcccagctacttgggaggctgaggctggaggattgcttgaggtcaagtattggaggctgcagtgtaccatgatggtgcctataggaatagctactgcactccaacctggacaacgttatcaagaccccatctcttagaaaaatgcaaaattaaatgcaaaagaaatgggctgggcatagtgattcatgcctgtaatctcagtaccctgggaggctgaggtggaaggattgcttgagtgcaggagttcaagaccagtctaggcaacatagtgagaccctgcctgtaaaaaaaaataataaaaatagttggatatggtggcatgtgtctgtagtcccagccactctggaggctaaggtgggaggatcagtagagcccaggaggtcaaggctgcagtgggccatgatcatgtcactgctctccaacctgggcgacatccagaccctgtctcaaagaaaaaagcagaagaaaaatgttcagacaaggttttgtaaaggtttgtagcatttatatttctacaagtatcaaagcttaaaattacactgaacttttggaataccttgtatctccataaaatgccctctttttaaaagtagttacccgcagagctgtgctctatatgctttgattaccgcagtttctttaaaggaagattttgaagagcagtgttaattaacatgtaataaaaggaattggaccctaattatagaaggtgatatgaacagctgttttatcatcctacatgctaccaagctgtaggtgtcccattaagtcctgctatttaagaaatacttacataacccttaggaactcttcaggctttaaaaggcaaggagcaaataattttaggagaccgataatgtcacctaaatttgaaatactaagaagaggttagtgttctcaactatgtgaaatctgtttctcctactttctcaaatctaatcctaggaatcttgcttataaacaaagcatttctgggacaggagtacttcctctattatagcaatgcttcacatcatattgtgctgcagtttccatcatttttaaaggacagagacataaatgataaataatggtatacaaatattacaatctaccacctcaaaaaaacaaatattgtttatggaattcagagtttggagattcaagtattgattgcagttttattttgaaaagaatgctacaatttatgtggtttttatttctcatgtttatattaaaagctaataaactctattttaattaaaa

SEQ ID NO: 33785 - DNA, 2483 bp, Homo sapiens
tctagaggatcctgtggatgaggaacgtcagtcatgggaccttcatctacaaagactggagaaataccacctttcctgctcaaaaaccagcaaaattagtgttttcatcaaaaggaaagatctcaaattcaagagactcatggacaacaaggattatactccacaggaaagaatgggaccttgtcaatgcaacaaaacactcttctgtcctttttaatgtaaacagagttacaaaaaccactccaaagtgaaggctcccatcctacacacagatatttgcttactgtgtgggccgatagctgtgaactatgtaaggttttttaaacaatagtttaaatttttagactttaaagacactaaccatataacttttatgtttcttccagtttctctccctccccccgcattttgctgcatatgcctttaaaatcaatgcagtattaccattaaaacatgggactctaactaaagccacttaggagcagacagcagcgttgttaggtactgaagggttcttcctccctactgttaaccattgaagctgctagtcattggcaatcattttaaaccaaaaagctgctggataacatttgtcattcatattctttgcaagcattactttagcattttagcatgtttggggtcataaacagaggaagtatcagttattgatatctacttctattggagtccatgttgcatttcttgtgaactataaatggtgcttctcattttctgataatttttctcttgctaaataaatgtattaaaagatattttcataatgccaaccaacatggtggttcagtgacgatgagaaaaagtgaagcagttttaagcttgaatatagtttgggccctccaaggcactgcagcatgagtataaatgctataaacctttaaaaaacatgatttgaaagttttttgttttgtttgtttgtttttaaagagatgggggtcttactgcgttgtccaggctggagtgcagtggcttttcacaggtgcaatcattgtgcactcactgcagcctagaacttcctggtctcaagccatcctctagcctcagccacacaagtagctgggactacaagtgcaactggcacctgtctcctgaatattaagcttttaattttttgtttcggtcactcttgatagcagacattgactgaaacaaaaaattaaaagctttatattcaaaatttgcaaaatgaagctgggtgtggtggtgcacgcctatagtcccagctacttgggaggctgaggctggaggattgcttgaggtcaagtattggaggctgcagtgtaccatgatggtgcctataggaatagctactgcactccaacctggacaacgttatcaagaccccatctcttagaaaaatgcaaaattaaatgcaaaagaaatgggctgggcatagtgattcatgcctgtaatctcagtaccctgggaggctgaggtggaaggattgcttgagtgcaggagttcaagaccagtctaggcaacatagtgagaccctgcctgtaaaaaaaaataataaaaatagttggatatggtggcatgtgtctgtagtcccagccactctggaggctaaggtgggaggatcagtagagcccaggaggtcaaggctgcagtgggccatgatcatgtcactgctctccaacctgggcgacatccagaccctgtctcaaagaaaaaagcagaagaaaaatgttcagacaaggttttgtaaaggtttgtagcatttatatttctacaagtatcaaagcttaaaattacactgaacttttggaataccttgtatctccataaaatgccctctttttaaaagtagttacccgcagagctgtgctctatatgctttgattaccgcagtttctttaaaggaagattttgaagagcagtgttaattaacatgtaataaaaggaattggaccctaattatagaaggtgatatgaacagctgttttatcatcctacatgctaccaagctgtaggtgtcccattaagtcctgctatttaagaaatacttacataacccttaggaactcttcaggctttaaaaggcaaggagcaaataattttaggagaccgataatgtcacctaaatttgaaatactaagaagaggttagtgttctcaactatgtgaaatctgtttctcctactttctcaaatctaatcctaggaatcttgcttataaacaaagcatttctgggacaggagtacttcctctattatagcaatgcttcacatcatattgtgctgcagtttccatcatttttaaaggacagagacataaatgataaataatggtatacaaatattacaatctaccacctcaaaaaaacaaatattgtttatggaattcagagtttggagattcaagtattgattgcagttttattttgaaaagaatgctacaatttatgtggtttttatttctcatgtttatattaaaagctaataaactctattttaattaaaa

SEQ ID NO: 33786 - DNA, 3158 bp, Homo sapiens
catgtgggcatcactggcgagagcgacggaccatccaagggcaagcacaattttcctgagcaaatctcaaacggatgtgcgagaaaagaggaagagcaaccatttgaaccatgtatctccagggcagcttactaaaaagtatagctcatgctcaacaatatttctagatgacagcacagtcagccagcctaatcttagaaccacagtaaaatgtgtgaccttagcaatatattaccacataaagaacagagatgcaaatagatccctggatatttttgatgagagatcacatccacttacacgagaaaaagttccagaggaatactttaagcatgatcctgagcacaaatttatttacagatttgttcgtactctttttagtgctgcacagctaacagctgaatgtgcaatagtaactttggtttacttagaaaggcttttaacttatgctgaaatcgacatttgtcccaccaactggaaaaggattgttctgggagccattcttcttgcctccaaggtttgggacgatcaggctgtatggaatgtggactactgccagatcctcaaggacattacagttgaggacatgaatgaaatggaaaggcattttctggagcttcttcagtttaatattaatgttcctgccagtgtttatgccaaatactactttgaccttcgctccttagcagatgacaacaacctgaattttctatttgctcctcttagcaaagaaagagcacagaacctagaggctatttctagattgtgtgaagacaaagacttgtgtagagccgctatgagaaggtctttcagtgctgataacttcattggtattcagcgctctaaagccatcctctcttaaaaggagaaatgaggggttataacgtcatgggaccttcatctacaaagactggagaaataccacctttcctgctcaaaaaccagcaaaattagtgttttcatcaaaaggaaagatctcaaattcaagagactcatggacaacaaggattatactccacaggaaagaatgggaccttgtcaatgcaacaaaacactcttctgtcctttttaatgtaaacagagttacaaaaaccactccaaagtgaaggctcccatcctacacacagatatttgcttactgtgtgggccgatagctgtgaactatgtaaggttttttaaacaatagtttaaatttttagactttaaagacactaaccatataacttttatgtttcttccagtttctctccctccccccgcattttgctgcatatgcctttaaaatcaatgcagtattaccattaaaacatgggactctaactaaagccacttaggagcagacagcagcgttgttaggtactgaagggttcttcctccctactgttaaccattgaagctgctagtcattggcaatcattttaaaccaaaaagctgctggataacatttgtcattcatattctttgcaagcattactttagcattttagcatgtttggggtcataaacagaggaagtatcagttattgatatctacttctattggagtccatgttgcatttcttgtgaactataaatggtgcttctcattttctgataatttttctcttgctaaataaatgtattaaaagatattttcataatgccaaccaacatggtggttcagtgacgatgagaaaaagtgaagcagttttaagcttgaatatagtttgggccctccaaggcactgcagcatgagtataaatgctataaacctttaaaaaacatgatttgaaagttttttgttttgtttgtttgtttttaaagagatgggggtcttactgcgttgtccaggctggagtgcagtggcttttcacaggtgcaatcattgtgcactcactgcagcctagaacttcctggtctcaagccatcctctagcctcactacttgggaggctgaggctggaggattgcttgaggtcaagtattggaggctgcagtgtaccatgatggtgcctataggaatagctactgcactccaacctggacaacgttatcaagaccccatctcttagaaaaatgcaaaattaaatgcaaaagaaatgggctgggcatagtgattcatgcctgtaatctcagtaccctgggaggctgaggtggaaggattgcttgagtgcaggagttcaagaccagtctaggcaacatagtgagaccctgcctgtaaaaaaaaataataaaaatagttggatatggtggcatgtgtctgtagtcccagccactctggaggctaaggtgggaggatcagtagagcccaggaggtcaaggctgcagtgggccatgatcatgtcactgctctccaacctgggcgacatccagaccctgtctcaaagaaaaaagcagaagaaaaatgttcagacaaggttttgtaaaggtttgtagcatttatatttctacaagtatcaaagcttaaaattacactgaacttttggaataccttgtatctccataaaatgccctctttttaaaagtagttacccgcagagctgtgctctatatgctttgattaccgcagtttctttaaaggaagattttgaagagcagtgttaattaacatgtaataaaaggaattggaccctaattatagaaggtgatatgaacagctgttttatcatcctacatgctaccaagctgtaggtgtcccattaagtcctgctatttaagaaatacttacataacccttaggaactcttcaggctttaaaaggcaaggagcaaataattttaggagaccgataatgtcacctaaatttgaaatactaagaagaggttagtgttctcaactatgtgaaatctgtttctcctactttctcaaatctaatcctaggaatcttgcttataaacaaagcatttctgggacaggagtacttcctctattatagcaatgcttcacatcatattgtgctgcagtttccatcatttttaaaggacagagacataaatgataaataatggtatacaaatattacaatctaccacctcaaaaaaacaaatattgtttatggaattcagagtttggagattcaagtattgattgcagttttattttgaaaagaatgctacaatttatgtggtttttatttctcatgtttatattaaaagctaataaactctattttaattaaaa

SEQ ID NO: 33787 - DNA, 3270 bp, Homo sapiens
catgtgggcatcactggcgagagcgacggaccatccaagggcaagcacaattttcctgagcaaatctcaaacggatgtgcgagaaaagaggaagagcaaccatttgaaccatgtatctccagggcagcttactaaaaagtatagctcatgctcaacaatatttctagatgacagcacagtcagccagcctaatcttagaaccacagtaaaatgtgtgaccttagcaatatattaccacataaagaacagagatgcaaatagatccctggatatttttgatgagagatcacatccacttacacgagaaaaagttccagaggaatactttaagcatgatcctgagcacaaatttatttacagatttgttcgtactctttttagtgctgcacagctaacagctgaatgtgcaatagtaactttggtttacttagaaaggcttttaacttatgctgaaatcgacatttgtcccaccaactggaaaaggattgttctgggagccattcttcttgcctccaaggtttgggacgatcaggctgtatggaatgtggactactgccagatcctcaaggacattacagttgaggacatgaatgaaatggaaaggcattttctggagcttcttcagtttaatattaatgttcctgccagtgtttatgccaaatactactttgaccttcgctccttagcagatgacaacaacctgaattttctatttgctcctcttagcaaagaaagagcacagaacctagaggctatttctagattgtgtgaagacaaagacttgtgtagagccgctatgagaaggtctttcagtgctgataacttcattggtattcagcgctctaaagccatcctctcttaaaaggagaaatgaggggttataacgtcatgggaccttcatctacaaagactggagaaataccacctttcctgctcaaaaaccagcaaaattagtgttttcatcaaaaggaaagatctcaaattcaagagactcatggacaacaaggattatactccacaggaaagaatgggaccttgtcaatgcaacaaaacactcttctgtcctttttaatgtaaacagagttacaaaaaccactccaaagtgaaggctcccatcctacacacagatatttgcttactgtgtgggccgatagctgtgaactatgtaaggttttttaaacaatagtttaaatttttagactttaaagacactaaccatataacttttatgtttcttccagtttctctccctccccccgcattttgctgcatatgcctttaaaatcaatgcagtattaccattaaaacatgggactctaactaaagccacttaggagcagacagcagcgttgttaggtactgaagggttcttcctccctactgttaaccattgaagctgctagtcattggcaatcattttaaaccaaaaagctgctggataacatttgtcattcatattctttgcaagcattactttagcattttagcatgtttggggtcataaacagaggaagtatcagttattgatatctacttctattggagtccatgttgcatttcttgtgaactataaatggtgcttctcattttctgataatttttctcttgctaaataaatgtattaaaagatattttcataatgccaaccaacatggtggttcagtgacgatgagaaaaagtgaagcagttttaagcttgaatatagtttgggccctccaaggcactgcagcatgagtataaatgctataaacctttaaaaaacatgatttgaaagttttttgttttgtttgtttgtttttaaagagatgggggtcttactgcgttgtccaggctggagtgcagtggcttttcacaggtgcaatcattgtgcactcactgcagcctagaacttcctggtctcaagccatcctctagcctcagccacacaagtagctgggactacaagtgcaactggcacctgtctcctgaatattaagcttttaatttttgcaaaatgaagctgggtgtggtggtgcacgcctatagtcccagctacttgggaggctgaggctggaggattgcttgaggtcaagtattggaggctgcagtgtaccatgatggtgcctataggaatagctactgcactccaacctggacaacgttatcaagaccccatctcttagaaaaatgcaaaattaaatgcaaaagaaatgggctgggcatagtgattcatgcctgtaatctcagtaccctgggaggctgaggtggaaggattgcttgagtgcaggagttcaagaccagtctaggcaacatagtgagaccctgcctgtaaaaaaaaataataaaaatagttggatatggtggcatgtgtctgtagtcccagccactctggaggctaaggtgggaggatcagtagagcccaggaggtcaaggctgcagtgggccatgatcatgtcactgctctccaacctgggcgacatccagaccctgtctcaaagaaaaaagcagaagaaaaatgttcagacaaggttttgtaaaggtttgtagcatttatatttctacaagtatcaaagcttaaaattacactgaacttttggaataccttgtatctccataaaatgccctctttttaaaagtagttacccgcagagctgtgctctatatgctttgattaccgcagtttctttaaaggaagattttgaagagcagtgttaattaacatgtaataaaaggaattggaccctaattatagaaggtgatatgaacagctgttttatcatcctacatgctaccaagctgtaggtgtcccattaagtcctgctatttaagaaatacttacataacccttaggaactcttcaggctttaaaaggcaaggagcaaataattttaggagaccgataatgtcacctaaatttgaaatactaagaagaggttagtgttctcaactatgtgaaatctgtttctcctactttctcaaatctaatcctaggaatcttgcttataaacaaagcatttctgggacaggagtacttcctctattatagcaatgcttcacatcatattgtgctgcagtttccatcatttttaaaggacagagacataaatgataaataatggtatacaaatattacaatctaccacctcaaaaaaacaaatattgtttatggaattcagagtttggagattcaagtattgattgcagttttattttgaaaagaatgctacaatttatgtggtttttatttctcatgtttatattaaaagctaataaactctattttaattaaaa

SEQ ID NO: 33788 - DNA, 3034 bp, Homo sapiens
catgtgggcatcactggcgagagcgacggaccatccaagggcaagcacaattttcctgagcaaatctcaaacggatgtgcgagaaaagaggaagagcaaccatttgaaccatgtatctccagggcagcttactaaaaagtatagctcatgctcaacaatatttctagatgacagcacagtcagccagcctaatcttagaaccacagtaaaatgtgtgaccttagcaatatattaccacataaagaacagagatgcaaatagatccctggatatttttgatgagagatcacatccacttacacgagaaaaagttccagaggaatactttaagcatgatcctgagcacaaatttatttacagatttgttcgtactctttttagtgctgcacagctaacagctgaatgtgcaatagtaactttggtttacttagaaaggcttttaacttatgctgaaatcgacatttgtcccaccaactggaaaaggattgttctgggagccattcttcttgcctccaaggtttgggacgatcaggctgtatggaatgtggactactgccagatcctcaaggacattacagttgaggacatgaatgaaatggaaaggcattttctggagcttcttcagtttaatattaatgttcctgccagtgtttatgccaaatactactttgaccttcgctccttagcagatgacaacaacctgaattttctatttgctcctcttagcaaagaaagagcacagaacctagaggctatttctagattgtgtgaagacaaagacttgtgtagagccgctatgagaaggtctttcagtgctgataacttcattggtattcagcgctctaaagccatcctctcttaaaaggagaaatgaggggttataacgtcatgggaccttcatctacaaagactggagaaataccacctttcctgctcaaaaaccagcaaaattagtgttttcatcaaaaggaaagatctcaaattcaagagactcatggacaacaaggattatactccacaggaaagaatgggaccttgtcaatgcaacaaaacactcttctgtcctttttaatgtaaacagagttacaaaaaccactccaaagtgaaggctcccatcctacacacagatatttgcttactgtgtgggccgatagctgtgaactatgtaaggttttttaaacaatagtttaaatttttagactttaaagacactaaccatataacttttatgtttcttccagtttctctccctccccccgcattttgctgcatatgcctttaaaatcaatgcagtattaccattaaaacatgggactctaactaaagccacttaggagcagacagcagcgttgttaggtactgaagggttcttcctccctactgttaaccattgaagctgctagtcattggcaatcattttaaaccaaaaagctgctggataacatttgtcattcatattctttgcaagcattactttagcattttagcatgtttggggtcataaacagaggaagtatcagttattgatatctacttctattggagtccatgttgcatttcttgtgaactataaatggtgcttctcattttctgataatttttctcttgctaaataaatgtattaaaagatattttcataatgccaaccaacatggtggttcagtgacgatgagaaaaagtgaagcagttttaagcttgaatatagtttgggccctccaaggcactgcagcatgagtataaatgctataaacctttaaaaaacatgatttgaaagttttttgttttgtttgtttgtttttaaagagatgggggtcttactgcgttgtccaggctggagtgcagtggcttttcacaggtgcaatcattgtgcactcactgcagcctagaacttcctggtctcaagccatcctctagcctcagccacacaagtagctgggactacaagtgcaactggcacctgtctcctgaatattaagcttttaattttttgtttcggtcactcttgatagcagacattgactgaaacaaaaaattaaaagctttatattcaaaatttgcaaaatgaagctgggtgtggtggtgcacgcctatagtcccagctacttgggaggctgaggctggaggattgcttgaggtcaagtattggaggctgcagtgtaccatgatggtgcctataggaatagctactgcactccaacctggacaacgttatcaagaccccatctcttagaaaaatgcaaaattaaatgcaaaagaaatgggctgggcatagtgattcatgcctgtaatctcagtaccctgggaggctgaggtggaaggattgcttgagtgcaggagttcaagaccagtctaggcaacatagtgagaccctgcctgtaaaaaaaaataataaaaatagttggatatggtggcatgtgtctgtagtcccagccactctggaggctaaggtgggaggatcagtagagcccaggaggtcaaggctgcagtgggccatgatcatgtcactgctctccaacctgggcgacatccagaccctgtctcaaagaaaaaagcagaagaaaaatgttcagacaaggttttgtaaaggtttgtagcatttatatttctacaagtatcaaagcttaaaattacactgaacttttggaataccttgtatctccataaaatgccctctttttaaaagtagttacccgcagagctgtgctctatatgctttgattaccgcagtttctttaaaggaagattttgaagagcagtgttaattaacatgtaataaaaggaattggaccctaattatagaaggtgatatgaacagctgtttatcatctacatggtaacaaggtgttggtgtccattagtctgctatttagaaatattaataacttagaatcttcgggttaagggagggcactatttggggaccggatgtgccaattgaacaaaaaggggggctaaaggagagggtcattaaatatcggatggttaaagaatggggaacctaaagaacatggggggtagaggaaaaggaggtcac

SEQ ID NO: 33789 - DNA, 954 bp, Homo sapiens
catgtgggcatcactggcgagagcgacggaccatccaagggcaagcacaattttcctgagcaaatctcaaacggatgtgcgagaaaagaggaagagcaaccatttgaaccatgtatctccagggcagcttactaaaaagtatagctcatgctcaacaatatttctagatgacagcacagtcagccagcctaatcttagaaccacagtaaaatgtgtgaccttagcaatatattaccacataaagaacagagatgcaaatagatccctggatatttttgatgagagatcacatccacttacacgagaaaaagttccagaggaatactttaagcatgatcctgagcacaaatttatttacagatttgttcgtactctttttagtgctgcacagctaacagctgaatgtgcaatagtaactttggtttacttagaaaggcttttaacttatgctgaaatcgacatttgtcccaccaactggaaaaggattgttctgggagccattcttcttgcctccaaggtttgggacgatcaggctgtatggaatgtggactactgccagatcctcaaggacattacagttgaggacatgaatgaaatggaaaggcattttctggagcttcttcagtttaatattaatgttcctgccagtgtttatgccaaatactactttgaccttcgctccttagcagatgacaacaacctgaattttctatttgctcctcttagcaaagaaagagcacagaacctagagcttgtgactttgccctttgcccccttttccaatggggaaaaatgagtgacaagaaagcatggggaagatgtgctaactactgtgtcccggacatgtaaggtacagttgctcttctcttaggattcaactcaactatattttctagtctgcctctcctaactaccttatgcatcaatgtaataaacttcctagtgttcaccttg

SEQ ID NO: 33790 - DNA, 1445 bp, Homo sapiens
ggacagcagagacaacagtcacagtaaccctgtctagagcgttcctggagcccaagctcctctccacagaggaggacagagcaggcagcagagaccatggggcccccctcagcttgtccccacagagaatgcatcccctggcaggggctcttgctcacagcctcacttttaactttctggaacgcacccaccactgcctggctctttattgcatcagcgccctttgaagttgctgaaggggagaatgttcatctctctgtggtttatctgcccgagaatctttacagctatggctggtacaaagggaaaacggtggagcccaaccagctaatcgcagcatatgtaatagacactcacgttaggactccagggcctgcatacagcggtcgagagacaatatcacccagtggagatctgcatttccagaacgtcaccctagaggacacgggatactacaacctacaagtcacatacagaaattctcagattgaacaggcatctcaccatctccgtgtatacggagaatgttctaaatttgactctgagatctctgaggatgcagcatggccccaagacactttctgttggtcactctatccacagagtcagtggctcagccctccatccaagccagcagcaccacagtcacagagaagggctccgtggtcctgacctgccacacaaataacactggaacctctttccagtggattttcaacaaccagcgtctgcaggtcacgaagaggatgaagctgtcctggtttaaccatgtgctcaccatagaccccatcaggcaggaggacgctggggagtatcagtgtgaggtctccaacccagtcagctccaacaggagcgaccccctcaagctgactgtaaaatatgacaacactctaggcatcctgatcggggtcctggttgggagtcttctggtggctgcacttgtgtgtttcctgctcctccgaaaaactggcagggccagcgatcagagtgacttcagggagcagcagcccccagcctccacccccggccatggaccctctgacagctccatctcctatggaattgctacactctgacacaaacatttactgctggatcgaccacaaagcagatgtggcttcttaggttcctctgggagctgctcctgtgggttgatggagcgtccctgaagcccccagccctggggatggggaaggacatggagcctgagccagagaaccagctctgagtcctgaggagacacaggcctggggacaggaagggatgggggtccctgctgaatatatagagacctcaacagactgccccgggctctgggtgggccaaggcgaaggcttcccatcaccacaggaagtgggggcttgcagggaaagtgaatgggcctatggcccacccggggtcacctggaaaggatctgaataaaggggaaacttcctctcaaaaac

SEQ ID NO: 33791 - DNA, 424 bp, Homo sapiens
caaaaatattttaattaattttttcataaacctttcacaacttgcttaaacatttagctttattttatccaacttaaagcaattctttaaccttttaatctaggcaaaaaaaatccatcttctcataagagctttagagactcttaggcttctttactaggacagctgagctctaaagcatgtgaacttcacccaccacaactgtttgctccatctcaagctcagaaccctgccctgtctgcctaaccacaagtatccaacccagtatctacaaataaatgcttcactcatctactcctttcatgaaacattgcaaatctttttcttactagtgcttgggttgcagggaaagtgaatgggcctatggcccacccggggtcacctggaaaggatctgaataaaggggaaacttcctctcaaaaac

SEQ ID NO: 33792 - DNA, 1362 bp, Homo sapiens
ggacagcagagacaacagtcacagtaaccctgtctagagcgttcctggagcccaagctcctctccacagaggaggacagagcaggcagcagagaccatggggcccccctcagcttgtccccacagagaatgcatcccctggcaggggctcttgctcacagcctcacttttaactttctggaacgcacccaccactgcctggctctttattgcatcagcgccctttgaagttgctgaaggggagaatgttcatctctctgtggtttatctgcccgagaatctttacagctatggctggtacaaagggaaaacggtggagcccaaccagctaatcgcagcatatgtaatagacactcacgttaggactccagggcctgcatacagcggtcgagagacaatatcacccagtggagatctgcatttccagaacgtcaccctagaggacacgggatactacaacctacaagtcacatacagaaattctcagattgaacaggcatctcaccatctccgtgtatacgagtcagtggctcagccctccatccaagccagcagcaccacagtcacagagaagggctccgtggtcctgacctgccacacaaataacactggaacctctttccagtggattttcaacaaccagcgtctgcaggtcacgaagaggatgaagctgtcctggtttaaccatgtgctcaccatagaccccatcaggcaggaggacgctggggagtatcagtgtgaggtctccaacccagtcagctccaacaggagcgaccccctcaagctgactgtaaaatatgacaacactctaggcatcctgatcggggtcctggttgggagtcttctggtggctgcacttgtgtgtttcctgctcctccgaaaaactggcagggccagcgatcagagtgacttcagggagcagcagcccccagcctccacccccggccatggaccctctgacagctccatctcctatggaattgctacactctgacacaaacatttactgctggatcgaccacaaagcagatgtggcttcttaggttcctctgggagctgctcctgtgggttgatggagcgtccctgaagcccccagccctggggatggggaaggacatggagcctgagccagagaaccagctctgagtcctgaggagacacaggcctggggacaggaagggatgggggtccctgctgaatatatagagacctcaacagactgccccgggctctgggtgggccaaggcgaaggcttcccatcaccacaggaagtgggggcttgcagggaaagtgaatgggcctatggcccacccggggtcacctggaaaggatctgaataaaggggaaacttcctctcaaaaac

SEQ ID NO: 33793 - DNA, 685 bp, Homo sapiens
ctaaaacattgacttccttgtgtgagcaagagaggaaacaaaacttttgggaaaatctaagataaacttgtgcaaaaaaaaggatccattaatttctaatgtagtgtccttatgaaaatgtaccttttctctcatatcactaaggttcttcaaacactcatctgttagaaggaaattttaaaaaggaaatctttctccttcccataggagtgtcaatggcaagcctatcctcaaagaccagaaagaaagcatgttttttcagatagatgtacccacacccaggactcatctgtcatctctcagatctaaaactagctcttctttattgtttggcgtcagaagttttaagggctaaaccactaattctcatccttggctgaacatcaaattacttgtggagcttttaaaatgtactgaatttgggcagggcgtggtggctcatgactgtaatcccagcactttgagatgccagggtgggtggatcacctgaggtcaggagtttgagaccagcctgaccagtatgatgaaaccctgtcactactaaagatacaaaaattatctgggcatggtggtgtgcacctgtggtctcagctacttaggaggctgagacaggagaatcgcttgaacccgggaggcagaggttgcagtgagctgagatcgcgcctccagcctgctgggcaaacag

SEQ ID NO: 33794 - DNA, 581 bp, Homo sapiens
gagaaaagagaaagaggtcagttaaaattgttttatgttagagagttgatgaaattttctaagaaatggaaattttgatagccagagaatttttgcttgaactttatgacttatatatgttggtggcacttactcaggtcttagacattcttctttcaacattgagcaaatatatttagattgtccagcagtcactttgatgggtagtaaagatactaagatgaggatcggtcacattaacagaaatttctttttttttttgctgtactttccccattgcccagcacagtggctggcagagtaagcattcagcaagtatttgttaaacaactagagtcaaaactaaagggaagggtggaggatgaccaaaattgtttcttagggaattgagttgccttcgttatctgagacctgaattccttgattttatggtttatcttgacacatatttacttacttgtaccagaatttagctcagagattacattttttgtgccatggatacatttggcaatcaggtaaagcctttagatactttctcagaataatgcttttacatgtataaaataaaatacatggtt

SEQ ID NO: 33795 - DNA, 1095 bp, Homo sapiens
gagaaaagagaaagaggtcagttaaaattgttttatgttagagagttgatgaaattttctaagaaatggaaattttgatagccagagaatttttgcttgaactttatgacttatatatgttggtggcacttactcaggtcttagacattcttctttcaacattgagcaaatatatttagattgtccagcagtcactttgatgggtagtaaagatactaagatgaggatcggtcacattaacagaaatttctttttttttttgctgtactttccccattgcccagcacagtggctggcagagtaagcattcagcaagtatttgttaaacaactagagtcaaaactaaagggaagggtggaggatgaccaaaattgtttcttagggaattgagttgccttcgttatctgagacctgaattccttgattttatggtttatcttgacacatatttacttacttgtaccagaatttagctcagagattacattttttgtgccatggatacatttggcaatcaggtaaagcctttagatactttctcagaataatgcttttacatgtataaaataaaatacatggttacaaaagaaaaaattatatagaaatatagttatcaaagtattaaaacatttatgatacaataaacatgaaataagatatctgggcaggtgtgataacttctgtaagtgatattttgggctgtgtgcctatacagtaatgctacatggatttctgctggtgacaaagtcacaagtactactgtggtgtgttgcctgcattcatatttgaaggaaacaataaatttagaagttaatgaaaataaaaaggttttttgttcccactctctaagttcatggactccctgtatcctctctctagacctcacttcttcatttctttgcaaatatatttagagacttttcctatgaagtgcttaactcagccaggaattatacattgattagtgggactatttgattaatgtctgtctgcctgctggattgtgattgtggtgggtttttgttgttgttgttgttttggagacagagtctcactctgcactccatcctgggcgactggtaggatctcagctca

SEQ ID NO: 33796 - DNA, 571 bp, Homo sapiens
ttccagggcaccgacacagactcgtcgggggcacccttgctccaggtgtactgctaacccctgccaggcccagctgccacaccctttctgggagaagcatggcctacagaatgaagagggggaccaggaacccctgtgggagaggcttagacctgaagcagtgcccactctggctcctcctgccttggctgactgggttcctggaccatgtgcatttcactgggccatgggatctacatctccttgcatccccagctggtctgatccctgccagggccccttccttcctgctcatggtcttcaggtggcctgatcatggaaagtaaggagttaggcattaccttctgggagtgaaccctgactccatccccctattgccaccctaaccaatcatgcaaacttctccctccctggggtaattcaacagttaaaagaagcttatcttaaatgtattgtattggggggtgggcagggcccactctatgttatgttaaggagttggttctggttcttggctgatgttctgtatcttaacatgaccacagtttgtaagtacaaaggtaattggtat

SEQ ID NO: 33797 - DNA, 738 bp, Homo sapiens
aaatcttcatctcaaagtgctagaaaaataacaacaaaatcaataaaagaaattgggataaaatgtccacgtttttcctccaggcatttgccaattctaggcatgagaagagaggtaaagattccaggctgggcgcggtggctcatgcctgtaattctagcactttggaaggctgaggtaggcagattgcctgagctcaggagttcgagaccagcctaggcaacatggtgaaaccctgtctctactaaaacacaaaagaaattagccaggtgtggcggcatgcaccagtagtcccagttacttgggaggctgaagcaggagaattgcttgaacccgggaggcggaggttgcagtgagccaagattgtgacactggattccagcctgggtgacagagcaagattctgtctcaaaaaaataaaaataaaaataaaaagattccagacattccagacagagacatactgctaagaggcagacatactaacagaaaggtgtttctcagcctcagctctatttacattttgggatggacaattctttgttgcggggagctgccctatacattgtaggatgtttagtagcatctctgaccttccactagatgccagtagcattgtccccacttcttctgcacttgtgacaaacaaaaattcctccagacattctcaaatattccctggggcaaaattgtctcttgttgagaacagctgatctagacaaccaacagaatggtaaa

SEQ ID NO: 33798 - DNA, 702 bp, Homo sapiens
caattcaggatctggctcatgcctgcctctctaaccttactcgttcattcattcaacactatttatagctgctaagcaccatgctaggtcctggggattcagctttgaccaagacagacacaactactgcccttatgagctcacaattcagtgagggaaacactgaataatgtcacaaatgaccttaaaattacaactgcataaagttcaggggatgaaaattaggagacctccgagcctcgttctatctagtctttctctcagacttaacactctcaccagactggacttccttcacttccctgagtggacatgctctctctcacctcaggacctttgcacatgcttttcccctctgacaagaagtttctttcaactccattgcccactctcctggctagctcctccacatcctacaagtatcagcttagaggccactttcttcaggaagccatgcctggtgtcaccagtgtgggctccccttctgttctcctccatagcatgtgtttaacccccacttattacactccacggtgagtgccttttgcatttctagctagtgcactaggcgggaaatttcactgtggcatcaacaagttttactgaatgggtgagtcacatccttaccttttgttcagtcccattcactgtttgaccttggggtcctccagccctccataaaaataagtgtttctccagatt

SEQ ID NO: 33799 - DNA, 379 bp, Homo sapiens
ctaagaccccagagctctgtcctatccagagaggctaaaccaacttggatggctcaagacaatatagaaataaacgctaaaatatgggatctagagtacacccagggttgctatatcgaattcatgtttctagaggtcagttcaacacaatgaatgaagtggaccaggtgtaggtaagcagggagtggtgctggatgttgcaagctggaggacatgtgccaagggtgaaggggggcaggaccactcagttactctgttgcccagtagccatgtgggtccaatgttgtcacatgactttgttttttatgagaagctgggtgtctgttttttccataaaatatctttaaatttttggcaactaattcagtttaaaaaaaaa

SEQ ID NO: 33800 - DNA, 288 bp, Homo sapiens
tttttgtatttttagtagagtaaagacagggtttcactgtgttagccaggatggtctcaatctcctgacctcgtgatccgcacacctcggcctcccaaagtgctgggattacaggtgtgagccaccgcacccggtctaaccttgaaatttctaattgttggtgttatgttctttccattaaatcatttcatccacctttttgaaatctgtggatgacaaaatttcattcctttcattgcatctacctaaataatttaattatttaaatgtaaagtgctagtctgcatt

SEQ ID NO: 33801 - DNA, 318 bp, Homo sapiens
ctaattctatgtactggaatatctgtaaaggcaaccatttaaaataaaatagtccttgggtttttttttaaataacagtaagcacaaacaacttaaatgtctaacacaatagttaagtaaattagtttgtgatggactgcctaagaaaataagctttttaaaataacatgaaaaaatgtgttaaatgccacatgaaaaaagataattgtacagtagtaagaattacttaaaaaatacccccatgaaatgaaatactatctatgagaaatcataatcttacatattaaaattacaaacgtaacattttttcaccaattg

SEQ ID NO: 33802 - DNA, 3220 bp, Homo sapiens
  misc_feature (2177)..(2177): n is a, c, g, or t
  misc_feature (2616)..(2616): n is a, c, g, or t
cttgcatgtaccgggggagaaaccccatctctactaaaaatacaaaattagccaggtgtggtggcatgcacctgtaatgccaactactaagcctcccgagtatgctaggattataggcatgagccaccacgcccggcctcatctccagctcttataaggacaccagtcagccgggattaaggctcatcctcatgatgtccttttaacttaattacctctctacaggccctgtctccatatagagtcacacccttgagtaccggaggttaggtcttcagcataggagttaagagggacacaatttagccaatcacagcttcataacagatgctctgcagacacctctccatcaatcatagcccggtgtgtttaacttagagtagatggtggcaccacccgataacaatggtggtggcattcagcagcagctcagagggttccagaagcattcctccagccttgaggggaaatggtgcctctggctaacggagggaaccatcaaagccgggtatggtttctttgatcgtgtttagccgctttgtggctgagtagagattcttccttcttcctgtccaggtaattaatgagggacttcaaaggcatgaggcttttctgctccaatcaattattcagattggcatatccaaaggtctctgaacaggaaatagagaggaaatggattgctaagtggttatgatggagactaaatgaattacttgttaatcacccttgtctgctctggtagtatctgtgcaagccaggatagctgctcggggcacactcaccatcaaacacgggaggggaagggcagggtggggtaaatttcactcttagaaacaccagaatttcttccttttcaggatcaatgtcacccatatcttgtcaattgtgactgcaaacttcagaaggactcagagtggaaagtcttggcaaccatgttggggttcagacagtgggagccatgcttctgcgaatgagcctggggactggggactgtggtcccagccctggatttgatgaggggagtatccctgtcctgcgagggtgcagtgtcacttttccactcccatttggggtcaactcttaacagcatccctgagaagtgaggtggtgtaaagtcagggaagtgtggtctttgtcttattaaaaataatgcgatgagatggacgatggcagaagcttcagggtagaccatggagctcatcatggtatttgatatggcttggctttgtccccacccaaatctcatcttgaattgtagctcccatgattcccatgtgttgtgggagggacccagtgggagataactgaatcatggggtcattctcccccatactgttctcatagtagtgaacaagtctcatgagatctgatgattttataaggggaaacccctttctcttggctcccattctctcttgcctgctgccatgtagaacatgccctttcccttctgccatgattgtgaggcctccccagccatgtggaactatgagtccattaaacctttttttctacataaattacccagtcttaggtatatctttatcggcagcgtgaaaacagactaatacagtattactctttacattgctttatgtttgcgattttccattagaaaaggaacttgaaaattaaaaaaaataataataataatgcctacttctgctccaacttctacttgtggccaagatggagaaacagaaactggatttacctttcctcatgaaacaactgaaagaaaagataaaatatataaagtaataggttttacaaccagacaccaggtaataaatgatagtgatcactaaagcatgagaaacagatgggatgagccctatacttgccccagcttcttgcactgagcgtttccaggctgtggggcagggagagggaactcaggcagagactggaagaacatccacattgaagacattgaggccaggcgtggtggctcacgcctgtaatcccagtgctttcggaggccgaggtgggtggatcacaaggtcagtagttcaagaccaacctggctaacatggtgaaatcccatctctactacaaaaatacaaaaattagccgggcatggtggcacgcgcctgtaatcccagctattcgggaggctgaggcaggaagaattgcttgaacctgggaggcggaggttgcggtgagccgagatngcaccactgcactccagccttggcagcagagcaagacttcatctcaaaaataaataaatggatggatggatggatggatggatggatggatgaaactgcttccaggtgacttaactacacccagaacaaagctcaagaccaggatacagaactacccagcgcccccaacaagtacaattcatgatgtctggcatccattcagaaattcccagtcttgcaaagaagcaggaaaatacagcccgtaaggaagagaaaaatccattatcaaaattgactggggattaacaccgatgttagagttagcagacaaggatattaaaagaatcattaaaactgtattccatatgtccaaaaagttaaatgtagacacagaagatattttgaaagcccactggaatgtccatttttaaatggttaatatgataaattttgttgtatntattttagcataaagcagttctttacattttaacccaaatcaaacttccagtgatgaaaaccacagtgtctgagatgacggatacacaggatgagatcgagggtagattaaatgttataaagtaatagtgaactcagagaagtctcaatagaaactatcctgagtgaaacacagagaaaaaaaaagaattctttttaaaagaacatcagtcagtgagctgcaagatagcttccaacagcccaatatacatgtaagtagagtccctgaagagggggcgattgtagggggaggggagaaaaaatacttgaaggctgggtgcggtggctcatgcctgtaatcccagcactttgggaggctgaggcgggcagatcagttgaggtcaggagttcgagaccagcctggccaacacggtgaaaccccatctctactaaaaatatgaaaagttggctgggcatggtggtgggtgcctgtaatcccagctatttgggagactgagtcaggagaatctcttgaacccaggaggcggaggttgcaatgagctgagatcgcaccactgcactccagcctgggcaacagggtgagactccatctcaaaaaaaaaaaa

SEQ ID NO: 33803 - DNA, 2330 bp, Homo sapiens
ataaaaacattgtatatagtagaccaaatggtcatagttactgtgagcctggcagagcagaaaaggcagttgaaggaggcagagaaggggttggtgatacggtgctataaatctgtggtccagtccacctcccttttaagacgtcctccccctatttctgttcttagttagagatgcagcagcttactcctgtagcgacctactaaaaagcaacaaggagaaagacatcgtctttttgaaaaaacgttctttcgtctcttttctttgttccttggtttgtttttcttgcccctttttgtttagttgaacggcaataggagggtagtctctccgtctttttaaactcttttttaagtttcccctcccctttcatatttttttgggccatttcttttagctttggactttgggggtcgaaagcgtttctttttatttgcttcttttaagccgagcacagtttaggtttcgtgctgtcttaagagaactatccagcagcttcttgctcatccttattgggagaactgcaccgttactttaaaaacacacatacacaaaaaccttaagggagaaagcaggtaattgctgccatggaaacacaactgtctaatgggccaacttgcaataacacagccaatggtccaaccaccataaacaacaactgttcgtcaccagttgactctgggaacacagaagacagcaagaccaacttaatagtcaactaccttcctcagaacatgacacaggaggaactaaagagtctctttgggagcattggtgaaatagagtcctgtaagcttgtaagagacaaaataacagggcagagcttgggatatggctttgtgaactacattgaccccaaggatgcagagaaagctatcaacaccctgaatggattgagacttcaaaccaaaacaataaaagtttcctatgctcgcccaagttcagcttctatcagagatgcaaatttatatgtcagcggacttccaaaaacaatgacccagaaggagttggaacagcttttttcacaatatggacgcattattacttctcgtattcttgtcgaccaggtcactggcatatcaaggggtgtagggtttattcgatttgacaagcgaattgaggcagaagaagctatcaaaggcctaaatggccagaaacctcccggtgccacggagccaatcactgtaaagtttgctaataacccaagccaaaaaaccaatcaggccatcctttcccagctgtaccagtctccaaacagaaggtatccaggaccgctagctcagcaggcacagcgttttaggttggacaatctgctcaatatggcttatggagtaaagaggttttctccaatgaccattgacggaatgaccagtttggctggaattaatatccctgggcaccctggaacagggtggtgtatatttgtgtacaacctggctcctgacgcagatgagagtatcctgtggcaaatgtttgggccttttggagctgtcaccaatgtgaaggtcatccgtgactttaacaccaataaatgcaaaggttttggatttgtgactatgacaaactatgatgaggctgccatggcgatacgtagcctcaatggataccgtctgggagacagagtactgcaggtctcctttaagacaaacaaaacgcacaaagcctaatgagctcttgtcctcagtccatttatatatgaaaactatacaacaaaggcaagttaagagaaactttatacattagtaaatgtctttgtaagtcagtgttgagatggggataaaatgactacttagcatcctaagaaatatgtgagattttttattgctagtatttgaattaaaacttcttaaatatcttttatgttgaatatggacaagaggtacagggtttttacctgtcacattgcattctattgccttctttgaagaaggtggaccttttaaagtgtttcagctaagggaagacatttcttttctttttacataactgccttgaacctgtgagtaaatattgaggctttgtgttgtaattcttcagttggttgtgtcttttttttcccccctttttcctttttctgattagctttgtgtttggtttacatttaaagcattgctgttatgtctgtttaagaaaagtattttgaagtttacatttttatttatgaagtttaaaacagtatttattttgtaattatgatttgggttggggaagggggggctacattataaacgcttattgtaagaatactggagaacttttcgtaaagcagtaccttgccaaagagataagagcctctttgatgtgggtttaaaaaaagcatctatttttat

SEQ ID NO: 33804 - DNA, 2142 bp, Homo sapiens
agcccggcatctccctgccggcacggacccgaagggcggtcgggcagggcacgcgccggcggcggccgcggcgccgcgaactcgccgccggccccgcctcctggcgctcttccaagcaagcccctccttcccgccccgctacaaacggcgggaccgcggcgcctgggcgtcactgaggcagtagccggccgggtgaggagggcggttgccggcgcggcgcggcgcggcgcgggtggggcgggggttccgccggcttccagtcccctttcccgccgccgccgccgccaccgcctctccgcggagctcgccccgagcgactcctccgcggcagtgctgacggccagcggcacgagccgtagtagctgcagcttcgagtcacagcagcaggtaattgctgccatggaaacacaactgtctaatgggccaacttgcaataacacagccaatggtccaaccaccataaacaacaactgttcgtcaccagttgactctgggaacacagaagacagcaagaccaacttaatagtcaactaccttcctcagaacatgacacaggaggaactaaagagtctctttgggagcattggtgaaatagagtcctgtaagcttgtaagagacaaaataacagggcagagcttgggatatggctttgtgaactacattgaccccaaggatgcagagaaagctatcaacaccctgaatggattgagacttcaaaccaaaacaataaaagtttcctatgctcgcccaagttcagcttctatcagagatgcaaatttatatgtcagcggacttccaaaaacaatgacccagaaggagttggaacagcttttttcacaatatggacgcattattacttctcgtattcttgtcgaccaggtcactggcatatcaaggggtgtagggtttattcgatttgacaagcgaattgaggcagaagaagctatcaaaggcctaaatggccagaaacctcccggtgccacggagccaatcactgtaaagtttgctaataacccaagccaaaaaaccaatcaggccatcctttcccagctgtaccagtctccaaacagaaggtatccaggaccgctagctcagcaggcacagcgttttaggttggacaatctgctcaatatggcttatggagtaaagaggttttctccaatgaccattgacggaatgaccagtttggctggaattaatatccctgggcaccctggaacagggtggtgtatatttgtgtacaacctggctcctgacgcagatgagagtatcctgtggcaaatgtttgggccttttggagctgtcaccaatgtgaaggtcatccgtgactttaacaccaataaatgcaaaggttttggatttgtgactatgacaaactatgatgaggctgccatggcgatacgtagcctcaatggataccgtctgggagacagagtactgcaggtctcctttaagacaaacaaaacgcacaaagcctaatgagctcttgtcctcagtccatttatatatgaaaactatacaacaaaggcaagttaagagaaactttatacattagtaaatgtctttgtaagtcagtgttgagatggggataaaatgactacttagcatcctaagaaatatgtgagattttttattgctagtatttgaattaaaacttcttaaatatcttttatgttgaatatggacaagaggtacagggtttttacctgtcacattgcattctattgccttctttgaagaaggtggaccttttaaagtgtttcagctaagggaagacatttcttttctttttacataactgccttgaacctgtgagtaaatattgaggctttgtgttgtaattcttcagttggttgtgtcttttttttcccccctttttcctttttctgattagctttgtgtttggtttacatttaaagcattgctgttatgtctgtttaagaaaagtattttgaagtttacatttttatttatgaagtttaaaacagtatttattttgtaattatgatttgggttggggaagggggggctacattataaacgcttattgtaagaatactggagaacttttcgtaaagcagtaccttgccaaagagataagagcctctttgatgtgggtttaaaaaaagcatctatttttat

SEQ ID NO: 33805 - DNA, 2016 bp, Homo sapiens
ccctagtccgaactctgggcgggaacactggtgggggcggcggaggttgtgcccgcgaagttcctagagctcagcccgttgcggcgggagtagagagaattgggcgcctcgggaggtggcaccgcccctcccgtgggcacaagcaggttgggggcggcgggagccgagcggggacagtcgcgcctggcagcgtgcacgggcgtggacgtgcccgggtgcggccgcgtgtagcgcaagaaggaaactgttgagacgcagcaggtaattgctgccatggaaacacaactgtctaatgggccaacttgcaataacacagccaatggtccaaccaccataaacaacaactgttcgtcaccagttgactctgggaacacagaagacagcaagaccaacttaatagtcaactaccttcctcagaacatgacacaggaggaactaaagagtctctttgggagcattggtgaaatagagtcctgtaagcttgtaagagacaaaataacagggcagagcttgggatatggctttgtgaactacattgaccccaaggatgcagagaaagctatcaacaccctgaatggattgagacttcaaaccaaaacaataaaagtttcctatgctcgcccaagttcagcttctatcagagatgcaaatttatatgtcagcggacttccaaaaacaatgacccagaaggagttggaacagcttttttcacaatatggacgcattattacttctcgtattcttgtcgaccaggtcactggcatatcaaggggtgtagggtttattcgatttgacaagcgaattgaggcagaagaagctatcaaaggcctaaatggccagaaacctcccggtgccacggagccaatcactgtaaagtttgctaataacccaagccaaaaaaccaatcaggccatcctttcccagctgtaccagtctccaaacagaaggtatccaggaccgctagctcagcaggcacagcgttttaggttggacaatctgctcaatatggcttatggagtaaagaggttttctccaatgaccattgacggaatgaccagtttggctggaattaatatccctgggcaccctggaacagggtggtgtatatttgtgtacaacctggctcctgacgcagatgagagtatcctgtggcaaatgtttgggccttttggagctgtcaccaatgtgaaggtcatccgtgactttaacaccaataaatgcaaaggttttggatttgtgactatgacaaactatgatgaggctgccatggcgatacgtagcctcaatggataccgtctgggagacagagtactgcaggtctcctttaagacaaacaaaacgcacaaagcctaatgagctcttgtcctcagtccatttatatatgaaaactatacaacaaaggcaagttaagagaaactttatacattagtaaatgtctttgtaagtcagtgttgagatggggataaaatgactacttagcatcctaagaaatatgtgagattttttattgctagtatttgaattaaaacttcttaaatatcttttatgttgaatatggacaagaggtacagggtttttacctgtcacattgcattctattgccttctttgaagaaggtggaccttttaaagtgtttcagctaagggaagacatttcttttctttttacataactgccttgaacctgtgagtaaatattgaggctttgtgttgtaattcttcagttggttgtgtcttttttttcccccctttttcctttttctgattagctttgtgtttggtttacatttaaagcattgctgttatgtctgtttaagaaaagtattttgaagtttacatttttatttatgaagtttaaaacagtatttattttgtaattatgatttgggttggggaagggggggctacattataaacgcttattgtaagaatactggagaacttttcgtaaagcagtaccttgccaaagagataagagcctctttgatgtgggtttaaaaaaagcatctatttttat

SEQ ID NO: 33806 - DNA, 1848 bp, Homo sapiens
acggtggctcacgcctgtaatcccagcacattgggaggccgaggttggcagatcagttgaagccaggagttcgagacgagcctggccaacgtggcgaaaccctgtctctactaaaaatacaaaaaaatagctgggtgtggtgatgcatgcctgtaatcccagctacttgggaggccgaggcagaagaatcgcttgaacccaggaggtggaagttgcagtgatccgagatcatgcccactgccatccagtctggatgacagagagagagaccttgcctcaaaagaagaaagatttgaattaatggtttgaaaattcttagaacacttgaccacagggcagagcttgggatatggctttgtgaactacattgaccccaaggatgcagagaaagctatcaacaccctgaatggattgagacttcaaaccaaaacaataaaagtttcctatgctcgcccaagttcagcttctatcagagatgcaaatttatatgtcagcggacttccaaaaacaatgacccagaaggagttggaacagcttttttcacaatatggacgcattattacttctcgtattcttgtcgaccaggtcactggcatatcaaggggtgtagggtttattcgatttgacaagcgaattgaggcagaagaagctatcaaaggcctaaatggccagaaacctcccggtgccacggagccaatcactgtaaagtttgctaataacccaagccaaaaaaccaatcaggccatcctttcccagctgtaccagtctccaaacagaaggtatccaggaccgctagctcagcaggcacagcgttttaggttggacaatctgctcaatatggcttatggagtaaagaggttttctccaatgaccattgacggaatgaccagtttggctggaattaatatccctgggcaccctggaacagggtggtgtatatttgtgtacaacctggctcctgacgcagatgagagtatcctgtggcaaatgtttgggccttttggagctgtcaccaatgtgaaggtcatccgtgactttaacaccaataaatgcaaaggttttggatttgtgactatgacaaactatgatgaggctgccatggcgatacgtagcctcaatggataccgtctgggagacagagtactgcaggtctcctttaagacaaacaaaacgcacaaagcctaatgagctcttgtcctcagtccatttatatatgaaaactatacaacaaaggcaagttaagagaaactttatacattagtaaatgtctttgtaagtcagtgttgagatggggataaaatgactacttagcatcctaagaaatatgtgagattttttattgctagtatttgaattaaaacttcttaaatatcttttatgttgaatatggacaagaggtacagggtttttacctgtcacattgcattctattgccttctttgaagaaggtggaccttttaaagtgtttcagctaagggaagacatttcttttctttttacataactgccttgaacctgtgagtaaatattgaggctttgtgttgtaattcttcagttggttgtgtcttttttttcccccctttttcctttttctgattagctttgtgtttggtttacatttaaagcattgctgttatgtctgtttaagaaaagtattttgaagtttacatttttatttatgaagtttaaaacagtatttattttgtaattatgatttgggttggggaagggggggctacattataaacgcttattgtaagaatactggagaacttttcgtaaagcagtaccttgccaaagagataagagcctctttgatgtgggtttaaaaaaagcatctatttttat

SEQ ID NO: 33807 - DNA, 299 bp, Homo sapiens
cagttctaaatatatttctttgctattgtggatgatattcagtacagtgaataatggtcatttcataacttattaatatctcagtagtctagcatgtcactgcaaagccacacacagaccttggtcaaaacatgaaatagtttatatatttgttgggggaggagagttactaaaattcttggggatggaaaaggtatacgttcattgctataaccaacctctgtttttattttttgtgtgtatgtgtgtatttcctattctgtttagcaggttttctccaatgaccattgacggaatga

SEQ ID NO: 33808 - DNA, 2291 bp, Homo sapiens
ataaaaacattgtatatagtagaccaaatggtcatagttactgtgagcctggcagagcagaaaaggcagttgaaggaggcagagaaggggttggtgatacggtgctataaatctgtggtccagtccacctcccttttaagacgtcctccccctatttctgttcttagttagagatgcagcagcttactcctgtagcgacctactaaaaagcaacaaggagaaagacatcgtctttttgaaaaaacgttctttcgtctcttttctttgttccttggtttgtttttcttgcccctttttgtttagttgaacggcaataggagggtagtctctccgtctttttaaactcttttttaagtttcccctcccctttcatatttttttgggccatttcttttagctttggactttgggggtcgaaagcgtttctttttatttgcttcttttaagccgagcacagtttaggtttcgtgctgtcttaagagaactatccagcagcttcttgctcatccttattgggagaactgcaccgttactttaaaaacacacatacacaaaaaccttaagggagaaagcaggtaattgctgccatggaaacacaactgtctaatgggccaacttgcaataacacagccaatggtccaaccaccataaacaacaactgttcgtcaccagttgactctgggaacacagaagacagcaagaccaacttaatagtcaactaccttcctcagaacatgacacaggaggaactaaagagtctctttgggagcattggtgaaatagagtcctgtaagcttgtaagagacaaaataacagggcagagcttgggatatggctttgtgaactacattgaccccaaggatgcagagaaagctatcaacaccctgaatggattgagacttcaaaccaaaacaataaaagtttcctatgctcgcccaagttcagcttctatcagagatgcaaatttatatgtcagcggacttccaaaaacaatgacccagaaggagttggaacagcttttttcacaatatggacgcattattacttctcgtattcttgtcgaccaggtcactggcatatcaaggggtgtagggtttattcgatttgacaagcgaattgaggcagaagaagctatcaaaggcctaaatggccagaaacctcccggtgccacggagccaatcactgtaaagtttgctaataacccaagccaaaaaaccaatcaggccatcctttcccagctgtaccagtctccaaacagaaggtatccaggaccgctagctcagcaggcacagcgttttaggttttctccaatgaccattgacggaatgaccagtttggctggaattaatatccctgggcaccctggaacagggtggtgtatatttgtgtacaacctggctcctgacgcagatgagagtatcctgtggcaaatgtttgggccttttggagctgtcaccaatgtgaaggtcatccgtgactttaacaccaataaatgcaaaggttttggatttgtgactatgacaaactatgatgaggctgccatggcgatacgtagcctcaatggataccgtctgggagacagagtactgcaggtctcctttaagacaaacaaaacgcacaaagcctaatgagctcttgtcctcagtccatttatatatgaaaactatacaacaaaggcaagttaagagaaactttatacattagtaaatgtctttgtaagtcagtgttgagatggggataaaatgactacttagcatcctaagaaatatgtgagattttttattgctagtatttgaattaaaacttcttaaatatcttttatgttgaatatggacaagaggtacagggtttttacctgtcacattgcattctattgccttctttgaagaaggtggaccttttaaagtgtttcagctaagggaagacatttcttttctttttacataactgccttgaacctgtgagtaaatattgaggctttgtgttgtaattcttcagttggttgtgtcttttttttcccccctttttcctttttctgattagctttgtgtttggtttacatttaaagcattgctgttatgtctgtttaagaaaagtattttgaagtttacatttttatttatgaagtttaaaacagtatttattttgtaattatgatttgggttggggaagggggggctacattataaacgcttattgtaagaatactggagaacttttcgtaaagcagtaccttgccaaagagataagagcctctttgatgtgggtttaaaaaaagcatctatttttat

SEQ ID NO: 33809 - DNA, 2607 bp, Homo sapiens
acccaactccaccccgttcttctcgccccttccgccttcgtttttcgattttaggatcctctccttgcttaagtgtttggataaattcgccgtccgtaatcggttcagttggaaattacccgatggttttcgtactttttttgaacgctgactgcagaaaatggcatagggaggtgggggaagagggaggaaagtgtgtgtgcgtgtgtgtgtgtgtgcgcgcgagtgacaggggacagagacgagagataggagagagagggagaggaagagagggagagagagagagagagagagagagagagaaagcgagcccaagacctgaggggagggcagggggcttccctcccctctcctggaggacggacagaatgatacatactgtcattaacagtgttgacccacccagaccccacccttcggttgcatccatcatacagtcattacaaagaggtagcgctgtcacacggcttgccctgctcctggggctctcggctggcttaatgaggtgcacccagccggggctattgtgcagctcgaaagaggcaggaacgagacggcaaggatcctagcaggtgctcgcgggagcctcggctgcagcagcctcgcagcagcagccaaccccagacctcaagtggatgaatgcctctggaagtgttttcctgaaggaacccatcaggcagtggaagactgtggcagggctagtgaacttagatggggctttcctctcctgcagttgagctggctggagagatactttagccctgccttcccagttctgcgcccagcacaagcagttttgaaaatttaagtgcaaaaagcatgacaaagcaatatgaggttgccgtgcaggtaattgctgccatggaaacacaactgtctaatgggccaacttgcaataacacagccaatggtccaaccaccataaacaacaactgttcgtcaccagttgactctgggaacacagaagacagcaagaccaacttaatagtcaactaccttcctcagaacatgacacaggaggaactaaagagtctctttgggagcattggtgaaatagagtcctgtaagcttgtaagagacaaaataacagggcagagcttgggatatggctttgtgaactacattgaccccaaggatgcagagaaagctatcaacaccctgaatggattgagacttcaaaccaaaacaataaaagtttcctatgctcgcccaagttcagcttctatcagagatgcaaatttatatgtcagcggacttccaaaaacaatgacccagaaggagttggaacagcttttttcacaatatggacgcattattacttctcgtattcttgtcgaccaggtcactggcatatcaaggggtgtagggtttattcgatttgacaagcgaattgaggcagaagaagctatcaaaggcctaaatggccagaaacctcccggtgccacggagccaatcactgtaaagtttgctaataacccaagccaaaaaaccaatcaggccatcctttcccagctgtaccagtctccaaacagaaggtatccaggaccgctagctcagcaggcacagcgttttaggttggacaatctgctcaatatggcttatggagtaaagaggttttctccaatgaccattgacggaatgaccagtttggctggaattaatatccctgggcaccctggaacagggtggtgtatatttgtgtacaacctggctcctgacgcagatgagagtatcctgtggcaaatgtttgggccttttggagctgtcaccaatgtgaaggtcatccgtgactttaacaccaataaatgcaaaggttttggatttgtgactatgacaaactatgatgaggctgccatggcgatacgtagcctcaatggataccgtctgggagacagagtactgcaggtctcctttaagacaaacaaaacgcacaaagcctaatgagctcttgtcctcagtccatttatatatgaaaactatacaacaaaggcaagttaagagaaactttatacattagtaaatgtctttgtaagtcagtgttgagatggggataaaatgactacttagcatcctaagaaatatgtgagattttttattgctagtatttgaattaaaacttcttaaatatcttttatgttgaatatggacaagaggtacagggtttttacctgtcacattgcattctattgccttctttgaagaaggtggaccttttaaagtgtttcagctaagggaagacatttcttttctttttacataactgccttgaacctgtgagtaaatattgaggctttgtgttgtaattcttcagttggttgtgtcttttttttcccccctttttcctttttctgattagctttgtgtttggtttacatttaaagcattgctgttatgtctgtttaagaaaagtattttgaagtttacatttttatttatgaagtttaaaacagtatttattttgtaattatgatttgggttggggaagggggggctacattataaacgcttattgtaagaatactggagaacttttcgtaaagcagtaccttgccaaagagataagagcctctttgatgtgggtttaaaaaaagcatctatttttat

SEQ ID NO: 33810 - DNA, 1903 bp, Homo sapiens
ggcgttgctttcttcccttgcctttgaagactttctgcaggccctggaattgcctttgttcctctgtctgcccactttgccagtgtgaagcaggttttcatgggattctactggggtaaaccaaaagcagcagaaaaagtgtgaacaggtaattgctgccatggaaacacaactgtctaatgggccaacttgcaataacacagccaatggtccaaccaccataaacaacaactgttcgtcaccagttgactctgggaacacagaagacagcaagaccaacttaatagtcaactaccttcctcagaacatgacacaggaggaactaaagagtctctttgggagcattggtgaaatagagtcctgtaagcttgtaagagacaaaataacagggcagagcttgggatatggctttgtgaactacattgaccccaaggatgcagagaaagctatcaacaccctgaatggattgagacttcaaaccaaaacaataaaagtttcctatgctcgcccaagttcagcttctatcagagatgcaaatttatatgtcagcggacttccaaaaacaatgacccagaaggagttggaacagcttttttcacaatatggacgcattattacttctcgtattcttgtcgaccaggtcactggcatatcaaggggtgtagggtttattcgatttgacaagcgaattgaggcagaagaagctatcaaaggcctaaatggccagaaacctcccggtgccacggagccaatcactgtaaagtttgctaataacccaagccaaaaaaccaatcaggccatcctttcccagctgtaccagtctccaaacagaaggtatccaggaccgctagctcagcaggcacagcgttttaggttggacaatctgctcaatatggcttatggagtaaagaggttttctccaatgaccattgacggaatgaccagtttggctggaattaatatccctgggcaccctggaacagggtggtgtatatttgtgtacaacctggctcctgacgcagatgagagtatcctgtggcaaatgtttgggccttttggagctgtcaccaatgtgaaggtcatccgtgactttaacaccaataaatgcaaaggttttggatttgtgactatgacaaactatgatgaggctgccatggcgatacgtagcctcaatggataccgtctgggagacagagtactgcaggtctcctttaagacaaacaaaacgcacaaagcctaatgagctcttgtcctcagtccatttatatatgaaaactatacaacaaaggcaagttaagagaaactttatacattagtaaatgtctttgtaagtcagtgttgagatggggataaaatgactacttagcatcctaagaaatatgtgagattttttattgctagtatttgaattaaaacttcttaaatatcttttatgttgaatatggacaagaggtacagggtttttacctgtcacattgcattctattgccttctttgaagaaggtggaccttttaaagtgtttcagctaagggaagacatttcttttctttttacataactgccttgaacctgtgagtaaatattgaggctttgtgttgtaattcttcagttggttgtgtcttttttttcccccctttttcctttttctgattagctttgtgtttggtttacatttaaagcattgctgttatgtctgtttaagaaaagtattttgaagtttacatttttatttatgaagtttaaaacagtatttattttgtaattatgatttgggttggggaagggggggctacattataaacgcttattgtaagaatactggagaacttttcgtaaagcagtaccttgccaaagagataagagcctctttgatgtgggtttaaaaaaagcatctatttttat

SEQ ID NO: 33811 - DNA, 244 bp, Homo sapiens
tttttggcgggggaactgatttgctgacacttcccagcatttgcactactgttatggcacccgtggcactgtactataagcattcattaacagcatcctcactagaccctgaattccttaaaggatcagtgtcactcatctttagatcccagtaacttacatagtgtctggtacataatgagtgcagaaaaaaccatccaaagaaaagcttaagctaaatgtgctctcctttagtctattagta

SEQ ID NO: 33812 - DNA, 390 bp, Homo sapiens
gcaaggaatgtacaaaccagcccattattaatcaatgttgcacaatttaaatcctgacagcccactatgacccaaatccgcaaagatacattctgcctttctgctcctaagccgtccaaccctgttctgagaataaatactgttacataaacacgactttttagcagagctctatggaatctgggtctaagagaatcctgagggtatcgatttcagtatagacatcatttgatatcacctaaatttctggcagcatggctcaataacaaggccttctgcttaatgaaggatgactacttggttatgtccaggtgtgagatgatcactgcttctaaagctagaaagtgccacaactggacaaccaatcatttggaatttcttccatatgtc

SEQ ID NO: 33813 - DNA, 338 bp, Homo sapiens
ggtaacaggccaatcggtgtggcttcagcttctgaggatctgccgggtgctgaggtctctcaaactccttgcacaattccgtcaaattcgagttattattttggtcctggtcagggccctcaaggtgatttgactgttgcaagctaaagcagggggcaaggtagataaatgtgagggcttaacatagaatatgaaacaaattggccgggtgcggtggctcatgcctgtaatcccagcactttgggaggccgagggggatgggtcatgaggtcaggagttcgagaccagcctgaccaacatggtgaaaccctgtctctactaaaaataccaaaaaaaaa

SEQ ID NO: 33814 - DNA, 455 bp, Homo sapiens
gtacagtaaaattggtgcggattcattctcatgttgtcctttgttctcttcaaaatgttccaagttaaggagtgaagcctaaatatgttcattacatcaaaatactggtacccccagtgtacgggagccagaggtgtacacattccagtacttatttgttatgacttgtttctatctaggagagcaatatattaccctttcactgtatcagtttctttggtccatccaaccaggtgttgttgtccttctataagaagaaatacttaagctacacatagtagtagatgacttattattcagggtttctctgactgaaatgtcactataacatcagtcatttgactcctaatccagtagatataaacagtgcctggaacagtctattataacactctgaaaacatttggtaaatatatgaattttaataaaaggaaagattgctgctcaacaccaaa

SEQ ID NO: 33815 - DNA, 143 bp, Homo sapiens
gattcatttcacaaaacttgcaaggagtatattgtaatattagctaaactctccctgagaaatttttaaaagggaatactacttagcttgtgttattaggctagcaatgtctttgatagcaaaacctgtcaaggccattatgg

SEQ ID NO: 33816 - DNA, 548 bp, Homo sapiens
agttgggggtccaacagagtctggggccaggagggccttgtgggagccagctggggtgaggacagagcccggctctgagagccctggggcctagtagagaaggggtgctccttccccactcctcacatgggtgggaaggcgccctcaggcaagaagactgggacacaggtacactcgccagggaccatccttcactctgcagcctttattcactgatgggattctgccccagtcccacccccgtgggggcaggatttagagcaggaaccgcccctccgggtcctttcctggggcctgtgccaggctgagcagactcaggaggcgtctctccgagggtgtgggctgtgatggggccctgtgcacccatccaggctgcccagaccaggagagcacaggtcagccggacacatgatggtaatgggctgggcagtgggagggaaacgtgcctgggggagggggtggcaggtgccagctgagcttcccggtgacacaccctgggctcagctgagatgggctcagctgtgacggggcacccaggccaggctggc

SEQ ID NO: 33817 - DNA, 455 bp, Homo sapiens
ctccccaccttccccaggcctgctgacccagccagacaaaaccacccactcacaccagttcccctctggccgcactccggcctctcggccggtctgcaatgggcacactgagagctgctggacagaccaccaaggcaggccacaacaccggagacccccaaagacggggctttcaccaggcaactcataagactgctctctaagctgcccagatcctgcttggggaacccctgagcaggccatcctgccggcagacgccaggtctgggcggtgccggccctggcatggcacgacggcaggggtccatcagatgggagcctagtcacagctcgggccgcactccggcctctcggccggtctgcaatgggcacactgagagctgctggacagaccaccaaggcaggccacaacaccggagacccccaaagacggggctttcaccaggcaactcataa

SEQ ID NO: 33818 - DNA, 2709 bp, Homo sapiens
ctccccaccttccccaggcctgctgacccagccagacaaaaccacccactcacaccagttcccctctggccgcactccggcctctcggccggtctgcaatgggcacactgagagctgctggacagaccaccaaggcaggccacaacaccggagacccccaaagacggggctttcaccaggcaactcataagactgctctctaagctgcccagatcctgcttggggaacccctgagcaggccatcctgccggcagacgccaggtctgggcggtgccggccctggcatggcacgacggcaggggtccatcagatgggagcctagtcacagctcgggccaagaagccgcgtgccctgtgcaggcctccccccatgccagcctgctccactgtctgaggctcatgctgtggcctcagactggggatgaaaggggattcagaatttgtgtcacgaacctcctgccacacccaggacccggtgtcttggctgtaaggcagagcccactcttcgaacccaggatgaggtgctccccagaggccgtgcccccaggcctggctcagcctttctcctccttggcttggtggagctgaagagggcactcacatctctatgcccaaccctgccagcagggtggaaattcaggcaggctgtgggagggtggggttgtcctcctggggctctgcccagctctcccatctagcttcccgtacacccactgcaggggccacaggcacccaaggaggcctggaagatggactggccctccctgtctgctacacccacagggggcacgctagaaacgcagaaggggacgcagcagccacattccagtccacaaagacgccgcgcaggcccgtccatctgccccgtgaatgccaaccaggcagagacacacatacagctgaggctgggccggatcccagagcaaacccttgggtgcctctggagggagcccgccaagagggatggctcataaacactggggaaggaacagaaggggagggagcaaaggaactcggccgctcacctccgacccaaccacttcccgagaagccatctctgtggtcatggtggtcccaggcctggctctccctgcgcccacccccaccacccagtcactccacccagtcaccccacccagctgtgacctgccacttccctccatctcacatgctttcccctcacctccctcaggaagcctccccagcctctggcctccagtcccaacaagccatgctccttccagagggaacctctgccaggggagcctccactttcttgctcctgcctccctacctggcacccaggccggccctggtaccctggtactgaataaaggcacacgtctaaatgatgtcggggggaatctgcccagtgttggcactggagcgaacacgacccactgccagcatggcccacgagccacacccccccaagccagcacctcctccccagaggaagcacggggctcgacggggcacgcccctgaatgggaggtcacacatggtgagggctcccttgttcccagaggtctagctgtctccctgctaagatgcagagctcactatgggcctcgcagggggttaagccgagtcatttcatctttcacagcagctgtaggtcccgctgacattagctgacacatagagagctaaagtgacctgtgcaaggtcacaggctaggagtagcagcacggggcccagcacgaggaacagccttagcatcccccgcctccccaaccctgcagcctgccctgactccaatcccaggggaattcctgagctgcaggcaaaggctgaagcaggagctgacaagccctgctgagcccagagaggtctgggcggtcccaggagggcgtctccctagggctttgatgagttggtggccgcccaggcacctctgcctgcctgcccagcatggcaggtgtgtgggctggagcttctgcccagccctgccccacagccacaattaggggacgagtgcagataaagcacgggggccagttacatctgaatttcagataaacaatgaattgttattttagtacagtatgaaagtatttggccccaaagaactggaagcaggaaaaggaacagctcctcatacacccatgctcacagcattattcaccagagccggaaggtagaaacgatgtctctccacagtcgaatagattgtttccacaaactgtctgtaggtgcatacaatggaataggattaatccgtgaaaaggaagaaattctgacacatgctccggcgtggaggaaccttgaggacgacgctgagtgaaagaagccagacacgaaaggacagatacggcaagactcgacttatgtgaggtccctagaggagtcggattcatagagactgaaaggatggcgggcaccaggggcggtggagaggggaaatggggagttactgtttaatggggacagagtttcagttttacaagatgaaaagggtcctggagctggatgggggtgacggccgcacaacagcatgaatggactgaacgccactgaaaactgaactcttgaaaatggttaaactggcatattttgttatgcatattttgccacaaaaagcaaacaactcttctccccaaaaatatctggggtgtacttacactaaatatgtagggcatatttactctcaacatttatttccttatttgaaattaaagtatttgggacacactgcactacaaaatga

SEQ ID NO: 33819 - DNA, 1932 bp, Homo sapiens
agttgggggtccaacagagtctggggccaggagggccttgtgggagccagctggggtgaggacagagcccggctctgagagccctggggcctagtagagaaggggtgctccttccccactcctcacatgggtgggaaggcgccctcaggcaagaagactgggacacaggtacactcgccagggaccatccttcactctgcagcctttattcactgatgggattctgccccagtcccacccccgtgggggcaggatttagagcaggaaccgcccctccgggtcctttcctggggcctgtgccaggctgagcagactcaggaggcgtctctccgagggtgtgggctgtgatggggccctgtgcacccatccaggctgcccagaccaggagagcacaggtcagccggacacatgatggaagcctccccagcctctggcctccagtcccaacaagccatgctccttccagagggaacctctgccaggggagcctccactttcttgctcctgcctccctacctggcacccaggccggccctggtaccctggtactgaataaaggcacacgtctaaatgatgtcggggggaatctgcccagtgttggcactggagcgaacacgacccactgccagcatggcccacgagccacacccccccaagccagcacctcctccccagaggaagcacggggctcgacggggcacgcccctgaatgggaggtcacacatggtgagggctcccttgttcccagaggtctagctgtctccctgctaagatgcagagctcactatgggcctcgcagggggttaagccgagtcatttcatctttcacagcagctgtaggtcccgctgacattagctgacacatagagagctaaagtgacctgtgcaaggtcacaggctaggagtagcagcacggggcccagcacgaggaacagccttagcatcccccgcctccccaaccctgcagcctgccctgactccaatcccaggggaattcctgagctgcaggcaaaggctgaagcaggagctgacaagccctgctgagcccagagaggtctgggcggtcccaggagggcgtctccctagggctttgatgagttggtggccgcccaggcacctctgcctgcctgcccagcatggcaggtgtgtgggctggagcttctgcccagccctgccccacagccacaattaggggacgagtgcagataaagcacgggggccagttacatctgaatttcagataaacaatgaattgttattttagtacagtatgaaagtatttggccccaaagaactggaagcaggaaaaggaacagctcctcatacacccatgctcacagcattattcaccagagccggaaggtagaaacgatgtctctccacagtcgaatagattgtttccacaaactgtctgtaggtgcatacaatggaataggattaatccgtgaaaaggaagaaattctgacacatgctccggcgtggaggaaccttgaggacgacgctgagtgaaagaagccagacacgaaaggacagatacggcaagactcgacttatgtgaggtccctagaggagtcggattcatagagactgaaaggatggcgggcaccaggggcggtggagaggggaaatggggagttactgtttaatggggacagagtttcagttttacaagatgaaaagggtcctggagctggatgggggtgacggccgcacaacagcatgaatggactgaacgccactgaaaactgaactcttgaaaatggttaaactggcatattttgttatgcatattttgccacaaaaagcaaacaactcttctccccaaaaatatctggggtgtacttacactaaatatgtagggcatatttactctcaacatttatttccttatttgaaattaaagtatttgggacacactgcactacaaaatga

SEQ ID NO: 33820 - DNA, 2018 bp, Homo sapiens
ctccccaccttccccaggcctgctgacccagccagacaaaaccacccactcacaccagttcccctctggccgcactccggcctctcggccggtctgcaatgggcacactgagagctgctggacagaccaccaaggcaggccacaacaccggagacccccaaagacggggctttcaccaggcaactcataagactgctctctaagctgcccagatcctgcttggggaacccctgagcaggccatcctgccggcagacgccaggtctgggcggtgccggccctggcatggcacgacggcaggggtccatcagatgggagcctagtcacagctcgggccaagaagccgcgtgccctgtgcaggcctccccccatgccagcctgctccactgtctgaggctcatgctgtggcctcagactggggatgaaaggggattcagaatttgtgtcacgaacctcctgccacacccaggacccggtgtcttggctgtaaggcagagcccactcttcgaacccaggatgaggtgctccccagaggccgtgcccccaggcctggctcagcctttctcctccttggcttggtggagctgaagagggcactcacatctctatgcccaaccctgccagcagggtggaaattcaggcaggctgtgggagggtggggttgtcctcctggggctctgcccagctctcccatctagcttcccgtacacccactgcaggggccacaggcacccaaggaggcctggaagatggactggccctccctgtctgctacacccacagggggcacgctagaaacgcagaaggggacgcagcagccacattccagtccacaaagacgccgcgcaggcccgtccatctgccccgtgaatgccaaccaggcagagacacacatacagctgaggctgggccggatcccagagcaaacccttgggtgcctctggagggagcccgccaagagggatggctcataaacactggggaaggaacagaaggggagggagcaaaggaactcggccgctcacctccgacccaaccacttcccgagaagccatctctgtggtcatggtggtcccaggcctggctctccctgcgcccacccccaccacccagtcactccacccagtcaccccacccagctgtgacctgccacttccctccatctcacatgctttcccctcacctccctcaggaagcctccccagcctctggcctccagtcccaacaagccatgctccttccagagggaacctctgccaggggagcctccactttcttgctcctgcctccctacctggcacccaggccggccctggtaccctggtactgaataaaggcacacgtctaaatgatgtcggggggaatctgcccagtgttggcactggagcgaacacgacccactgccagcatggcccacgagccacacccccccaagccagcacctcctccccagaggaagcacggggctcgacggggcacgcccctgaatgggaggtcacacatggtgcatacaatggaataggattaatccgtgaaaaggaagaaattctgacacatgctccggcgtggaggaaccttgaggacgacgctgagtgaaagaagccagacacgaaaggacagatacggcaagactcgacttatgtgaggtccctagaggagtcggattcatagagactgaaaggatggcgggcaccaggggcggtggagaggggaaatggggagttactgtttaatggggacagagtttcagttttacaagatgaaaagggtcctggagctggatgggggtgacggccgcacaacagcatgaatggactgaacgccactgaaaactgaactcttgaaaatggttaaactggcatattttgttatgcatattttgccacaaaaagcaaacaactcttctccccaaaaatatctggggtgtacttacactaaatatgtagggcatatttactctcaacatttatttccttatttgaaattaaagtatttgggacacactgcactacaaaatga

SEQ ID NO: 33821 - DNA, 450 bp, Homo sapiens
  misc_feature (16)..(16): n is a, c, g, or t
  misc_feature (38)..(38): n is a, c, g, or t
  misc_feature (74)..(74): n is a, c, g, or t
  misc_feature (135)..(135): n is a, c, g, or t
  misc_feature (149)..(149): n is a, c, g, or t
  misc_feature (171)..(171): n is a, c, g, or t
gaggacctgttggtcntgtagtgatccccttggtaatnctattgatggaaagggtccaattggttccaaagacnccgtaggcgattggtctgaaaccccccggtatcattcctcggaatttcagtgcgggaaccnatgcaagactgcantaaggctgtggatagcttggtnccaattggtcgtggtcagcgtgaactgattattggtgaccgacagactgggaaaacctcaattgctattgacacaatcattaaccagaaacgtttcaatgatggatctgatgaaaagaagaagctgtactgtatttatgttgctattggtcaaaagagatccactgttgcccagttggtgaagagacttacagatgcagatgccatgaagtacaccattgtggtgtcggctacggcctcggatgctgccccacttcagtacctggctccttactctggc

SEQ ID NO: 33822 - DNA, 904 bp, Homo sapiens
ttttttttttgctgcctctaacaatgaatgcttatatctctgtgtatatctcacttgttttaagtcaatatcaaccaaactgaacctacactttttataagtgtttgaaacacaacctcaacactctgaggttaaagatcagcgagggccacaggattacttttaaaagcccttagttgttattggtagactagcagagagagtctactgggttgaatgtagttggtcagcagagtattccttctgctgttataatctgaaacactgtgggaaaagatcagtattttaccaagcagtcttggtaaaattcttttgataattattgttaattacctgtaagaggttttattacatccttcttacagtggtcactttgcagtcctaggatttatcatcctgtgtgtaagaagtgactaaaatgcatgtacattctctacacatcaattgaattcacctgggatcaggcctaaagcatgtttagcaaattctattaatattctaggaaataccatggtatttcctttagcatacttccagaaaacacataccaaagttccatttaggtacatttcctctattttctttgattttaataatgcaaatattaatatggcaattaggaatgttgagattctactgatgtcagatatatagaaaaataaagaaaagcaccataaactatatgaatgggcccatcgctactcaccataacattccaaattaaaaaagcaatgagatactttatacctcttgggagaacaaaattagaaagtggataatatcaagtattggtgaagatataagccgttaagtcccaatggccttctgatatttccaacttgtgatgagtttattgggatgtaacaccactgtaagtcaaggaacatttgtatctcaacatcca

SEQ ID NO: 33823 - DNA, 310 bp, Homo sapiens
gggactcttgatactcacaactcttggatataaaaattctctggaaattctctagcattaaaaacaaagtttcccttattccccccatttaattttctacttttctattccttaatccctcttcaaagccaacatgtttctgatcctctaacctcttccttttttctctctcactgctgcttcctgtacataatagtccacacagaccacactaaccctcagttggacctcaggatgtcagtgtaatctgtgccgctccattagccccggtaagcgagccacctaagcaaaggtaattacagtgtgtccg

SEQ ID NO: 33824 - DNA, 593 bp, Homo sapiens
  misc_feature (560)..(561): n is a, c, g, or t
  misc_feature (585)..(585): n is a, c, g, or t
aaattatgacagctaacatttattccatactgcctatgagccaggagttttaaggacactgctcacttataaaaatgtgtactgtatttctcccacattgtatatgaggaaactgaggcttagagaggttgagtcacttgcccaaagtcacacatccttcaagtagtagtgaatccattatatgagcccaggcatttggcccgagaggctacaagctcgacccctctgctctacaggaaaaagcctggaagcagaaggcctcttttatccaccagctgtgtgaccttgggttggtcactcacctctctgagcttccatctcctacagggttataaggagactcgaatatggagctgcatgtcgttgagctttgcaaactttgaagtgatgtcgagaaactcgcagatgactgaactcggctctcctctgcatgttccagagagactagcagatcactttacacgcagtaggtcttgtgctcttagccttttcaacttagaggcgtgcagtccagtttaccactgacctaggaggaaaaaggattgcaagggtttggggannggtcccctgggggaaccaaccccngggctcct

SEQ ID NO: 33825 - DNA, 751 bp, Homo sapiens
aaattatgacagctaacatttattccatactgcctatgagccaggagttttaaggacactgctcacttataaaaatgtgtactgtatttctcccacattgtatatgaggaaactgaggcttagagaggttgagtcacttgcccaaagtcacacatccttcaagtagtagtgaatccattatatgagcccaggcatttggcccgagaggctacaagctcgacccctctgctctacaggaaaaagcctggaagcagaaggcctcttttatccaccagctgtgtgaccttgggttggtcactcacctctctgagcttccatctcctacagggttataaggagactcgaatatggagctgcatgtcgttgagctttgcaaactttgaagtgatgtcgagaaactcgcagatgactgaactcggctctcctctgcatgttccagagagactagcagatcactttacacgcagtaggtcttgtgctcttagccttttcaacttagaggcgtgcagtccagtttaccactgacctagagaaaagatgcaggctgggacgtcctgggaccaaccgtgctctgtcttctgtgctattttccttatcgctcagttgttggcactccctcttttcagacctcatccctcatcccatcacattttatgacactgcaggtgtctttataagctgcctctaattcctattggagcagggtaagatacaaattagtcaaacaaataaataacagtggttgttcaat

SEQ ID NO: 33826 - DNA, 1169 bp, Homo sapiens
caagtgtattttgcgtgatttctgctatttccccttcttgtgtgtctcaggacatatcagaaaattttagtcctgagacagttaaatattttttaaatcacagtttaaacctagaacccagctgcatgaaggagttaaagagctacaactatttcttaaagtgttccattaatcaactaacaaatgtcactatcagactcttgccaagcagtttctgacatttctgccaaaggggaaaaaaatcagactttgagctgtattacaataaaaataataatgcaaataaggattcctaggcttgaattaaagaagttgtaatgattaggagtgcaaaagtataatgatatacactgacttgtttaaatccttatgtatggttcgctcccatctgagcttttcaaaaaatcccatctcaataagagatactctaatgacactggcaattgattatacttcttgtgtttgaagtcataggatactagtgaatggattatgcttaaatatgccaaccacctttgcaaataaatggttggtctgcttttaattcctaagtctacttttgctgcatagagatgttgcttctctgacaacctcttaccaatttagcaatgctgcttagtatatgaatttggatgcagtgctctctgctcatcatttagatggtcctttgatccaacatgctgggctcatggagaaggcttcataaaagattgggggataatgaacttttctcacaaggctccttaactcaaatatttattgcagaagaaggaactggtttcttatatgttgcactgtatgttcaactagcctaattaggacattgaaagtgacagaagagcagatcttaacccagtgttagaatgaatttcccataaacagagttgtccaacagtggaatggactgccttaatagtgagctccctgcctctgaaaatattcactggatgaccatctgttagaataccataaaaagattttctgtgctggctacatgttcaatataaagtcctttctggctctaagttctatgaatatataaactacatcagtgccatgctgtggttagatttatctgatgataacagctaagactatggagagggactttaaaaattctcaaaccattctgtgatcaatctttaacagcaactacatagctcttcctt

SEQ ID NO: 33827 - DNA, 364 bp, Homo sapiens
cctgcagtaaccaaaaacatgagctggataaggaggagaagaggagctggccgaatgatttttaagcagaagctgaatgttcaataagaatagagttgacaccttcagaggagaagtaagaaatagttttcctgtgtgtcatgtaagtcatgtttttaggcttacctttcatgcaattgcaacaacatcctctaagggtcttgaacgaaccttctattccccaaatattcctgaccattcccaatgactatctcagatgtgctccatcactttgtctctcctactgtgaaccttttggttggtatctactgttgacacatagcttacctaatgaactaggtggaagtatctggctaatgttgct

SEQ ID NO: 33828 - DNA, 668 bp, Homo sapiens
ttttttttttcccactctttctgctcctcaaactggataaatacaactgacctaggcttaagttcactgtttctttggtgtgctcaattctgctactgaatccctccagtgagtgttcttttcacttactatacttttcagtgccagaatttgtttgcttcctttagataattctctacttgcttctacatcattctgatatcttttaagcaacatccccatggtttccttgagcgccctggcacatttaagacagctgatttaaactttttgtctcctaagtctgatgtctggctttcctcaggggcagttactattaccttcttctgggagtgggccacattttgttttgttgcatgctttgtaatgttttttgtagaaaactggacatacgccgggtgcagtggctcacacctgtaatcccagcactttgggaggccaagatgataatggagctgaaaaattcttactgtcccagtgatgtagtagctgacgtgccaccgcagcacaaggagggaattcacgtgtttgtggtataaaacatcctgctgcaaaacatccacagcactgcagctgtgtcaaagtctagcacactcgattatgtactgaacagacttgataatgataataaatgaccacattactgagacagcaatcagggatcctct

SEQ ID NO: 33829 - DNA, 335 bp, Homo sapiens
agctggcacaagggagcagccatgtgttatctaggacaactgagaaaagcatttgaaaatgagtgcccaaatgacattaagcaaactttttttaaaaagcgatgcaataaaaagggtattcagagagccactagtatctatcttctaaacctagacagtgattcatgtaaactcaacatctaaagtggctgagggaaataatcaggtatctagggcaaagataaaggtatatgtgtttcctgtattacgaaccttatataacaaatattttagtgagggatgttgtaaagattgctaccttcctcttttggaaagaattttgggtgaataatact

SEQ ID NO: 33830 - DNA, 802 bp, Homo sapiens
gcaagaatatactggtctatgaaccaagaagtggcaccttgatcttggacttcccagccttcagaactaatgctcttttcatgttttgtgttcctccactggacttaatctaatgcatccaaagcatgagaagaaagagtcctgttcccaagtaccagggaaattgggcattgcttccagaagacatgaagaaacctgcagcagattctactctggattttgcacaagatcgtgtttcaagtcaaggtgaaccccagaaactgagaaagtcaatccactcaagagaaaatgctcaactaaggaggagataaagttcatttcttctgtgatttgattttttttcccttgcaaatagaaatcacattcattcaaaatcaaagacattgaattagctgcataagaagtcatggataattcattaaagatatagaatcacacagataatggcaagtgttggtgaggctttagaataactggaattctcatactttgcaggtgggagtgaaaaatggttcagcctcttgggaaaacagttgggcctttttttatgaacttattcgtacacttttagtgcatgacccagcagccctacttctaagtacttacctcagagaaatcaaaacatattcacacaataacttgtatgtgaattttttaaaggctttatttgtaatcacccaaaactggaaacaaatatccctcagttgaggaaaagatccctcagttaaggaaaagataaacaaattgtacatttgtaccatgtgatactattcaccagtaaaaaacaatgaactgattcctg

SEQ ID NO: 33831 - DNA, 912 bp, Homo sapiens
ttttctgttaactcagaattattatagcattcattattgttttgtgaaaatactagttaataatctccggttaatgaaataattatcttagataaatttactgaacttaatgtagaatatgttttttgtttcgttttgtttttgagacagggtctcacttgtcacccaggctggagtgcagtggcacaaacatgggtcactgcagcctcgactcctgggctcgagtgatgctcccacctcagcctctcaagtagctgggactacaggtgtgtgccactacacttggctaattttcatattttttgtagagacggggtttcaccatgttgcccagggctggtcttgaactcctcctgagttaaagcagtctgcttgtctctgtctgccagagtgctggcattataggcatgagccaccacccccttcttccactttcatttcaaacagttatgaagcagccactgaaaccggactctcgacaatgccaaaggaggttttgttttcttgtctttccatgtctttgctgtggtttgctctgaaactagaattaaacagctttttaaattgataaaaaagaaccaatgcaaataaaactacggtctgtagagtaaatggaaaaagttgtagaagtaataataaactacttttaaacaaatgagtaaggtagtagatattttgcaagaagtaaatagccaagtgtaaaagctgtcagttactttcatcaatcaggttagttgcagtcacgcaaattttaggtgattatataaggaactcaaattaggaatctttaaatgtaaatgacctaatactaaaaactacccaaaaaatatattcaaagataaatagaagaaatacttatgcatttgaaaaaatcgatgcattccacagttcctctgaatcaaaggtaaaaaa

SEQ ID NO: 33832 - DNA, 362 bp, Homo sapiens
gaggattagggcagaagcttatagatctgggtgaaggctgctcccacagcacagtagggagtctctgggtccagagagctcccaagggctgtagcagcttagggccctgtatctgcaaggctctatcttatcattaggaaacagctgtccatcgagattttatggggtctgcaaaggaggcaggcactaaatggatgaaaatctgcttatatgagctatttttgttaatgactgggcatggtaaaatttgagttaggtatgagccaagggatcagcaccagtcgacagtgaagaaataaacaaccgaggggccaatacacagaaacaatctttgacttgtttacataacacctctcatccaa

SEQ ID NO: 33833 - DNA, 414 bp, Homo sapiens
tgagacaaggtctcattctgtcgcccagcctggagtgcagtggcacaatcttggcccactgcaacctccgcctcccaggttcgagcaattctccggcctcagcctcccaaatagttgggattacaggcgcccaccaccacacctggctaatttttgtatttttagcagagatggggtttcaccatgttggccaggctgttctcaaactcctgacctcaggtgattcaacccgccttggcctcccaaagtgctggggttacaggcatgagccactgtgcccagccaactctgtctccaaaaaaaaaaaatttttttttgaaggcttttattctctctaaggaaaaaaaacaaacccaacaatcaaaaatttcctaattccttttgagaggtcttatactacagattgataaaagg

SEQ ID NO: 33834 - DNA, 1051 bp, Homo sapiens
caaaaaacttcaactctacctcctggttggaactcatattgtagattgcaaaagcacagaattaacatcataatactattgaattcaaaaagaaatctagaaacttcagggaatccagagaagatagagcagatggtctgaatagtcaccattcacattttgctttgttttggtaactattactatcacttaattacatagggtgaatataagaaaattgcctttttcttattttcagtgctaaccctaaaatggtaaaactcttgcaggttgaaattaacagcttctcagtggcccttcaacagaaggttgaagggtagcgaagttgcctctgtaatttccagggtgaacaaatctgaactcagttcttgcagttcccaaattcacagctatcttgggatatgttgatttgtgggctgcaaaatatgagaaattctacctcagagaattctgtttataaaaacttattcgcatctaataatctgaagagatataaacacagcaatgttgttacaactacctgttaattgttaatccttggaaaaagaattgacaattatttctgaagacatgaaaagcttcatataataaacaatagactctcaaatgtaaatcagtttttatttttaatttggagaagttaataataataaattgccagcaataaaaaataaatcattcatcaccgttaccgtgttactaatggctggtccatataggtttgcagtgattttggttcttccattctcaaaagaaataatccagcccagagacgaagagtgggtttgaagcataagtggggggttgttgaaaggaaataaagtacccttgggaaagaaccaagggtgtgacttgagagatcaagtgccagagaaaggtcatataccagttaaactccaatatttggcctctcagtgtgcatgcttgggtgtcttgcccaatatttgagattttatgaaacagctgctgcccctgagctcaggatgtgttctgtgtttaggaggtttccccctccctggtaccagctgagaccatttgtcaatcctgagct

SEQ ID NO: 33835 - DNA, 1373 bp, Homo sapiens
attcaccaagttcaccctgtctggtggcaggaaaagaagtcagctcaggaaccatggcagtgggaggtgaaggagagagagggtattagaggttgtccagaatgttttagcaaggccaatcagaaacaaactatagggtccccttattatggggctgaagaccagaaagtcatccctgctaatttttaggtagcagatctttgtttctagaattctgttcttttaaaagccttgggaggcatcattcattcctgaaagtcaacttacacatttgcctctgtagtttggagagaaatatatttagtatccagtgtgtcaggttgcaggcaaggaagtagttaacacttttctctttgttctccacaattgaactgtttttgggggggcagttctactgcttctggaattacataattgtgtgggtcatctcctttgaaggtctgtccatgctttttttaaagcacatcgttgaaagaagggtgctctgtacaaatgctgacatgcttttctcttgggttatacgtgagcaattgtagaatgaacagacttcagggttttggtgttggtatagctttctgtgaatagtgaaggtattaggaggctaatgttaaggcagcaggtgaggtggttttcaggcaacacatctgaactcattaattgatcaagtatttatcagatgctctttcctatatactaattatctccccaaaggaattctttgcagcacaaaagtttaacacttaattatacattttgagttgttctccagtgtttttttggcttttttgtttgtttgttttttgaaacagggtcttgttctgtcgcccaggctagagtgtagtggtaccatcgcggctcgctgcagccttgaccttacgggcttatgcgatcctcccacctcagcctcctgaatagctgggactacaggcatgtgtcaccatgcccggccaatttttttggatttttttgcagagacggggttttgccatgttgcccaggccggtcttgagctcctggactcaagtgatccgcctgcctcagcctcccaaagtgccgggattacaggcatgagctaccaccccggcccagtgttttggttagtctcttctcctcatagatttcaaccgccttgaggatggtttacgtttctctgtgtttactgtgcagactggacatccatattcatagcagtaaagatttcttcattttacaaactgctttttgtttttttgagatggagtctcactctgttgcgcaggctggagtgcagtgagccaagatcgctccattgccctccagcctgggtgacaagagcaaaactccatctcaaataaataaaaaggaaaaaaaagtcaataaactgtacaaattta

SEQ ID NO: 33836 - DNA, 1058 bp, Homo sapiens
attcaccaagttcaccctgtctggtggcaggaaaagaagtcagctcaggaaccatggcagtgggaggtgaaggagagagagggtattagaggttgtccagaatgttttagcaaggccaatcagaaacaaactatagggtccccttattatggggctgaagaccagaaagtcatccctgctaatttttaggtagcagatctttgtttctagaattctgttcttttaaaagccttgggaggcatcattcattcctgaaagtcaacttacacatttgcctctgtagtttggagagaaatatatttagtatccagtgtgtcaggttgcaggcaaggaagtagttaacacttttctctttgttctccacaattgaactgtttttgggggggcagttctactgcttctggaattacataattgtgtgggtcatctcctttgaaggtctgtccatgctttttttaaagcacatcgttgaaagaagggtgctctgtacaaatgctgacatgcttttctcttgggttatacgtgagcaattgtagaatgaacagacttcagggttttggtgttggtatagctttctgtgaatagtgaaggtattaggaggctaatgttaaggcagcaggtgaggtggttttcaggcaacacatctgaactcattaattgatcaagtatttatcagatgctctttcctatatactaattatctccccaaaggaattctttgcagcacaaaagtttaacacttaattatacattttgagttgttctccagtgtttttttggcttttttgtttgtttgttttttgaaacagggtcttgttctgtcgcccaggctagagtgtagtggtaccatcgcggctcgctgcagccttgaccttacgggcttatgcgatcctcccacctcagcctcctgaatagctgggactacaggcatgtgtcaccatgcccggccaatttttttggatttttttgcagcactttgggaggctgaggtgggacaattgctcaagaccagttcaacactagcctgggcagcatagtgagagtccacatatctacag

SEQ ID NO: 33837 - DNA, 458 bp, Homo sapiens
  misc_feature (27)..(27): n is a, c, g, or t
aaattttaaaaagggggccggttcccnaaagcgtcgaggtggaaaatatgccgttggatcagcttgcattggaggtggccaaggtattgctgtcatcattcagagcacagcctgaagagaccagtgagctcactgtgacccatccttactctacttggccaggccacagtaaaacaagtgaccttcagagcagctgccacaactggccatgccctgccattgaaacagtgattaagtttgatcaagccatggtgacacaaaaatgcattgatcatgaataggagcccatgctagaagtacattctctcagatttgaaccagtgaaatatgatgtatttctgagctaaaactcaactatagaagacattaaaagaaatcgtattcttgccaagtaaccaccacttctgccttagataatatgattataaggaaatcaaataaatgttgccttaacttca

SEQ ID NO: 33838 - DNA, 778 bp, Homo sapiens
cgagcggagctggcggccgcggccgcccgcgcgccaagttcctcagcccttggctcctgcccagtgtttagggtgttggcggagacaaaggggaagagtcatcgcctgtcggggctaggatatgatgggtgagaggtgtcaaaccaaattctctcggtttggaaacggagaaaatctaaaaatgaggatgtgaggaaagagtccgctctcaaggcgcgttgtggtctatccgagccccgtcccctgggctccctcgggctggggtgtgtttgtagttgctgctaagcgaacgccctttggagcttacggaggccttctgaaagacttcactgctactgacttgtctgaatttgctgccaaggctgccttgtctgctggcaaagtctcacctgaaacagttgacagtgtgattatgggcaatgtcctgcagagttcttcagatgctatatatttggcaaggcatgttggtttgcgtgtgggaatcccaaaggagaccccagctctcacgattaataggctctgtggttctggttttcagtccattgtgaatggatgtcaggaaatttgtgttaaagaagctgaagttgttttatgtggaggaaccgaaagcatgagccaagctccctactgtgtcagaaatgtgcgttttggaaccaagcttggatcagatatcaagtttctcacctggcctttttggaagttgaaaggaatgggacttaagagaatctatgcggattttagccaccaaacacatttgagatatcttttatgaagacag

SEQ ID NO: 33839 - DNA, 553 bp, Homo sapiens
tactaaattcgcggccgcgtcgacgtttgatcaagccatggtgacacaaaaatgcattgatcatgaataggagcccatgctagaagtacattctctcagatttgaaccagtgaaatatgatgtatttctgagctaaaactcaactatagaagacattaaaagaaatcgtattcttgccaagtaaccaccacttctgccttagataatatgattataaggaaatcaaataaatgttgccttaacttcagttaatattttcctgtcatttatatttttaaaaattttaaattgtgataagatacacattacataaactttaccatcttaacccttctttagcgtacaattcactggtattaagtacattcacatttttatacaaacatccccactttttatcaacagaactttttcagtcaccacacatggaaacaataactcctgattctcccatcccccatcccctgacaaccaccagtgtattttgtttctataaatttgatgactcgaggtacctcataagtgaaattataaatatctgtcctttcgtgac

SEQ ID NO: 33840 - DNA, 983 bp, Homo sapiens
  misc_feature (286)..(286): n is a, c, g, or t
tctgctcttggacacaggcatgcaactcaggtacaatataagtcagcttgaggagtggcttcggggaagaaaccttcaccagagtggagcagttcagaccatggaacctctgatccaagcagcccagctcctgcaattaaagaagaaaacccaggaggacgcagaggctatctgctccctgtgtacctccctcagcacccagcagattgtcaaaattttaaacctttatactcccctgaatgaatttgaagaacgggtaacagtggcctttatacgaacaatccanggtagcttcagtggagggaccaatccctagggcttcctactctgccattttatgtgatgtactcttctcccattctacaggcacaactacaagagcggaatgaccctcagcaactgctattagatgccaagcacatgtttcctgttttgtttccatttaatccatcttctctaaccatggactcaatccacatcccagcgtgtctcaatctggaattcctcaatgaagtctgaagatgcatgtttccagcattagtttgattcccaatgtgagcaagaaggaagtatatacagtaaagtaaattcaaggatctgttaaatctggtaaaagtagatcaaatcagagattgacagcctgtggagggtgctgaactatacagaattagacacaactatgtcattattttttgtacctactgctcagaataaaaacacttgaaatatggaagattttaagtttgatttcagtccaacacatatacataatttatagacaccaagcagtccccatagacatataaaaggtgtcaattctataaaacgaagctgcctagttttgatctttgcatagaactagagaatgtccaaattaaaataccaaatatatataagtcacataaattgccttcaaagggctttaacaaataatggtactaataaccatgataatggcatatactgacatttcccaaagtttg

SEQ ID NO: 33841 - DNA, 1997 bp, Homo sapiens
cgagcggagctggcggccgcggccgcccgcgcgccaagttcctcagcccttggctcctgcccagtgtttagggtgttggcggagacaaaggggaagagtcatcgcctgtcggggctaggatatgatgggtgagaggtgtcaaaccaaattctctcggtttggaaacggagaaaatctaaaaatgaggatgtgaggaaagagtccgctctcaaggcgcgttgtggtctatccgagccccgtcccctgggctccctcgggctggggtgaggcgggcagcgctacgcgtggggtaggaccatcttacgctgggaccccgccaaggagccccaggaagtaggtgaaagggcaggggcgtggctctcggggcgccacccacgctcttgaaatctgggtgattgcgagcggccgctcagcgtcccccacaccacagacccgcgccgccgacgacccagcagccgccatggctctgctccgaggtgtgtttgtagttgctgctaagcgaacgccctttggagcttacggaggccttctgaaagacttcactgctactgacttgtctgaatttgctgccaaggctgccttgtctgctggcaaagtctcacctgaaacagttgacagtgtgattatgggcaatgtcctgcagagttcttcagatgctatatatttggcaaggcatgttggtttgcgtgtgggaatcccaaaggagaccccagctctcacgattaataggctctgtggttctggttttcagtccattgtgaatggatgtcaggaaatttgtgttaaagaagctgaagttgttttatgtggaggaaccgaaagcatgagccaagctccctactgtgtcagaaatgtgcgttttggaaccaagcttggatcagatatcaagctggaagattctttatgggtatcattaacagatcagcatgtccagctccccatggcaatgactgcagagaatcttgctgtaaaacacaaaataagcagagaagaatgtgacaaatatgccctgcagtcacagcagagatggaaagctgctaatgatgctggctactttaatgatgaaatggcaccaattgaagtgaagacaaagaaaggaaaacagacaatgcaggtagacgagcatgctcggccccaaaccaccctggaacagttacagaaacttcctccagtattcaagaaagatggaactgttactgcagggaatgcatcgggtgtagctgatggtgctggagctgttatcatagctagtgaagatgctgttaagaaacataacttcacaccactggcaagaattgtgggctactttgtatctggatgtgatccctctatcatgggtattggtcctgtccctgctatcagtggggcactgaagaaagcaggactgagtcttaaggacatggatttggtagaggtgaatgaagcttttgctccccagtacttggctgttgagaggagtttggatcttgacataagtaaaaccaatgtgaatggaggagccattgctttgggtcacccactgggaggatctggatcaagaattactgcacacctggttcacgaattaaggcgtcgaggtggaaaatatgccgttggatcagcttgcattggaggtggccaaggtattgctgtcatcattcagagcacagcctgaagagaccagtgagctcactgtgacccatccttactctacttggccaggccacagtaaaacaagtgaccttcagagcagctgccacaactggccatgccctgccattgaaacagtgattaagtttgatcaagccatggtgacacaaaaatgcattgatcatgaataggagcccatgctagaagtacattctctcagatttgaaccagtgaaatatgatgtatttctgagctaaaactcaactatagaagacattaaaagaaatcgtattcttgccaagtaaccaccacttctgccttagataatatgattataaggaaatcaaataaatgttgccttaacttca

SEQ ID NO: 33842 - DNA, 2286 bp, Homo sapiens
cgagcggagctggcggccgcggccgcccgcgcgccaagttcctcagcccttggctcctgcccagtgtttagggtgttggcggagacaaaggggaagagtcatcgcctgtcggggctaggatatgatgggtgagaggtgtcaaaccaaattctctcggtttggaaacggagaaaatctaaaaatgaggatgtgaggaaagagtccgctctcaaggcgcgttgtggtctatccgagccccgtcccctgggctccctcgggctggggtgaggcgggcagcgctacgcgtggggtaggaccatcttacgctgggaccccgccaaggagccccaggaagtaggtgaaagggcaggggcgtggctctcggggcgccacccacgctcttgaaatctgggtgattgcgagcggccgctcagcgtcccccacaccacagacccgcgccgccgacgacccagcagccgccatggctctgctccgaggtgtgtttgtagttgctgctaagcgaacgccctttggagcttacggaggccttctgaaagacttcactgctactgacttgtctgaatttgctgccaaggctgccttgtctgctggcaaagtctcacctgaaacagttgacagtgtgattatgggcaatgtcctgcagagttcttcagatgctatatatttggcaaggcatgttggtttgcgtgtgggaatcccaaaggagaccccagctctcacgattaataggctctgtggttctggttttcagtccattgtgaatggatgtcaggaaatttgtgttaaagaagctgaagttgttttatgtggaggaaccgaaagcatgagccaagctccctactgtgtcagaaatgtgcgttttggaaccaagcttggatcagatatcaagctggaagattctttatgggtatcattaacagatcagcatgtccagctccccatggcaatgactgcagagaatcttgctgtaaaacacaaaataagcagagaagaatgtgacaaatatgccctgcagtcacagcagagatggaaagctgctaatgatgctggctactttaatgatgaaatggcaccaattgaagtgaagacaaagaaaggaaaacagacaatgcaggtagacgagcatgctcggccccaaaccaccctggaacagttacagaaacttcctccagtattcaagaaagatggaactgttactgcagggaatgcatcgggtgtagctgatggtgctggagctgttatcatagctagtgaagatgctgttaagaaacataacttcacaccactggcaagaattgtgggctactttgtatctggatgtgatccctctatcatgggtattggtcctgtccctgctatcagtggggcactgaagaaagcaggactgagtcttaaggacatggatttggtagaggtgaatgaagcttttgctccccagtacttggctgttgagaggagtttggatcttgacataagtaaaaccaatgtgaatggaggagccattgctttgggtcacccactgggaggatctggatcaagaattactgcacacctggttcacgaattaaggcgtcgaggtggaaaatatgccgttggatcagcttgcattggaggtggccaaggtattgctgtcatcattcagagcacagcctgaagagaccagtgagctcactgtgacccatccttactctacttggccaggccacagtaaaacaagtgaccttcagagcagctgccacaactggccatgccctgccattgaaacagtgattaagtttgatcaagccatggtgacacaaaaatgcattgatcatgaataggagcccatgctagaagtacattctctcagatttgaaccagtgaaatatgatgtatttctgagctaaaactcaactatagaagacattaaaagaaatcgtattcttgccaagtaaccaccacttctgccttagataatatgattataaggaaatcaaataaatgttgccttaacttcaaaaaaaaaaaagaaaaaaaacaaaaaacttgtggggggcgccgggacgctcgaaaaagttttcaaaacattcggtggggcggggggcccagaggttgaggaaatgggccataggttgccagaggaaaccgggctggacatggtcggggtctcaccaaaaaaaggcgggggaccggggttcggacaaccaagggcgtcgggctagggctcaacgagacaggactatcccccccgcgccgcggggaacaacaagaacacacgaaaacgagcaaacacaacaaccagagaca

SEQ ID NO: 33843 - DNA, 2303 bp, Homo sapiens
cgagcggagctggcggccgcggccgcccgcgcgccaagttcctcagcccttggctcctgcccagtgtttagggtgttggcggagacaaaggggaagagtcatcgcctgtcggggctaggatatgatgggtgagaggtgtcaaaccaaattctctcggtttggaaacggagaaaatctaaaaatgaggatgtgaggaaagagtccgctctcaaggcgcgttgtggtctatccgagccccgtcccctgggctccctcgggctggggtgaggcgggcagcgctacgcgtggggtaggaccatcttacgctgggaccccgccaaggagccccaggaagtaggtgaaagggcaggggcgtggctctcggggcgccacccacgctcttgaaatctgggtgattgcgagcggccgctcagcgtcccccacaccacagacccgcgccgccgacgacccagcagccgccatggctctgctccgaggtgtgtttgtagttgctgctaagcgaacgccctttggagcttacggaggccttctgaaagacttcactgctactgacttgtctgaatttgctgccaaggctgccttgtctgctggcaaagtctcacctgaaacagttgacagtgtgattatgggcaatgtcctgcagagttcttcagatgctatatatttggcaaggcatgttggtttgcgtgtgggaatcccaaaggagaccccagctctcacgattaataggctctgtggttctggttttcagtccattgtgaatggatgtcaggaaatttgtgttaaagaagctgaagttgttttatgtggaggaaccgaaagcatgagccaagctccctactgtgtcagaaatgtgcgttttggaaccaagcttggatcagatatcaagctggaagattctttatgggtatcattaacagatcagcatgtccagctccccatggcaatgactgcagagaatcttgctgtaaaacacaaaataagcagagaagaatgtgacaaatatgccctgcagtcacagcagagatggaaagctgctaatgatgctggctactttaatgatgaaatggcaccaattgaagtgaagacaaagaaaggaaaacagacaatgcaggtagacgagcatgctcggccccaaaccaccctggaacagttacagaaacttcctccagtattcaagaaagatggaactgttactgcagggaatgcatcgggtgtagctgatggtgctggagctgttatcatagctagtgaagatgctgttaagaaacataacttcacaccactggcaagaattgtgggctactttgtatctggatgtgatccctctatcatgggtattggtcctgtccctgctatcagtggggcactgaagaaagcaggactgagtcttaaggacatggatttggtagaggtgaatgaagcttttgctccccagtacttggctgttgagaggagtttggatcttgacataagtaaaaccaatgtgaatggaggagccattgctttgggtcacccactgggaggatctggatcaagaattactgcacacctggttcacgaattaaggcgtcgaggtggaaaatatgccgttggatcagcttgcattggaggtggccaaggtattgctgtcatcattcagagcacagcctgaagagaccagtgagctcactgtgacccatccttactctacttggccaggccacagtaaaacaagtgaccttcagagcagctgccacaactggccatgccctgccattgaaacagtgattaagtttgatcaagccatggtgacacaaaaatgcattgatcatgaataggagcccatgctagaagtacattctctcagatttgaaccagtgaaatatgatgtatttctgagctaaaactcaactatagaagacattaaaagaaatcgtattcttgccaagtaaccaccacttctgccttagataatatgattataaggaaatcaaataaatgttgccttaacttcagttaatattttcctgtcatttatatttttaaaaattttaaattgtgataagatacacattacataaactttaccatcttaacccttctttagcgtacaattcactggtattaagtacattcacatttttatacaaacatccccactttttatcaacagaactttttcagtcaccacacatggaaacaataactcctgattctcccatcccccatcccctgacaaccaccagtgtattttgtttctataaatttgatgactcgaggtacctcataagtgaaattataaatatctgtcctttcgtgac

SEQ ID NO: 33844 - DNA, 1969 bp, Homo sapiens
cgagcggagctggcggccgcggccgcccgcgcgccaagttcctcagcccttggctcctgcccagtgtttagggtgttggcggagacaaaggggaagagtcatcgcctgtcggggctaggatatgatgggtgagaggtgtcaaaccaaattctctcggtttggaaacggagaaaatctaaaaatgaggatgtgaggaaagagtccgctctcaaggcgcgttgtggtctatccgagccccgtcccctgggctccctcgggctggggtgaggcgggcagcgctacgcgtggggtaggaccatcttacgctgggaccccgccaaggagccccaggaagtaggtgaaagggcaggggcgtggctctcggggcgccacccacgctcttgaaatctgggtgattgcgagcggccgctcagcgtcccccacaccacagacccgcgccgccgacgacccagcagccgccatggctctgctccgaggtgtgtttgtagttgctgctaagcgaacgccctttggagcttacggaggccttctgaaagacttcactgctactgacttgtctgaatttgctgccaaggctgccttgtctgctggcaaagtctcacctgaaacagttgacagtgtgattatgggcaatgtcctgcagagttcttcagatgctatatatttggcaaggcatgttggtttgcgtgtgggaatcccaaaggagaccccagctctcacgattaataggctctgtggttctggttttcagtccattgtgaatggatgtcaggaaatttgtgttaaagaagctgaagttgttttatgtggaggaaccgaaagcatgagccaagctccctactgtgtcagaaatgtgcgttttggaaccaagcttggatcagatatcaagctggaagattctttatgggtatcattaacagatcagcatgtccagctccccatggcaatgactgcagagaatcttgctgtaaaacacaaaataagcagagaagaatgtgacaaatatgccctgcagtcacagcagagatggaaagctgctaatgatgctggctactttaatgatgaaatggcaccaattgaagtgaagacaaagaaaggaaaacagacaatgcaggtagacgagcatgctcggccccaaaccaccctggaacagttacagaaacttcctccagtattcaagaaagatggaactgttactgcagggaatgcatcgggtgtagctgatggtgctggagctgttatcatagctagtgaagatgctgttaagaaacataacttcacaccactggcaagaattgtgggctactttgtatctggatgtgatccctctatcatgggtattggtcctgtccctgctatcagtggggcactgaagaaagcaggactgagtcttaaggacatggatttggtagaggtgaatgaagcttttgctccccagtacttggctgttgagaggagtttggatcttgacataagtaaaaccaatgtgaatggaggagccattgctttgggtcacccactgggaggatctggatcaagaattactgcacacctggttcacgaattaaggcgtcgaggtggaaaatatgccgttggatcagcttgcattggaggtggccaaggtattgctgtcatcattcagagcacagcctgaagagaccagtgagctcactgtgacccatccttactctacttggccaggccacagtaaaacaagtgaccttcagagcagctgccacaactggccatgccctgccattgaaacagtgattaagtttgatcaagccatggtgacacaaaaatgcattgatcatgaataggagcccatgctagaagtacattctctcagatttgaaccagtgtggagagagctctctccacactggagcctccgtagacctaaccatcttctccttacacctagcaggtgtctcctctatcttaggggccatcaatttcatcacaacaa

SEQ ID NO: 33845 - DNA, 1746 bp, Homo sapiens
cgagcggagctggcggccgcggccgcccgcgcgccaagttcctcagcccttggctcctgcccagtgtttagggtgttggcggagacaaaggggaagagtcatcgcctgtcggggctaggatatgatgggtgagaggtgtcaaaccaaattctctcggtttggaaacggagaaaatctaaaaatgaggatgtgaggaaagagtccgctctcaaggcgcgttgtggtctatccgagccccgtcccctgggctccctcgggctggggtgaggcgggcagcgctacgcgtggggtaggaccatcttacgctgggaccccgccaaggagccccaggaagtaggtgaaagggcaggggcgtggctctcggggcgccacccacgctcttgaaatctgggtgattgcgagcggccgctcagcgtcccccacaccacagacccgcgccgccgacgacccagcagccgccatggctctgctccgaggtgtgtttgtagttgctgctaagcgaacgccctttggagcttacggaggccttctgaaagacttcactgctactgacttgtctgaatttgctgccaaggctgccttgtctgctggcaaagtctcacctgaaacagttgacagtgtgattatgggcaatgtcctgcagagttcttcagatgctatatatttggcaaggcatgttggtttgcgtgtgggaatcccaaaggagaccccagctctcacgattaataggctctgtggttctggttttcagtccattgtgaatggatgtcaggaaatttgtgttaaagaagctgaagttgttttatgtggaggaaccgaaagcatgagccaagctccctactgtgtcagaaatgtgcgttttggaaccaagcttggatcagatatcaagctggaagattctttatgggtatcattaacagatcagcatgtccagctccccatggcaatgactgcagagaatcttgctgtaaaacacaaaataagcagagaagaatgtgacaaatatgccctgcagtcacagcagagatggaaagctgctaatgatgctggctactttaatgatgaaatggcaccaattgaagtgaagacaaagaaaggaaaacagacaatgcaggtagacgagcatgctcggccccaaaccaccctggaacagttacagaaacttcctccagtattcaagaaagatggaactgttactgcagggaatgcatcgggtgtagctgatggtgctggagctgttatcatagctagtgaagatgctgttaagaaacataacttcacaccactggcaagaattgtgggctactttgtatctggatgtgatccctctatcatgggtattggtcctgtccctgctatcagtggggcactgaagaaagcaggactgagtcttaaggacatggatttggtagaggtgaatgaagcttttgctccccagtacttggctgttgagaggagtttggatcttgacataagtaaaaccaatgtgaatggaggagccattgctttgggtcacccactgggaggatctggatcaagaattactgcacacctggttcacgaattaaggcgtcgaggtggaaaatatgccgttggatcagcttgcattggaggtggccaaggtattgctgtcatcattcagagcacagcctgaagagaccagtgagctcactgtgacccatccttactctacttgcgcgagcggtattcgcgatcggagggatactctaggaacagctactgacc

SEQ ID NO: 33846 - DNA, 1944 bp, Homo sapiens
cgagcggagctggcggccgcggccgcccgcgcgccaagttcctcagcccttggctcctgcccagtgtttagggtgttggcggagacaaaggggaagagtcatcgcctgtcggggctaggatatgatgggtgagaggtgtcaaaccaaattctctcggtttggaaacggagaaaatctaaaaatgaggatgtgaggaaagagtccgctctcaaggcgcgttgtggtctatccgagccccgtcccctgggctccctcgggctggggtgaggcgggcagcgctacgcgtggggtaggaccatcttacgctgggaccccgccaaggagccccaggaagtaggtgaaagggcaggggcgtggctctcggggcgccacccacgctcttgaaatctgggtgattgcgagcggccgctcagcgtcccccacaccacagacccgcgccgccgacgacccagcagccgccatggctctgctccgaggtgtgtttgtagttgctgctaagcgaacgccctttggagcttacggaggccttctgaaagacttcactgctactgacttgtctgaatttgctgccaaggctgccttgtctgctggcaaagtctcacctgaaacagttgacagtgtgattatgggcaatgtcctgcagagttcttcagatgctatatatttggcaaggcatgttggtttgcgtgtgggaatcccaaaggagaccccagctctcacgattaataggctctgtggttctggttttcagtccattgtgaatggatgtcaggaaatttgtgttaaagaagctgaagttgttttatgtggaggaaccgaaagcatgagccaagctccctactgtgtcagaaatgtgcgttttggaaccaagcttggatcagatatcaagctggaagattctttatgggtatcattaacagatcagcatgtccagctccccatggcaatgactgcagagaatcttgctgtaaaacacaaaataagcagagaagaatgtgacaaatatgccctgcagtcacagcagagatggaaagctgctaatgatgctggctactttaatgatgaaatggcaccaattgaagtgaagacaaagaaaggagttacagaaacttcctccagtattcaagaaagatggaactgttactgcagggaatgcatcgggtgtagctgatggtgctggagctgttatcatagctagtgaagatgctgttaagaaacataacttcacaccactggcaagaattgtgggctactttgtatctggatgtgatccctctatcatgggtattggtcctgtccctgctatcagtggggcactgaagaaagcaggactgagtcttaaggacatggatttggtagaggtgaatgaagcttttgctccccagtacttggctgttgagaggagtttggatcttgacataagtaaaaccaatgtgaatggaggagccattgctttgggtcacccactgggaggatctggatcaagaattactgcacacctggttcacgaattaaggcgtcgaggtggaaaatatgccgttggatcagcttgcattggaggtggccaaggtattgctgtcatcattcagagcacagcctgaagagaccagtgagctcactgtgacccatccttactctacttggccaggccacagtaaaacaagtgaccttcagagcagctgccacaactggccatgccctgccattgaaacagtgattaagtttgatcaagccatggtgacacaaaaatgcattgatcatgaataggagcccatgctagaagtacattctctcagatttgaaccagtgaaatatgatgtatttctgagctaaaactcaactatagaagacattaaaagaaatcgtattcttgccaagtaaccaccacttctgccttagataatatgattataaggaaatcaaataaatgttgccttaacttca

SEQ ID NO: 33847 - DNA, 1734 bp, Homo sapiens
cgagcggagctggcggccgcggccgcccgcgcgccaagttcctcagcccttggctcctgcccagtgtttagggtgttggcggagacaaaggggaagagtcatcgcctgtcggggctaggatatgatgggtgagaggtgtcaaaccaaattctctcggtttggaaacggagaaaatctaaaaatgaggatgtgaggaaagagtccgctctcaaggtgtgtttgtagttgctgctaagcgaacgccctttggagcttacggaggccttctgaaagacttcactgctactgacttgtctgaatttgctgccaaggctgccttgtctgctggcaaagtctcacctgaaacagttgacagtgtgattatgggcaatgtcctgcagagttcttcagatgctatatatttggcaaggcatgttggtttgcgtgtgggaatcccaaaggagaccccagctctcacgattaataggctctgtggttctggttttcagtccattgtgaatggatgtcaggaaatttgtgttaaagaagctgaagttgttttatgtggaggaaccgaaagcatgagccaagctccctactgtgtcagaaatgtgcgttttggaaccaagcttggatcagatatcaagctggaagattctttatgggtatcattaacagatcagcatgtccagctccccatggcaatgactgcagagaatcttgctgtaaaacacaaaataagcagagaagaatgtgacaaatatgccctgcagtcacagcagagatggaaagctgctaatgatgctggctactttaatgatgaaatggcaccaattgaagtgaagacaaagaaaggaaaacagacaatgcaggtagacgagcatgctcggccccaaaccaccctggaacagttacagaaacttcctccagtattcaagaaagatggaactgttactgcagggaatgcatcgggtgtagctgatggtgctggagctgttatcatagctagtgaagatgctgttaagaaacataacttcacaccactggcaagaattgtgggctactttgtatctggatgtgatccctctatcatgggtattggtcctgtccctgctatcagtggggcactgaagaaagcaggactgagtcttaaggacatggatttggtagaggtgaatgaagcttttgctccccagtacttggctgttgagaggagtttggatcttgacataagtaaaaccaatgtgaatggaggagccattgctttgggtcacccactgggaggatctggatcaagaattactgcacacctggttcacgaattaaggcgtcgaggtggaaaatatgccgttggatcagcttgcattggaggtggccaaggtattgctgtcatcattcagagcacagcctgaagagaccagtgagctcactgtgacccatccttactctacttggccaggccacagtaaaacaagtgaccttcagagcagctgccacaactggccatgccctgccattgaaacagtgattaagtttgatcaagccatggtgacacaaaaatgcattgatcatgaataggagcccatgctagaagtacattctctcagatttgaaccagtgaaatatgatgtatttctgagctaaaactcaactatagaagacattaaaagaaatcgtattcttgccaagtaaccaccacttctgccttagataatatgattataaggaaatcaaataaatgttgccttaacttca

SEQ ID NO: 33848 - DNA, 1649 bp, Homo sapiens
cgagcggagctggcggccgcggccgcccgcgcgccaagttcctcagcccttggctcctgcccagtgtttagggtgttggcggagacaaaggggaagagtcatcgcctgtcggggctaggatatgatgggtgtgtttgtagttgctgctaagcgaacgccctttggagcttacggaggccttctgaaagacttcactgctactgacttgtctgaatttgctgccaaggctgccttgtctgctggcaaagtctcacctgaaacagttgacagtgtgattatgggcaatgtcctgcagagttcttcagatgctatatatttggcaaggcatgttggtttgcgtgtgggaatcccaaaggagaccccagctctcacgattaataggctctgtggttctggttttcagtccattgtgaatggatgtcaggaaatttgtgttaaagaagctgaagttgttttatgtggaggaaccgaaagcatgagccaagctccctactgtgtcagaaatgtgcgttttggaaccaagcttggatcagatatcaagctggaagattctttatgggtatcattaacagatcagcatgtccagctccccatggcaatgactgcagagaatcttgctgtaaaacacaaaataagcagagaagaatgtgacaaatatgccctgcagtcacagcagagatggaaagctgctaatgatgctggctactttaatgatgaaatggcaccaattgaagtgaagacaaagaaaggaaaacagacaatgcaggtagacgagcatgctcggccccaaaccaccctggaacagttacagaaacttcctccagtattcaagaaagatggaactgttactgcagggaatgcatcgggtgtagctgatggtgctggagctgttatcatagctagtgaagatgctgttaagaaacataacttcacaccactggcaagaattgtgggctactttgtatctggatgtgatccctctatcatgggtattggtcctgtccctgctatcagtggggcactgaagaaagcaggactgagtcttaaggacatggatttggtagaggtgaatgaagcttttgctccccagtacttggctgttgagaggagtttggatcttgacataagtaaaaccaatgtgaatggaggagccattgctttgggtcacccactgggaggatctggatcaagaattactgcacacctggttcacgaattaaggcgtcgaggtggaaaatatgccgttggatcagcttgcattggaggtggccaaggtattgctgtcatcattcagagcacagcctgaagagaccagtgagctcactgtgacccatccttactctacttggccaggccacagtaaaacaagtgaccttcagagcagctgccacaactggccatgccctgccattgaaacagtgattaagtttgatcaagccatggtgacacaaaaatgcattgatcatgaataggagcccatgctagaagtacattctctcagatttgaaccagtgaaatatgatgtatttctgagctaaaactcaactatagaagacattaaaagaaatcgtattcttgccaagtaaccaccacttctgccttagataatatgattataaggaaatcaaataaatgttgccttaacttca

SEQ ID NO: 33849 - DNA, 1942 bp, Homo sapiens
cgagcggagctggcggccgcggccgcccgcgcgccaagttcctcagcccttggctcctgcccagtgtttagggtgttggcggagacaaaggggaagagtcatcgcctgtcggggctaggatatgatgggtgagaggtgtcaaaccaaattctctcggtttggaaacggagaaaatctaaaaatgaggatgtgaggaaagagtccgctctcaaggcgcgttgtggtctatccgagccccgtcccctgggctccctcgggctggggtgaggcgggcagcgctacgcgtggggtaggaccatcttacgctgggaccccgccaaggagccccaggaagtaggtgaaagggcaggggcgtggctctcggggcgccacccacgctcttgaaatctgggtgattgcgagcggccgctcagcgtcccccacaccacagacccgcgccgccgacgacccagcagccgccatggctctgctccgaggtgtgtttgtagttgctgctaagcgaacgccctttggagcttacggaggccttctgaaagacttcactgctactgacttgtctgaatttgctgccaaggctgccttgtctgctggcaaagtctcacctgaaacagttgacagtgtgattatgggcaatgtcctgcagagttcttcagatgctatatatttggcaaggcatgttggtttgcgtgtgggaatcccaaaggagaccccagctctcacgattaataggctctgtggttctggttttcagtccattgtgaatggatgtcaggaaatttgtgttaaagaagctgaagttgttttatgtggaggaaccgaaagcatgagccaagctccctactgtgtcagaaatgtgcgttttggaaccaagcttggatcagatatcaagctggaagattctttatgggtatcattaacagatcagcatgtccagctccccatggcaatgactgcagagaatcttgctgtaaaacacaaaatactaatgatgctggctactttaatgatgaaatggcaccaattgaagtgaagacaaagaaaggaaaacagacaatgcaggtagacgagcatgctcggccccaaaccaccctggaacagttacagaaacttcctccagtattcaagaaagatggaactgttactgcagggaatgcatcgggtgtagctgatggtgctggagctgttatcatagctagtgaagatgctgttaagaaacataacttcacaccactggcaagaattgtgggctactttgtatctggatgtgatccctctatcatgggtattggtcctgtccctgctatcagtggggcactgaagaaagcaggactgagtcttaaggacatggatttggtagaggtgaatgaagcttttgctccccagtacttggctgttgagaggagtttggatcttgacataagtaaaaccaatgtgaatggaggagccattgctttgggtcacccactgggaggatctggatcaagaattactgcacacctggttcacgaattaaggcgtcgaggtggaaaatatgccgttggatcagcttgcattggaggtggccaaggtattgctgtcatcattcagagcacagcctgaagagaccagtgagctcactgtgacccatccttactctacttggccaggccacagtaaaacaagtgaccttcagagcagctgccacaactggccatgccctgccattgaaacagtgattaagtttgatcaagccatggtgacacaaaaatgcattgatcatgaataggagcccatgctagaagtacattctctcagatttgaaccagtgaaatatgatgtatttctgagctaaaactcaactatagaagacattaaaagaaatcgtattcttgccaagtaaccaccacttctgccttagataatatgattataaggaaatcaaataaatgttgccttaacttca

SEQ ID NO: 33850 - DNA, 1784 bp, Homo sapiens
cgagcggagctggcggccgcggccgcccgcgcgccaagttcctcagcccttggctcctgcccagtgtttagggtgttggcggagacaaaggggaagagtcatcgcctgtcggggctaggatatgatgggtgagaggtgtcaaaccaaattctctcggtttggaaacggagaaaatctaaaaatgaggatgtgaggaaagagtccgctctcaaggcgcgttgtggtctatccgagccccgtcccctgggctccctcgggctggggtgtgtttgtagttgctgctaagcgaacgccctttggagcttacggaggccttctgaaagacttcactgctactgacttgtctgaatttgctgccaaggctgccttgtctgctggcaaagtctcacctgaaacagttgacagtgtgattatgggcaatgtcctgcagagttcttcagatgctatatatttggcaaggcatgttggtttgcgtgtgggaatcccaaaggagaccccagctctcacgattaataggctctgtggttctggttttcagtccattgtgaatggatgtcaggaaatttgtgttaaagaagctgaagttgttttatgtggaggaaccgaaagcatgagccaagctccctactgtgtcagaaatgtgcgttttggaaccaagcttggatcagatatcaagctggaagattctttatgggtatcattaacagatcagcatgtccagctccccatggcaatgactgcagagaatcttgctgtaaaacacaaaataagcagagaagaatgtgacaaatatgccctgcagtcacagcagagatggaaagctgctaatgatgctggctactttaatgatgaaatggcaccaattgaagtgaagacaaagaaaggaaaacagacaatgcaggtagacgagcatgctcggccccaaaccaccctggaacagttacagaaacttcctccagtattcaagaaagatggaactgttactgcagggaatgcatcgggtgtagctgatggtgctggagctgttatcatagctagtgaagatgctgttaagaaacataacttcacaccactggcaagaattgtgggctactttgtatctggatgtgatccctctatcatgggtattggtcctgtccctgctatcagtggggcactgaagaaagcaggactgagtcttaaggacatggatttggtagaggtgaatgaagcttttgctccccagtacttggctgttgagaggagtttggatcttgacataagtaaaaccaatgtgaatggaggagccattgctttgggtcacccactgggaggatctggatcaagaattactgcacacctggttcacgaattaaggcgtcgaggtggaaaatatgccgttggatcagcttgcattggaggtggccaaggtattgctgtcatcattcagagcacagcctgaagagaccagtgagctcactgtgacccatccttactctacttggccaggccacagtaaaacaagtgaccttcagagcagctgccacaactggccatgccctgccattgaaacagtgattaagtttgatcaagccatggtgacacaaaaatgcattgatcatgaataggagcccatgctagaagtacattctctcagatttgaaccagtgaaatatgatgtatttctgagctaaaactcaactatagaagacattaaaagaaatcgtattcttgccaagtaaccaccacttctgccttagataatatgattataaggaaatcaaataaatgttgccttaacttca

SEQ ID NO: 33851 - DNA, 1996 bp, Homo sapiens
  misc_feature (286)..(286): n is a, c, g, or t
tctgctcttggacacaggcatgcaactcaggtacaatataagtcagcttgaggagtggcttcggggaagaaaccttcaccagagtggagcagttcagaccatggaacctctgatccaagcagcccagctcctgcaattaaagaagaaaacccaggaggacgcagaggctatctgctccctgtgtacctccctcagcacccagcagattgtcaaaattttaaacctttatactcccctgaatgaatttgaagaacgggtaacagtggcctttatacgaacaatccanggcacaactacaagagcggaatgaccctcagcaactgctattagatgccaagcacatgtttcctgttttgtttccatttaatccatcttctctaaccatggactcaatccacatcccagcgtgtctcaatctggaattcctcaatgaagtctgaagatgcatgtttccagcattagtttgattcccaatgtgtgtttgtagttgctgctaagcgaacgccctttggagcttacggaggccttctgaaagacttcactgctactgacttgtctgaatttgctgccaaggctgccttgtctgctggcaaagtctcacctgaaacagttgacagtgtgattatgggcaatgtcctgcagagttcttcagatgctatatatttggcaaggcatgttggtttgcgtgtgggaatcccaaaggagaccccagctctcacgattaataggctctgtggttctggttttcagtccattgtgaatggatgtcaggaaatttgtgttaaagaagctgaagttgttttatgtggaggaaccgaaagcatgagccaagctccctactgtgtcagaaatgtgcgttttggaaccaagcttggatcagatatcaagctggaagattctttatgggtatcattaacagatcagcatgtccagctccccatggcaatgactgcagagaatcttgctgtaaaacacaaaataagcagagaagaatgtgacaaatatgccctgcagtcacagcagagatggaaagctgctaatgatgctggctactttaatgatgaaatggcaccaattgaagtgaagacaaagaaaggaaaacagacaatgcaggtagacgagcatgctcggccccaaaccaccctggaacagttacagaaacttcctccagtattcaagaaagatggaactgttactgcagggaatgcatcgggtgtagctgatggtgctggagctgttatcatagctagtgaagatgctgttaagaaacataacttcacaccactggcaagaattgtgggctactttgtatctggatgtgatccctctatcatgggtattggtcctgtccctgctatcagtggggcactgaagaaagcaggactgagtcttaaggacatggatttggtagaggtgaatgaagcttttgctccccagtacttggctgttgagaggagtttggatcttgacataagtaaaaccaatgtgaatggaggagccattgctttgggtcacccactgggaggatctggatcaagaattactgcacacctggttcacgaattaaggcgtcgaggtggaaaatatgccgttggatcagcttgcattggaggtggccaaggtattgctgtcatcattcagagcacagcctgaagagaccagtgagctcactgtgacccatccttactctacttggccaggccacagtaaaacaagtgaccttcagagcagctgccacaactggccatgccctgccattgaaacagtgattaagtttgatcaagccatggtgacacaaaaatgcattgatcatgaataggagcccatgctagaagtacattctctcagatttgaaccagtgaaatatgatgtatttctgagctaaaactcaactatagaagacattaaaagaaatcgtattcttgccaagtaaccaccacttctgccttagataatatgattataaggaaatcaaataaatgttgccttaacttca

SEQ ID NO: 33852 - DNA, 1588 bp, Homo sapiens
ccgggagtgaatcggcgaggacagacccgcgctgcgacgaccagcagccgcatggctctgctccgaggtgtgtttgtagttgctgctaagcgaacgccctttggagcttacggaggccttctgaaagacttcactgctactgacttgtctgaatttgctgccaaggctgccttgtctgctggcaaagtctcacctgaaacagttgacagtgtgattatgggcaatgtcctgcagagttcttcagatgctatatatttggcaaggcatgttggtttgcgtgtgggaatcccaaaggagaccccagctctcacgattaataggctctgtggttctggttttcagtccattgtgaatggatgtcaggaaatttgtgttaaagaagctgaagttgttttatgtggaggaaccgaaagcatgagccaagctccctactgtgtcagaaatgtgcgttttggaaccaagcttggatcagatatcaagctggaagattctttatgggtatcattaacagatcagcatgtccagctccccatggcaatgactgcagagaatcttgctgtaaaacacaaaataagcagagaagaatgtgacaaatatgccctgcagtcacagcagagatggaaagctgctaatgatgctggctactttaatgatgaaatggcaccaattgaagtgaagacaaagaaaggaaaacagacaatgcaggtagacgagcatgctcggccccaaaccaccctggaacagttacagaaacttcctccagtattcaagaaagatggaactgttactgcagggaatgcatcgggtgtagctgatggtgctggagctgttatcatagctagtgaagatgctgttaagaaacataacttcacaccactggcaagaattgtgggctactttgtatctggatgtgatccctctatcatgggtattggtcctgtccctgctatcagtggggcactgaagaaagcaggactgagtcttaaggacatggatttggtagaggtgaatgaagcttttgctccccagtacttggctgttgagaggagtttggatcttgacataagtaaaaccaatgtgaatggaggagccattgctttgggtcacccactgggaggatctggatcaagaattactgcacacctggttcacgaattaaggcgtcgaggtggaaaatatgccgttggatcagcttgcattggaggtggccaaggtattgctgtcatcattcagagcacagcctgaagagaccagtgagctcactgtgacccatccttactctacttggccaggccacagtaaaacaagtgaccttcagagcagctgccacaactggccatgccctgccattgaaacagtgattaagtttgatcaagccatggtgacacaaaaatgcattgatcatgaataggagcccatgctagaagtacattctctcagatttgaaccagtgaaatatgatgtatttctgagctaaaactcaactatagaagacattaaaagaaatcgtattcttgccaagtaaccaccacttctgccttagataatatgattataaggaaatcaaataaatgttgccttaacttca

SEQ ID NO: 33853 - DNA, 1542 bp, Homo sapiens
cgagcggagctggcggccgcggccgcccgcgcgccaagttcctcagcccttggctcctgcccagtgtttagggtgttggcggagacaaaggggaagagtcatcgcctgtcggggctaggatatgatgggtgagaggtgtcaaaccaaattctctcggtttggaaacggagaaaatctaaaaatgaggatgtgaggaaagagtccgctctcaaggcgcgttgtggtctatccgagccccgtcccctgggctccctcgggctggggtgaggcgggcagcgctacgcgtggggtaggaccatcttacgctgggaccccgccaaggagccccaggaagtaggtgaaagggcaggggcgtggctctcggggcgccacccacgctcttgaaatctgggtgattgcgagcggccgctcagcgtcccccacaccacagacccgcgccgccgacgacccagcagccgccatggctctgctccgaggtgtgtttgtagttgctgctaagcgaacgccctttggagcttacggaggccttctgaaagacttcactgctactgacttgtctgaatttgctgccaaggctgccttgtctgctggcaaagtctcacctgaaacagttgacagtgtgattatgggcaatgtcctgcagagttcttcagatgctatatatttggcaaggcatgttggtttgcgtgtgggaatcccaaaggagaccccagctctcacgattaataggctctgtggttctggttttcagtccattgtgaatggatgtcaggaaatttgtgttaaagaagctgaagttgttttatgtggaggaaccgaaagcatgagccaagctccctactgtgtcagaaatgtgcgttttggaaccaagcttggatcagatatcaagctggaagattctttatgggtatcattaacagatcagcatgtccagctccccatggcaatgactgcagagaatcttgctgtaaaacacaaaataagcagagaagaatgtgacaaatatgccctgcagtcacagcagagatggaaagctgctaatgatgctggctactttaatgatgaaatggcaccaattgaagtgaagacaaagaaaggaaaacagacaatgcaggtagacgagcatgctcggccccaaaccaccctggaacagttacagaaacttcctccagtattcaagaaagatggaactgttactgcagggaatgcatcgggtgtagctggtggtgctggaactggtactcataagctagttgaagaattgtggtacgaaacctacatttcaccacatgggcaagaattgggggctcgctatggatcctggaggtgatcccctctaacaggaggatgggccagtcccggcaacagggggcaatgagacagcgaacggtttatgacacgcattgcaagtgcagagcatgacccaaaaggggtgcagagaggtcatcgtcataaacacaggcggagctggtaggaccaggagaggcaaacagcaggtcgacacacggagaacaaaagagaggtggataacgaacacgcact

SEQ ID NO: 33854 - DNA, 1868 bp, Homo sapiens
cgagcggagctggcggccgcggccgcccgcgcgccaagttcctcagcccttggctcctgcccagtgtttagggtgttggcggagacaaaggggaagagtcatcgcctgtcggggctaggatatgatgggtgagaggtgtcaaaccaaattctctcggtttggaaacggagaaaatctaaaaatgaggatgtgaggaaagagtccgctctcaaggcgcgttgtggtctatccgagccccgtcccctgggctccctcgggctggggtgaggcgggcagcgctacgcgtggggtaggaccatcttacgctgggaccccgccaaggagccccaggaagtaggtgaaagggcaggggcgtggctctcggggcgccacccacgctcttgaaatctgggtgattgcgagcggccgctcagcgtcccccacaccacagacccgcgccgccgacgacccagcagccgccatggctctgctccgaggtgtgtttgtagttgctgctaagcgaacgccctttggagcttacggaggccttctgaaagacttcactgctactgacttgtctgaatttgctgccaaggctgccttgtctgctggcaaagtctcacctgaaacagttgacagtgtgattatgggcaatgtcctgcaggaaatttgtgttaaagaagctgaagttgttttatgtggaggaaccgaaagcatgagccaagctccctactgtgtcagaaatgtgcgttttggaaccaagcttggatcagatatcaagctggaagattctttatgggtatcattaacagatcagcatgtccagctccccatggcaatgactgcagagaatcttgctgtaaaacacaaaataagcagagaagaatgtgacaaatatgccctgcagtcacagcagagatggaaagctgctaatgatgctggctactttaatgatgaaatggcaccaattgaagtgaagacaaagaaaggaaaacagacaatgcaggtagacgagcatgctcggccccaaaccaccctggaacagttacagaaacttcctccagtattcaagaaagatggaactgttactgcagggaatgcatcgggtgtagctgatggtgctggagctgttatcatagctagtgaagatgctgttaagaaacataacttcacaccactggcaagaattgtgggctactttgtatctggatgtgatccctctatcatgggtattggtcctgtccctgctatcagtggggcactgaagaaagcaggactgagtcttaaggacatggatttggtagaggtgaatgaagcttttgctccccagtacttggctgttgagaggagtttggatcttgacataagtaaaaccaatgtgaatggaggagccattgctttgggtcacccactgggaggatctggatcaagaattactgcacacctggttcacgaattaaggcgtcgaggtggaaaatatgccgttggatcagcttgcattggaggtggccaaggtattgctgtcatcattcagagcacagcctgaagagaccagtgagctcactgtgacccatccttactctacttggccaggccacagtaaaacaagtgaccttcagagcagctgccacaactggccatgccctgccattgaaacagtgattaagtttgatcaagccatggtgacacaaaaatgcattgatcatgaataggagcccatgctagaagtacattctctcagatttgaaccagtgaaatatgatgtatttctgagctaaaactcaactatagaagacattaaaagaaatcgtattcttgccaagtaaccaccacttctgccttagataatatgattataaggaaatcaaataaatgttgccttaacttca

SEQ ID NO: 33855 - DNA, 1218 bp, Homo sapiens
ggacctggtacggtcccgcgtttatgggatgaggaaccgaaagcatgagccaagctccctactgtgtcagaaatgtgcgttttggaaccaagcttggatcagatatcaagctggaagattctttatgggtatcattaacagatcagcatgtccagctccccatggcaatgactgcagagaatcttgctgtaaaacacaaaataagcagagaagaatgtgacaaatatgccctgcagtcacagcagagatggaaagctgctaatgatgctggctactttaatgatgaaatggcaccaattgaagtgaagacaaagaaaggaaaacagacaatgcaggtagacgagcatgctcggccccaaaccaccctggaacagttacagaaacttcctccagtattcaagaaagatggaactgttactgcagggaatgcatcgggtgtagctgatggtgctggagctgttatcatagctagtgaagatgctgttaagaaacataacttcacaccactggcaagaattgtgggctactttgtatctggatgtgatccctctatcatgggtattggtcctgtccctgctatcagtggggcactgaagaaagcaggactgagtcttaaggacatggatttggtagaggtgaatgaagcttttgctccccagtacttggctgttgagaggagtttggatcttgacataagtaaaaccaatgtgaatggaggagccattgctttgggtcacccactgggaggatctggatcaagaattactgcacacctggttcacgaattaaggcgtcgaggtggaaaatatgccgttggatcagcttgcattggaggtggccaaggtattgctgtcatcattcagagcacagcctgaagagaccagtgagctcactgtgacccatccttactctacttggccaggccacagtaaaacaagtgaccttcagagcagctgccacaactggccatgccctgccattgaaacagtgattaagtttgatcaagccatggtgacacaaaaatgcattgatcatgaataggagcccatgctagaagtacattctctcagatttgaaccagtgaaatatgatgtatttctgagctaaaactcaactatagaagacattaaaagaaatcgtattcttgccaagtaaccaccacttctgccttagataatatgattataaggaaatcaaataaatgttgccttaacttca

SEQ ID NO: 33856 - DNA, 926 bp, Homo sapiens
cagaaacttcctccagtattcaagaaagatggaactgttactgcagggaatgcatcgggtgtagctgatggtgctggagctgttacagaaacttcctccagtattcaagaaagatggaactgttactgcagggaatgcatcgggtgtagctgatggtgctggagctgttatcatagctagtgaagatgctgttaagaaacataacttcacaccactggcaagaattgtgggctactttgtatctggatgtgatccctctatcatgggtattggtcctgtccctgctatcagtggggcactgaagaaagcaggactgagtcttaaggacatggatttggtagaggtgaatgaagcttttgctccccagtacttggctgttgagaggagtttggatcttgacataagtaaaaccaatgtgaatggaggagccattgctttgggtcacccactgggaggatctggatcaagaattactgcacacctggttcacgaattaaggcgtcgaggtggaaaatatgccgttggatcagcttgcattggaggtggccaaggtattgctgtcatcattcagagcacagcctgaagagaccagtgagctcactgtgacccatccttactctacttggccaggccacagtaaaacaagtgaccttcagagcagctgccacaactggccatgccctgccattgaaacagtgattaagtttgatcaagccatggtgacacaaaaatgcattgatcatgaataggagcccatgctagaagtacattctctcagatttgaaccagtgaaatatgatgtatttctgagctaaaactcaactatagaagacattaaaagaaatcgtattcttgccaagtaaccaccacttctgccttagataatatgattataaggaaatcaaataaatgttgccttaacttca

SEQ ID NO: 33857 - DNA, 994 bp, Homo sapiens
cgagcggagctggcggccgcggccgcccgcgcgccaagttcctcagcccttggctcctgcccagtgtttagggtgttggcggagacaaaggggaagagtcatcgcctgtcggggctaggatatgatgggtgagaggtgtcaaaccaaattctctcggtttggaaacggagaaaatctaaaaatgaggatgtgaggaaagagtccgctctcaaggcgcgttgtggtctatccgagccccgtcccctgggctccctcgggctggggtgaggcgggcagcgctacgcgtggggtaggaccatcttacgctgggaccccgccaaggagccccaggaagtaggtgaaagggcaggggcgtggctctcggggcgccacccacgctcttgaaatctgggtgattgcgagcggccgctcagcgtcccccacaccacagacccgcgccgccgacgacccagcagccgccatggctctgctccgaggtgtgtttgtagttgctgctaagcgaacgccctttggagcttacggaggccttctgaaagacttcactgctactgacttgtctgaatttgctgccaaggctgccttgtctgctggcaaagtctcacctgaaacagttgacagtgtgattatgggcaatgtcctgcagagttcttcagatgctatatatttggcaaggcatgttggtttgcgtgtgggaatcccaaaggagaccccagctctcacgattaataggctctgtggttctggttttcagtccattgtgaatggatgtcaggaaatttgtgttaaagaagctgaagttgttttatgtggaggaaccgaaagcatgagccaagctccctactgtgtcagaaatgtgcgttttggaaccaagcttggatcagatatcaagggatttttaatggtaattaagttggataagctatggtcaagattctcattgtcaatgaactggcgtggttttgtttgcaccacattcagctgagaggtgtggccc

SEQ ID NO: 33858 - DNA, 913 bp, Homo sapiens
cgagcggagctggcggccgcggccgcccgcgcgccaagttcctcagcccttggctcctgcccagtgtttagggtgttggcggagacaaaggggaagagtcatcgcctgtcggggctaggatatgatgggtgagaggtgtcaaaccaaattctctcggtttggaaacggagaaaatctaaaaatgaggatgtgaggaaagagtccgctctcaaggcgcgttgtggtctatccgagccccgtcccctgggctccctcgggctggggtgaggcgggcagcgctacgcgtggggtaggaccatcttacgctgggaccccgccaaggagccccaggaagtaggtgaaagggcaggggcgtggctctcggggcgccacccacgctcttgaaatctgggtgattgcgagcggccgctcagcgtcccccacaccacagacccgcgccgccgacgacccagcagccgccatggctctgctccgaggtgtgtttgtagttgctgctaagcgaacgccctttggagcttacggaggccttctgaaagacttcactgctactgacttgtctgaatttgctgccaaggctgccttgtctgctggcaaagtctcacctgaaacagttgacagtgtgattatgggcaatgtcctgcagagttcttcagatgctatatatttggcaaggcatgttggtttgcgtgtgggaatcccaaaggagaccccagctctcacgattaataggctctgtggttctggttttcagtccattgtgaatggatgtcaggaaatttgtgttaaagaagctgaagttgttttatgtggaggaaccgaaagcatgagccaagctccctactgtgtcattacagacaacatgccagctcccatggaatgacggaaagaaatctgtgtaaacacttaggggggg

SEQ ID NO: 33859 - DNA, 904 bp, Homo sapiens
  misc_feature (286)..(286): n is a, c, g, or t
tctgctcttggacacaggcatgcaactcaggtacaatataagtcagcttgaggagtggcttcggggaagaaaccttcaccagagtggagcagttcagaccatggaacctctgatccaagcagcccagctcctgcaattaaagaagaaaacccaggaggacgcagaggctatctgctccctgtgtacctccctcagcacccagcagattgtcaaaattttaaacctttatactcccctgaatgaatttgaagaacgggtaacagtggcctttatacgaacaatccanggcacaactacaagagcggaatgaccctcagcaactgctattagatgccaagcacatgtttcctgttttgtttccatttaatccatcttctctaaccatggactcaatccacatcccagcgtgtctcaatctggaattcctcaatgaagtctgaagatgcatgtttccagcattagtttgattcccaatgtgagcaagaaggaagtatatacagtaaagtaaattcaaggatctgttaaatctggtaaaagtagatcaaatcagagattgacagcctgtggagggtgctgaactatacagaattagacacaactatgtcattattttttgtacctactgctcagaataaaaacacttgaaatatggaagattttaagtttgatttcagtccaacacatatacataatttatagacaccaagcagtccccatagacatataaaaggtgtcaattctataaaacgaagctgcctagttttgatctttgcatagaactagagaatgtccaaattaaaataccaaatatatataagtcacataaattgccttcaaagggctttaacaaataatggtactaataaccatgataatggcatatactgacatttcccaaagtttg

SEQ ID NO: 33860 - DNA, 470 bp, Homo sapiens
  misc_feature (404)..(404): n is a, c, g, or t
  misc_feature (418)..(418): n is a, c, g, or t
  misc_feature (456)..(456): n is a, c, g, or t
atgaccacctccttcacctccaccatcacttcttccaccatcatcattgtcaccatcatcaccactacccacctccaccaccaccaccacctctcccatcaccaccacgttctctgtggttagtcacttagtgactttagataagtttttccaattttatgggtcttaatttcctcagttttaaaataagaagggggggttgagagatttgagggctgatcaacgaaaaggataggaccataaaaagcagtgacatacaagctttcattgaggcaggcacttgggacagggtttacataaggaggcgggaaggccccttccccaggcatggaggaacaggccatagggcttggccagttgaggggaggggggaccattcccagtggggaggtcaggggggaaanttccccgggggggnaggaggggagggttttagggggccaggaggtttttttnggtttcttgggggt

SEQ ID NO: 33861 - DNA, 400 bp, Homo sapiens
aagagtaactttgatttgttttaaggaatatatcaaatatatgttagcagaatttaaagtactgttttttagttttagcatactgcaagcttggctacttttcctctgatcttttatgtatgttaagaaataactactaagtgctttaaattgctatgctacatttctagttgttttatttaaacactgacttctcctattaatatttttaaggctaaggattcagtatttaaataaaaagtatttcagtagaactaggactgaaagattttctgttaaaattatctttatgtctttaacaacaacaaaacactgcatgtttctaattgtatgtcattatctcttagcttcatttcttttatgaaataaaattattatattttccagtttaaaaaaaaaa

SEQ ID NO: 33862 - DNA, 314 bp, Homo sapiens
cctgttattcagttactgatcctgaaagttttagaaattattaggtaaatatcacagtaaaatatttaaaagtttaggtcagaggaaacatatcgcacaaactatctgctattgtataactatttttatttaacatagtgggaggattctgacaagaatgttggtcaagtcagatgtctttatttttaataatgttttataatatgaaaaacaagtctttctagggacactatttttatttttattaacttttttattttttatttttttgaggcagggtctcactcccatttcccagactggagtgcagtggc

SEQ ID NO: 33863 - DNA, 1348 bp, Homo sapiens
caataatataagattcctacatcagtttgcagtcctgactttacagtttgaaataagtagcaaaagaaaattatgataatcaagtaatttattattttgtaaaatagtataaaggaataaggaaattttaagtattgtttaggggccaaatttgaactcagctaatatgatttaagcgctctattaattgccctgatttttaaagaggtgcatgtaattttgaaatagcacacattttcatttgtaatcactctggataaatttgtatttttcagtgttcattgaacaggcttattgactctggtaaacttattttattgatgttttcatatggaaaataataagtggaatatgatacaattgttattttcagaacatatttctttagggctatttaatataacctttttaacgagcaaaaactttccatttgagagaaaaaattcttcctgctctgtgggaaaatatttgctgagattttgtatagaataagagacatgtatgtaacatatatgtatattcagcacaagtctactgcaattatgtacacattttggcaggaagaggggattttgtttagtctttgtttatgagttctagagtttcctgtatctagtgttaagttgtaaggaaaaactaaacatgccatttaaaggtaaacttggtaactatttatagagcatacaccaatgattatttctcacagttttcatgatcatttgtttattatttacttggattagactcattaaaaggtataatgctggtcacaattagaatgctaatatttggggaaactatgcagaaaatattttaaaatattaaaagagtgctggcttctattgttgatttatttttggatttaaaaacaaattagggctgggcccattagctcacacctgtaatcccagcactttgggaggctgagatgtgagaattgcttgagcccaggagtttgagaccagcctgggcaatatggtgagactccatctccatacaaaattaaaaaaaaaataattagccagatgtggtggtgtgcacttgtagtcctagctacttgggaggctgaggtgggaggatcgctggagcccaggacatcaaggttgcaaggagctatgttcattccactgcactccagcctgggctacagagtgagacctgtctaaaataaataaataaataaacaaactagctcatttacaatgtaaagcacttaatatcaaatgattatttggtgtactagaaaagaaacagcatataataatgtataatagtttcttaacaagtggggctaaaatcattttgtagtaatttttcacattgatattaaacttcatgagtttctttt

SEQ ID NO: 33864 - DNA, 423 bp, Homo sapiens
gaggtgggtagatcacgaggtcaggagttcaagaccagcctggccaagatggtgaaacctcatctgtactaaaaatacaaaaattagccaggcgtagtggcaggcacctgtaatcccagctactcaggaggctgaggcagagaattgcttgaacctgggaggcagaggttgcagtgagctgagatgtacccctgcactctagcctgggcgacagagtgagacagtgtctcaaataaataaataaataaataaaaataagattcccttgaactaacaacgtaagaattatttttaaaagaaactttttaatgtaaggttttttaaaaaaattattcgaataagaaattttactatatgtcttactgttattgttacttagaagtatattaaagaattaaaacattttttaaaagtgaacctgcc

SEQ ID NO: 33865 - DNA, 3216 bp, Homo sapiens
caataatataagattcctacatcagtttgcagtcctgactttacagtttgaaataagtagcaaaagaaaattatgataatcaagtaatttattattttgtaaaatagtataaaggaataaggaaattttaagtattgtttaggggccaaatttgaactcagctaatatgatttaagcgctctattaattgccctgatttttaaagaggtgcatgtaattttgaaatagcacacattttcatttgtaatcactctggataaatttgtatttttcagtgttcattgaacaggcttattgactctggtaaacttattttattgatgttttcatatggaaaataataagtggaatatgatacaattgttattttcagaacatatttctttagggctatttaatataacctttttaacgagcaaaaactttccatttgagagaaaaaattcttcctgctctgtgggaaaatatttgctgagattttgtatagaataagagacatgtatgtaacatatatgtatattcagcacaagtctactgcaattatgtacacattttggcaggaagaggggattttgtttagtctttgtttatgagttctagagtttcctgtatctagtgttaagttgtaaggaaaaactaaacatgccatttaaaggtaaacttggtaactatttatagagcatacaccaatgattatttctcacagttttcatgatcatttgtttattatttacttggattagactcattaaaaggtataatgctggtcacaattagaatgctaatatttggggaaactatgcagaaaatattttaaaatattaaaagagtgctggcttctattgttgatttatttttggatttaaaaacaaattagggctgggcccattagctcacacctgtaatcccagcactttgggaggctgagatgtgagaattgcttgagcccaggagtttgagaccagcctgggcaatatggtgagactccatctccatacaaaattaaaaaaaaaataattagccagatgtggtggtgtgcacttgtagtcctagctacttgggaggctgaggtgggaggatcgctggagcccaggacatcaaggttgcaaggagctatgttcattccactgcactccagcctgggctacagagtgagacctgtctaaaataaataaataaataaacaaactagctcatttacaatgtaaagcacttaatatcaaatgattatttggtgtactagaaaagaaacagcatataataatgtataatagtttcttaacaagtggggctaaaatcattttgtagtaatttttcacattgatattaaacttcatgagtttcttttagtcattattattattattattattatttgagatggaatctcgctctgtcgcccaggctggagtgcagtggcgcaatcttggctcactgaaagctctgcctcctgggttcacgccattcttctgcctcagcctcctgagtagctgggactgcgggtgcccaccaccacgcccggctaattttttgtatttttagtagagatggggtttcaccgtattggccaggatggtctcgatctcctgacctcgtgatctgtctgccttggcctccaaaagtgctgggaccgtgcccagccatcattattattttttaaaaagaaaactccccctacccccagtataccatttgtatctcaaaattttactttattgatttttaagagtaatttctacttttatcttttaaataaaacattttagagtatttttgaagacttaaaaagcttaaaatttagtgtttttggaaatgtataaaattttcttgaagtatgtatagttttccaaattactttactgacctgttaactcactgtacttgttttttacttattttttcctgacctcttaacaaggtgagtccatttaatcatctgtggtataaaatgcttctctagtcacctgttctcattaaacagttgtaagtaagttttaaaagccattattttaattactaaaagttctcaagtgtgtagtattatctgagtattttaattgaaaaattaatcaggcttttaaaaattacttttttattgtattaggtggcttttaaattcagattctttatattgcttgatttttcctgggagtcccagttttatgtgaatttgtagctgatagtaggttttacttgtgtaccccatctgcactttgatgttgtgtagatcgttttgtgagttatttgaaccgtgtaactcagagaatagtatttcctcatacataaagtgacctcacttttaatcagctcctttatagtatgttgaaaatcactgcgtgtaatgagaggtattgagagtttcttgcacacatgagtgtaaaaggttgagaactagattatacaaagtagtaagtcacagtgcatggcaactttctacaggttggattataagacttatgtggaataggagaattatattgggaaaaaattattttctctaacttgaagactccagagacacttttcttagtcatgaccagtaatatttttcatatattttgggaagaaataagctcctcactattacccaccagttagtgatttatttatttatgtattttagagacagggcctccttctgtcacccagtttggggtgcagtggtgtaatcatagcttactgcagcatcaaactcctgggctcaagtgttcctcctgcctcagcctcccaagtagctagaacctcagccccatgccaccacactcagctaattttaaattttactaatttcatttaatttttgtggagatgggggtcttgctgtgttgtttaggctggtcctgaactcctggcctcaagcgatccttctgccttggcctctcagtaaattatatagaagagcacttctgtataatttactcagtttcttcatcacatatttccaactgttgccctaaataggtttaaaaatgtgatcatgttattagaaaatcctttccattgaatttcagggatgctgaatttcagggagctaaattgttgacccttgcctgtagttgttattggttcagaagtaaattttattgatgctacaagtaaaaaattagatctgacttagtaaactcaaaagttttacaaaactgtattttactatgtagatgtatttctttaaaataggtatggatggatatttttatgaataaataatattgcatt

SEQ ID NO: 33866 - DNA, 3996 bp, Homo sapiens
caataatataagattcctacatcagtttgcagtcctgactttacagtttgaaataagtagcaaaagaaaattatgataatcaagtaatttattattttgtaaaatagtataaaggaataaggaaattttaagtattgtttaggggccaaatttgaactcagctaatatgatttaagcgctctattaattgccctgatttttaaagaggtgcatgtaattttgaaatagcacacattttcatttgtaatcactctggataaatttgtatttttcagtgttcattgaacaggcttattgactctggtaaacttattttattgatgttttcatatggaaaataataagtggaatatgatacaattgttattttcagaacatatttctttagggctatttaatataacctttttaacgagcaaaaactttccatttgagagaaaaaattcttcctgctctgtgggaaaatatttgctgagattttgtatagaataagagacatgtatgtaacatatatgtatattcagcacaagtctactgcaattatgtacacattttggcaggaagaggggattttgtttagtctttgtttatgagttctagagtttcctgtatctagtgttaagttgtaaggaaaaactaaacatgccatttaaaggtaaacttggtaactatttatagagcatacaccaatgattatttctcacagttttcatgatcatttgtttattatttacttggattagactcattaaaaggtataatgctggtcacaattagaatgctaatatttggggaaactatgcagaaaatattttaaaatattaaaagagtgctggcttctattgttgatttatttttggatttaaaaacaaattagggctgggcccattagctcacacctgtaatcccagcactttgggaggctgagatgtgagaattgcttgagcccaggagtttgagaccagcctgggcaatatggtgagactccatctccatacaaaattaaaaaaaaaataattagccagatgtggtggtgtgcacttgtagtcctagctacttgggaggctgaggtgggaggatcgctggagcccaggacatcaaggttgcaaggagctatgttcattccactgcactccagcctgggctacagagtgagacctgtctaaaataaataaataaataaacaaactagctcatttacaatgtaaagcacttaatatcaaatgattatttggtgtactagaaaagaaacagcatataataatgtataatagtttcttaacaagtggggctaaaatcattttgtagtaatttttcacattgatattaaacttcatgagtttcttttagtcattattattattattattattatttgagatggaatctcgctctgtcgcccaggctggagtgcagtggcgcaatcttggctcactgaaagctctgcctcctgggttcacgccattcttctgcctcagcctcctgagtagctgggactgcgggtgcccaccaccacgcccggctaattttttgtatttttagtagagatggggtttcaccgtattggccaggatggtctcgatctcctgacctcgtgatctgtctgccttggcctccaaaagtgctgggaccgtgcccagccatcattattattttttaaaaagaaaactccccctacccccagtataccatttgtatctcaaaattttactttattgatttttaagagtaatttctacttttatcttttaaataaaacattttagagtatttttgaagacttaaaaagcttaaaatttagtgtttttggaaatgtataaaattttcttgaagtatgtatagttttccaaattactttactgacctgttaactcactgtacttgttttttacttattttttcctgacctcttaacaaggtgagtccatttaatcatctgtggtataaaatgcttctctagtcacctgttctcattaaacagttgtaagtaagttttaaaagccattattttaattactaaaagttctcaagtgtgtagtattatctgagtattttaattgaaaaattaatcaggcttttaaaaattacttttttattgtattaggtggcttttaaattcagattctttatattgcttgatttttcctgggagtcccagttttatgtgaatttgtagctgatagtaggttttacttgtgtaccccatctgcactttgatgttgtgtagatcgttttgtgagttatttgaaccgtgtaactcagagaatagtatttcctcatacataaagtgacctcacttttaatcagctcctttatagtatgttgaaaatcactgcgtgtaatgagaggtattgagagtttcttgcacacatgagtgtaaaaggttgagaactagattatacaaagtagtaagtcacagtgcatggcaactttctacaggttggattataagacttatgtggaataggagaattatattgggaaaaaattattttctctaacttgaagactccagagacacttttcttagtcatgaccagtaatatttttcatatattttgggaagaaataagctcctcactattacccaccagttagtgatttatttatttatgtattttagagacagggcctccttctgtcacccagtttggggtgcagtggtgtaatcatagcttactgcagcatcaaactcctgggctcaagtgttcctcctgcctcagcctcccaagtagctagaacctcagccccatgccaccacactcagctaattttaaattttactaatttcatttaatttttgtggagatgggggtcttgctgtgttgtttaggctggtcctgaactcctggcctcaagcgatccttctgccttggcctctcagtaaattatatagaagagcacttctgtataatttactcagtttcttcatcacatatttccaactgttgccctaaataggtttaaaaatgtgatcatgttattagaaaatcctttccattgaatttcagggatgctgaatttcagggagctaaattgttgacccttgcctgtagttgttattggttcagaagtaaattttattgatgctacaagtaaaaaattagatctgacttagtaaactcaaaagttttacaaaactgtattttactatgtagatgtatttctttaaaataggtatggatggatatttttatgaataaataatattgcattatagatggaatgaaactttgcatttaatttgccccataagtaggctttttgtagaatgaattactctcttaaattgtccaatctaaatttttattagctacattaacttaaagcatattctctctcttttctcttcacactttcttcctccttcccagggtcttcctctccctctttcatcacctacattgttccccttcccttttatactattcttattgtatgtactagctgttgttatttatacaaatactcatacatccttacatagcatgtttttaaacaaaagatactgtagtggtcttaacagtttacaattttatatttaaaaattattcaggaaatctggaaatccctgactttttacaccgtgctgatcacttgactcctgtcttagtccattctggctgctctctcagaataccagagactggatagcttataaaaaacagaaatttatttcttctaagtctggaggctgggaaatacaatatcaaggtgccagcagatttggtgtctggtgaggggcccactcactggttcatagatggtgcattctagctgtgtcttcacctagtggaagggtcgagctagctctctgagacccttatgacctaatcatcccccaaaggttccacttcctaatactatacctcgggaattaaggtttcaacctgtgagttttgtggggacacaaatattcagaccatagcaactcctgtactctactaaaaagcatattagagaaataagtaattgtttttcaatttttaagaatta

SEQ ID NO: 33867 - DNA, 4138 bp, Homo sapiens
caataatataagattcctacatcagtttgcagtcctgactttacagtttgaaataagtagcaaaagaaaattatgataatcaagtaatttattattttgtaaaatagtataaaggaataaggaaattttaagtattgtttaggggccaaatttgaactcagctaatatgatttaagcgctctattaattgccctgatttttaaagaggtgcatgtaattttgaaatagcacacattttcatttgtaatcactctggataaatttgtatttttcagtgttcattgaacaggcttattgactctggtaaacttattttattgatgttttcatatggaaaataataagtggaatatgatacaattgttattttcagaacatatttctttagggctatttaatataacctttttaacgagcaaaaactttccatttgagagaaaaaattcttcctgctctgtgggaaaatatttgctgagattttgtatagaataagagacatgtatgtaacatatatgtatattcagcacaagtctactgcaattatgtacacattttggcaggaagaggggattttgtttagtctttgtttatgagttctagagtttcctgtatctagtgttaagttgtaaggaaaaactaaacatgccatttaaaggtaaacttggtaactatttatagagcatacaccaatgattatttctcacagttttcatgatcatttgtttattatttacttggattagactcattaaaaggtataatgctggtcacaattagaatgctaatatttggggaaactatgcagaaaatattttaaaatattaaaagagtgctggcttctattgttgatttatttttggatttaaaaacaaattagggctgggcccattagctcacacctgtaatcccagcactttgggaggctgagatgtgagaattgcttgagcccaggagtttgagaccagcctgggcaatatggtgagactccatctccatacaaaattaaaaaaaaaataattagccagatgtggtggtgtgcacttgtagtcctagctacttgggaggctgaggtgggaggatcgctggagcccaggacatcaaggttgcaaggagctatgttcattccactgcactccagcctgggctacagagtgagacctgtctaaaataaataaataaataaacaaactagctcatttacaatgtaaagcacttaatatcaaatgattatttggtgtactagaaaagaaacagcatataataatgtataatagtttcttaacaagtggggctaaaatcattttgtagtaatttttcacattgatattaaacttcatgagtttcttttagtcattattattattattattattatttgagatggaatctcgctctgtcgcccaggctggagtgcagtggcgcaatcttggctcactgaaagctctgcctcctgggttcacgccattcttctgcctcagcctcctgagtagctgggactgcgggtgcccaccaccacgcccggctaattttttgtatttttagtagagatggggtttcaccgtattggccaggatggtctcgatctcctgacctcgtgatctgtctgccttggcctccaaaagtgctgggaccgtgcccagccatcattattattttttaaaaagaaaactccccctacccccagtataccatttgtatctcaaaattttactttattgatttttaagagtaatttctacttttatcttttaaataaaacattttagagtatttttgaagacttaaaaagcttaaaatttagtgtttttggaaatgtataaaattttcttgaagtatgtatagttttccaaattactttactgacctgttaactcactgtacttgttttttacttattttttcctgacctcttaacaaggtgagtccatttaatcatctgtggtataaaatgcttctctagtcacctgttctcattaaacagttgtaagtaagttttaaaagccattattttaattactaaaagttctcaagtgtgtagtattatctgagtattttaattgaaaaattaatcaggcttttaaaaattacttttttattgtattaggtggcttttaaattcagattctttatattgcttgatttttcctgggagtcccagttttatgtgaatttgtagctgatagtaggttttacttgtgtaccccatctgcactttgatgttgtgtagatcgttttgtgagttatttgaaccgtgtaactcagagaatagtatttcctcatacataaagtgacctcacttttaatcagctcctttatagtatgttgaaaatcactgcgtgtaatgagaggtattgagagtttcttgcacacatgagtgtaaaaggttgagaactagattatacaaagtagtaagtcacagtgcatggcaactttctacaggttggattataagacttatgtggaataggagaattatattgggaaaaaattattttctctaacttgaagactccagagacacttttcttagtcatgaccagtaatatttttcatatattttgggaagaaataagctcctcactattacccaccagttagtgatttatttatttatgtattttagagacagggcctccttctgtcacccagtttggggtgcagtggtgtaatcatagcttactgcagcatcaaactcctgggctcaagtgttcctcctgcctcagcctcccaagtagctagaacctcagccccatgccaccacactcagctaattttaaattttactaatttcatttaatttttgtggagatgggggtcttgctgtgttgtttaggctggtcctgaactcctggcctcaagcgatccttctgccttggcctctcagtaaattatatagaagagcacttctgtataatttactcagtttcttcatcacatatttccaactgttgccctaaataggtttaaaaatgtgatcatgttattagaaaatcctttccattgaatttcagggatgctgaatttcagggagctaaattgttgacccttgcctgtagttgttattggttcagaagtaaattttattgatgctacaagtaaaaaattagatctgacttagtaaactcaaaagttttacaaaactgtattttactatgtagatgtatttctttaaaataggtatggatggatatttttatgaataaataatattgcattatagatggaatgaaactttgcatttaatttgccccataagtaggctttttgtagaatgaattactctcttaaattgtccaatctaaatttttattagctacattaacttaaagcatattctctctcttttctcttcacactttcttcctccttcccagggtcttcctctccctctttcatcacctacattgttccccttcccttttatactattcttattgtatgtactagctgttgttatttatacaaatactcatacatccttacatagcatgtttttaaacaaaagatactgtagtggtcttaacagtttacaattttatatttaaaaattattcaggaaatctggaaatccctgactttttacaccgtgctgatcacttgactcctgtcttagtccattctggctgctctctcagaataccagagactggatagcttataaaaaacagaaatttatttcttctaagtctggaggctgggaaatacaatatcaaggtgccagcagatttggtgtctggtgaggggcccactcactggttcatagatggtgaaacctcatctgtactaaaaatacaaaaattagccaggcgtagtggcaggcacctgtaatcccagctactcaggaggctgaggcagagaattgcttgaacctgggaggcagaggttgcagtgagctgagatgtacccctgcactctagcctgggcgacagagtgagacagtgtctcaaataaataaataaataaataaaaataagattcccttgaactaacaacgtaagaattatttttaaaagaaactttttaatgtaaggttttttaaaaaaattattcgaataagaaattttactatatgtcttactgttattgttacttagaagtatattaaagaattaaaacattttttaaaagtgaacctgcc

SEQ ID NO: 33868 - DNA, 671 bp, Homo sapiens
taccagttctaggcaagccattatagtgcactcgtatgtgtcagatggaatgtatgaaaagaatacagaaattaactgtggcaggtgcactgataagcctccagactctgagagttttatttgttgttgttgttttttttttaaagtagcagtagaaaagcagtaaagaacttacttattgaaaagcgaaagcttaaagacctttctggaggaaacttctcagaggccatgttaaggctattggaaagtccaatttaaatgacaaggttactgaccaaaaatcaaataaaatattcaagtcaccattactggcagttctggttttggaactgatcccagaattctaccttgcaggctaggagatctcttaaaatggctgttagtagctagtaatagtgcatggtggaaatagttgaagcctcaggggcagtgatgtggcctcacacatatgtggtgcctgcagttcctgtagctgttttgaagagggagggagaggtattaactctgctctaaagcagtttgggtccagaataaaggggtcagtgcctcataccccctactagggtgaaatcctaaaactgcccagggaaggcaaggaagcccttggcagataccaagatcagtggtattggaaataacttacaatcagcagcctaatgccctcacggaaa

SEQ ID NO: 33869 - DNA, 97 bp, Homo sapiens
ctaagaaaggatgccattcacatggtaatttatttagaaataaaatcatgctatagtttacatgggtggagactgatggaagcaatcaaagatcagc

SEQ ID NO: 33870 - DNA, 315 bp, Homo sapiens
tgtatttttagtagagatggggttttgccatgttggctaggctggtcttaaactcctgacctcaagtgatctgcctgcttcggcctcccaaagtgctgggactacaggcataagccactgcacctagccaagataactctttaaatagctactactttccttctctatccattattcatagtttaatatcaggcatgatattgtaaatgcaaagaactgcatgatagactcatttctttgtttattaaaaaagtatgattaaaattataatttgtggtggtagaatgacaatgtatatttaagcacacatcttag

SEQ ID NO: 33871 - DNA, 436 bp, Homo sapiens
actaatccaaataattatgtgctcatgtggatagaattgtttgctgcttaatcaagagagatgggtggggaagcacctgcttttagtcgttaaaatcttgttgcttttgtactgcatccaagaaactagttaacagacaaaaagtgatttgccttttcctgagaatgaaaaggaagacctctttggtttcaccctgtgaagaagagcagagagaaactccaaggtggattttctctacttgttgaaatggaaccatcagggacctcacaggaaaagtgattcttgggttttggttcttcctgccctttctctctgcctgtcatagaactcagcaattggaagaataccagtttttgttccttattggtgctgccacctgttcttactgctgaactaaatgttcttggctttctttggtgtgaacaggatctccctc

SEQ ID NO: 33872 - DNA, 333 bp, Homo sapiens
ggcacgagggggggccacaggacaaccctgagggtccgactgtcacaggtatgcaaaaactgaattaatcttccttatagtgggaagtcagtaaatgtcaaatttttaaaaccaagaaattgcagtataagcaagttattaatggctaaaagatgaaaaggttacatcttgggagtggaaaatgaagggtggaagggttcgggactacttttttttttaaataaaatgattttatttagttagtttgtaaatgtgaatatagttgggcaaaaaccaaaccaaaacagcataaaaccaaaaaatgacagttatatgattgatcatgcccaagta

SEQ ID NO: 33873 - DNA, 516 bp, Homo sapiens
tagaacaaccattaagggaaaaccaagaaaatcccaaatgatttagccttagtctttgagacatgaagccaaccttattgcttcaactgcctaccccaagcctctcaattatgtaaaaatgttaaactcccatttctttataaacccctattgtttgggttttctgttacatgcagattaactcaatcccaaatgatattcatgaatttgtaataaaagtaaaatcccatagtgctgggattacagacgtgagccaccacgccctgccaataaaaagattatctccagatgctggtatgaccagtaatttattttcttcctttttttttgtctgcactttctaccataatcatatgttagcttcttactaagaagaaaagtcaatgttatttccctgaaaaagtaatgttgtttggttattaaacaaatttaattttctaaacaagagtacgacaggtaaactgcctaccttaaaagcaaacgaacacaaataaataaactaaccatcttccactt

SEQ ID NO: 33874 - DNA, 455 bp, Homo sapiens
aggctgtgtcagaagacaatggccccggtggccagttagagcagagacttcactgactgacttacaggtgccctattctgaggtacaggagccgcggctttctgatgggggaaaatgccgccttaggctggagccaacatgactgtcctttaaactccagtggctggccagtgctgggattacagacgtgagccaccacgccctgccaataaaaagattatctccagatgctggtatgaccagtaatttattttcttcctttttttttgtctgcactttctaccataatcatatgttagcttcttactaagaagaaaagtcaatgttatttccctgaaaaagtaatgttgtttggttattaaacaaatttaattttctaaacaagagtacgacaggtaaactgcctaccttaaaagcaaacgaacacaaataaataaactaaccatcttccactt

SEQ ID NO: 33875 - DNA, 438 bp, Homo sapiens
agcttgtctgctccagaagtagaagagagccttccagttgctaaggctctgtccagggccgggctcctgccaggtggcaggcagaggcttcctcaagccctgcgtccctcttctgggttcagagaccactcccaggcttggttctatcagcacactccatgcatacaggtgcagaatgctctccccggccacccgagaccacacctcagccaggaccttgtgcagagcttgcttgggccaaggtacacgatccaggaaagctgagctcaagaaaaatgaatccaatgctggatgtggtgactcgtgcctataatcccagctaattaggaggctgaggtgggaggattgcctgagcccaagagttcgaggctgtgttgagccatgattgcaccaccgcactccagcttgggtgacaaagggccatgtttcttaaaaaga

SEQ ID NO: 33876 - DNA, 288 bp, Homo sapiens
gaaactactcacacaacttgattgtttcacttattccaataagtatcagtggcaaatgtattccagcccccaaacagacccctaagaagcctgggcttcttcctcagaataaaatgtctgagccagtagagccacagacaacggcacgaatcacgcctgtattgaagcccatgtattagcggagggccctgagcatgctcctcaagcatgggtttcctctccaagcctgggtttcctcacctgtaaaacagggaaaatccttagccttctcatcaccaacagagaagg

SEQ ID NO: 33877 - DNA, 249 bp, Homo sapiens
acagcgtctcattctgttgcccaggatggagtacagtggtgccatcttcgctcactgcagccttcgtctcccgggttcaagcaattctcctgtctcagcctcccaagtagctgggattacagacccatcaagccttcagataagactgcagcctcattacagaccttgaactggaggcagccagctgagtcacacctggattcctgacccttagaaactatgagataataaatgtttacagttttaagc

SEQ ID NO: 33878 - DNA, 384 bp, Homo sapiens
gtttaatccattttgtgttcatttttatatatggtataagataaaggtccaaattcattattttgcacatggatatttagttctcccaacactatttgctgtacagaccgtcccttccctgttgaatggtcttggtaccattgttgaagatcatttaaccatatatgtaagggtttgtttctgggctttctatgctgttctattggtctatttgtctgcctttatgccagtaaccacactgttttgattagtgtagctttataatatgttttaaaatcaggaaatgtgaaccttccaactttgttctttttcacagttgttttagctacttggggtcccttgatattccatatgaattttaggatgaatctctatttctgtaaa

SEQ ID NO: 33879 - DNA, 435 bp, Homo sapiens
accatcagctctcatgagaactcactcattatcgccagcacagcagcatgggggtaactgcccccatgattcaattacctcccactgggtccctcccaggacacgtgggaattatgagaactgcaattcaagatgagatttgggtggggacacagctcaaccccatcaccttggatttgattcctaaggctgttgtaacaaactagccacacttcattgtattgcgtttggcagatatcacggtctttgcaaattgaagctttgtgagaaccttgcaccaagcaagtctattgttcccattgttccaacagaatgtgttcccttagggtctgtgtgtaattcccacaatagttcaaactttatcattattattatgtctgacacggtgatctgtgatcagtgatctttgatattactattgtgcttgttttgggg

SEQ ID NO: 33880 - DNA, 607 bp, Homo sapiens
agtcagaatcgagcagcacatcctgggcgctgtctatcagagaccgtttcctaaacgccctgtgcctgctgctctgattcacgaaggccagactgaagtcaggtgtcctagcagtgggtgtctcacatgagtcagtgccactcgaaaaacaagcgtggattgcattggctttgtcttttgcctccagctttctttatcctgctgttttttgcttgaatccgtagctctgagccattgattaccagcagcagtttacagcaactgcagttttgtaaacagtagcttaatgtcatgaaagccttcccagtgtaaatgctacttacgcccttcctccagtagtctcacgcccagccccaaaaatgtaaattataagttgtaaagataaggtggggctcacaaagtgaggggaggttctcctttccctgggatcgcatctcacatttaagcgtcccataatgggcacttccacgcgttttccaaagtgggccgcgttacacagcgagaaaacagatgatttttaatgcactcgcctacctgttgcttaaccaaaagtggagtctttaaggagacagcttatcagaccttgtgatttcatcagctgatgtaa

SEQ ID NO: 33881 - DNA, 182 bp, Homo sapiens
ggtttgaatagcatacattcctttctattttgtggttgcctttatattattaacatgcgtatttaaacatgtttttctcacaacatctacagttataggtatttgtagcttctccctaagcaagagaacttgagtattctcttattctcctccattctctttcttggacctctcaggttgat

SEQ ID NO: 33882 - DNA, 508 bp, Homo sapiens
ttccggtaaatgtttagcagccatctcactgaaaaataaagccagaattgtgtttatccatttccgtgatgtgagtgctcccaatatggccaacattgtggttctgttactaacgtgatgtcactaaagacagagttggaaagggatgctcagtagcacttctcatatagtatttctgccacaccaattcaacacaggtaaataatgtcaagagcatagacaacagtaaactgtagtaaaataattaggaactgatgagtttgtatgtaacataatttatttcagagtgtgtttatgtaatttaaattttaataatgtctgcatttaacaacatggaattcctgaaaaatgaataactgactcttgcaagccagtccgagctggctgcagtgcactatcatttgtcctcctctgagattttctgaatagtcttgaccacccaacacaaatagccatttaggaatagtcttcagtatgctccacaatccattgtctttcagagaactgc

SEQ ID NO: 33883 - DNA, 313 bp, Homo sapiens
ttttccttccagcctcatttctcacagtctccttcgggacttgcctggagttagcctcactggcctgtttgcccttcacagaacaagtcctgcacttcataccctgtgtgttggctcacaccattccctcatcggggatgtccttcctttcctcttctacactactttcaaggtttcaggcaaatgctccctctttgctcccagagcacgaaggctgtgtttccacctattgaatattcatgtgtacttgcattagcattagctgtttacatgtctgtcgctcccaagagactgtgaactccttgagaagggg

SEQ ID NO: 33884 - DNA, 662 bp, Homo sapiens
catttccattttgcatatggggacacagaggtttagagaagtgaaagaaactgtccaaggacccaggagtggtgaggttagcagaggcacctgcacccaagccttctgacctttactcctgcccagtgctctctctctcctaatctggcaaactcagtctgggccagactgtgtgctccttaactagaaagtttcccaatggtcatagtttgttctttaggtttgtagttcaagacaaaccattgccctgtagctgcccttttccccactggcttatctttggaccgactgggaggtgaaggacactgtccttgtatgtgccattcccaattgggctacttcctggtgaacttgatttctcattttgggggcccaggagggtgatcattgcctaagaacattccagagtttacttaaggcaaactatgaaaaaggtaaattctgtgctttcttcctttcattccacttcagtaactgcctttttactggtattactcaaattctccagctttcttactctttaaataattttaccgagcctccactctgcgtctggatttgtgctctgtgttggacatataacgataaataagacaacttttattagtggtttcaggtatgttaacgagttagtatggtacagcaatgataaatgtgataaa

SEQ ID NO: 33885 - DNA, 730 bp, Homo sapiens
tcccctgccgacttgccccattcccgtaccagacccgtttctttgggagcttgtctttactaagtcacttgcacaggacccttcctctcaggatccacttctgggcaatcctcacaaataacagacaaatgataataggtagcattcactgagtttgaccatgtttcaggcactgtgataagagctttttacatgccctggtccacttagtcctccagaattccatcaggcaaagcaggtgcaattatagcctcttggcatagtttaaacttgggactgcagaccctggtgcctgactgcctggggtcaaatttcagttctcctagttactagctgtgtggccttgggcaagtcacctattttcctcacctgtaaaatggagataataatagaatctacttcactggtttgctctgatgagctaaagtgagcaaggcattgaaatgctctgtaggtatttcctaaatgaacaaatacttcacacagtaggccatggagatttacaaagatgaaggccaggcatggtgtaatctcagcactttggaaagccaatgtgagaggatcgcttgagcccaggagttcaagatcagcctgggcaacatagaaagaccccgtctctacaaaaaataaaaacgaattagctgggcatggtggggtgtgcctatggtcccagctactcaggtcgaggctgcagtgagctatgatcatttcagcctgggcaacagagcaa

SEQ ID NO: 33886 - DNA, 1764 bp, Homo sapiens
  misc_feature (227)..(227): n is a, c, g, or t
  misc_feature (287)..(287): n is a, c, g, or t
ggtgctagtgatcttgggttatttagaagaaaaatccataaaactgatgggttaagaatggaggtgaagccagacatagtggctcatgcctgtaatcccagcgttttgggaggcttgaggccaggagtttcagaccagcctgggcaacacagtgagacctcatttctaaaaaaaaaaaaaagaaaaaaataagccagacgtggtggtacacacctgtagtcccagtnacttgaggggctgaggtgggaggatcacttgagcccaggagtttgaagctgcggtgagcngtgattacaccactgcactccaacctgggcgacagagcgagaccttgtctccaaaataaaataaaacaaaataaaagaactcagggaaaatagacacctggtttctatctggtggctattctttcatttctgcctacaaagcatacatatttgtaaatggcgtgtcacatgtcaaaacattttgagtctgtcggtcttactcctctccacattcccacatccctccaaagggagtgggatgaaatgcccttctgcattctctcctttctcccaccaactcaccctttaggccaacccattctcacttcttcaggaggatcaccaggcctcccacactccctgcttccacaacctccagccccctgggccctcctgccccatctgctgtggctcagatggggcttcctatgaatctcatctctgtggacgttcatcacttcccaagatgggggtatgacatgcccttcctttctactcctgtcagtaaaacgtgctggagggcacggggacctcatgccacagccaagacgtctgagtggtaggagactgaagaaacgtataggaaatgtgctcagagttagcacccctgagagaccagtggtcagagagcaagctcaaatgggacagtctgttaaacatggaggatttgtgctgggggaaaatgcttcttactcacatctgttttcttctttgtggagagaatgcactatcgtcactactggtattagtgatccactattgtcattccctctttctctgctccctcattctttccctcactggggaaagaagtgtgactgagctaattggtgaatttgggagcaataaacagggtgtattccctggggctccttcctctttcccgttactaagcaggctagatcaggaggcacaccaactctgcccctcacatccccagggctgtctgagactggacggccaaggtcagctgtgcccctcacgtccttggggctgtctaagactgggtggccaagttcagctctggttttgttgtctggaaacctactttcttgcagagatattagccacatctctaatatccgtgtattagttataaagacaatattttaacttcctatctgctttacccttttgtcttattcttcaacagatggagacgtcaggcaggaaagggaagggacagtttactgaatctctgcccacaacaactatcaacatatatcgaccttctttccctcccaaagccccattaaaatgacagcaaaagatatgtaaaaatgattgactataaaaacaaagagaacagaataggaaacgtaaggagaagagaagtaaacttgatccctgcccaaattgacataaacacaatttttcttctatgtgtaaacatattagaagtgagccagttccaggcacagtgaatgaaaaatagaccagcctacttctttgtactaagtagaatgtttattatgaaaacaaaaacaaaaacaaaaac

SEQ ID NO: 33887 - DNA, 403 bp, Homo sapiens
tacttatggggtcccttctacctggagtgcctttctcctccatccgtgcctttccaaattccattctttttaatgtacgagacagaatgtcacgcctttttcagtaagcctcctctgaactcacttagcgttgtgtctgtccatctcgtggcatatctttctcatcaggttgtcagtattcaatgcattgtttttgtttcccctgatagcctctgagttccttccggataacactgcatcaacaatgctactgagcaccaactgagggcaggatgcagaatgctggatgttgtaggaaatataacagttaagaccagggctgggcacagtggctctcacctgtaatcctagcactttgggaggccgaggcaggcggatcacttgaggtcaggagttcgagacc

SEQ ID NO: 33888 - DNA, 762 bp, Homo sapiens
taaaatggaaagtgttttaatgctgactttgcactgcggtattgatttaaccatgaaaaaaaattaagaagctgggttggctgctctcaacataaagccaagcagcaagagaaacggaaaggtttggggtggaaggggactgcctcaaaaactgtcatgctggaattgcaaactgtggccccaatgagtgacactggttaccactactcgggaggcggatgactcagtaacgtaatgggcagtagcaacggtaaaggctggttcctgggaatatctccattcggacaggctcttccttcggggaccaaagaggcccacttttaagacctcactctcgggcacttgctctgttttgctgaagcgtctgccttccaggccagggaggacggccacatccttctccagctgtggagccttcttgaggtcatcttcttcaggactctgccggcgagactcggcctccttgatgggggccagggattcggacaatttccgctgtgtcgtctggacctctggtcctctcttggatttctcatcagcgagggtttccaggacctcatattctgccaggccgggaatgatcttcatggactctggtatttctttctccattttctgaagtgcttctgtagtggagggctgctccactttctcaccctctttagctttcccagtcatagtaacaattctcccggagacagtgtcataggattttcctagagtgtatattttctgtttgctgtcttctttcagttgcatttc

SEQ ID NO: 33889 - DNA, 3232 bp, Homo sapiens
ctgcgggcggcgggcggcgggcgcaccatgccctccttcgacgaggcgctgcagcgggtgggcgagttcgggcgcttccagaggcgcgtgtttttgctgctgtgcctgacgggcgtcaccttcgccttcctcttcgtcggcgtggtcttcctgggcacgcagcccgaccactactggtgccgcgggccaagtgccgcggcgctggccgagcgctgcggctggagcccggaggaggagtggaaccgcacggcgcccgcctcccgcggcccagagccccccgagcgccgcggccgctgccagcgctacctcctggaggcggccaacgacagcgcctccgccactagcgctctcagctgcgcggacccactcgccgccttccccaaccgttcggctccccttgtgccgtgccgcggcggctggcgctacgcccaggcccactccaccatcgtcagcgagtttgaccttgtctgtgtcaatgcgtggatgctggacctcacccaagccatcctgaacctcggcttcctgactggagcattcaccttaggctatgcagcagacaggtatggcaggatcgtcatttacttgctatcctgccttggtgttggcgtcactggggttgtggtggcctttgcaccaaacttccctgtgtttgtgatcttccgcttcctgcaaggtgtatttggaaaggggacgtggatgacttgctacgtgattgtgacagaaatagtaggttcgaaacaaaggaggattgtgggaatcgtgattcaaatgttctttacccttggaatcataattctccctggaattgcctacttcatccccaactggcaaggaatccagttagccatcacgctgcccagctttctcttcctcctttattactgggtggtccctgagtctccccgttggctgattactcggaagaaaggagataaagcattacagatcctgagacgcattgctaagtgcaatgggaaatacctctcatcaaattactcagagatcactgttacagatgaggaagttagtaatccatcctttttagatctggtgagaactccccaaatgaggaaatgcacacttattcttatgtttgcttggttcacaagcgcagtggtgtatcaaggacttgtcatgcgcctgggaattatagggggcaacctctatatagactttttcatctcgggcgtggtggaactgccaggagctctcttgatcttactaaccattgagcgccttggacgacgcctcccctttgcggcaagcaatatagtggcaggggtggcatgccttgtcactgcgttcttaccagaaggaatagcatggttgaggaccacagtggctacattgggaagactagggataaccatggcctttgaaattgtttatttggtaaattcagaattgtacccaacaacattacgaaatttcggagtttcgctctgttcaggtctgtgtgattttgggggaatcatagccccatttctgctctttcggctagcagccgtgtggctagaactacctctgatcatctttggtatcctggcatccatctgtggtggccttgtgatgcttttgcctgaaaccaagggtattgccttgccagagacagtggatgatgtagaaaaacttggcagtccacattcctgtaaatgtggcaggaataagaaaaccccagtttcccgctctcacctttgaggcccccgacaaagacagaaagaaggagctatccaggagctgatcctccttgcaaagctgtgccttgcagagatgcacgtgtgcatttcagctacatcatgccgcgctgttgtaatactgtataaagacctcaatctatccagagtatttttatataatgttggatgagttaggatttgtaatgctgttgaagtttctgggaacacataatatgtagccagtttaacaaagaagctgtcaggtgcacagcccttcctgggtttttttcttgtgttccctgtggtctctgacccattaggctaaagagagacaagagaagcccccaacctgattctcatgacagctccatcaagaatgtgggatgtgccgaccaaggatttgagaaagttgtacagaaatgtgttcatcaaatctggtcaagggactaagctcctagctgaccattcattctgaagattgcatggaggatgaacatctgggaatcctgttaatgagaaggctgaatcacaggcacctgggccaaagggtgtgagcattcatgttctctgctcaccttggtttccgcacaccttcgcaatgtgaacaggtcaggagtccctcccgtccacctcctctgtaacagctggggttccaggcatggtttaggccctgttccagcaataagaaccaatctgctgtacaatctgaggacttggctctgttatttacaaaatgatgctgtggttctgagattatttgggacatttttggctctcctttagtggacacctagagccacagattcccttctttactaaacaaatcccatggattctgatttctgggtcttaggattttaaaagtgaagggatatttttcttatatttgtgagttcagttccgatggtgcccgtggtcaaaagcgaaaaacatggacaattcctattcattcttagcactttgacatgtcttggggaaaagcttacattttaatttaaaagaaagatcaattatatccatgcttaacaggatcagcaggagctttataaatgactttacagagactaataagggatttgatctttctttttttgttatcgaggcttttgaaatgtggaacttgtgtgttctgctttatatgttatattcaatatcttttcagatgcagtctatattttatgctgagttttaaaaatgaaatactttatgcaaacaggcaaaattggtaccaaagggaaacattaaccatgaggaagagcatttttctaaggagaacaggtgacaatatacacatgtgcgctaatcgtaaaatgagcatcttagtctttaaaacacatcagaattgaatacgaataatctatttgtcgatgaaataaacacaactctttgaggatttgagactacattcaccctttattcacagtcacttgcagttttgcttttctctgcatttctctgctgtaagatgactgttgcattgttgaattgtattttgagtggatatttttgtttggtaacaattaaaattttaaatcgtaaaaaatgtacatttgccc

SEQ ID NO: 33890 - DNA, 1919 bp, Homo sapiens
atagataatggtccgtcgccaatataacggaacttgaccggaaggaacactaacctttgaagctgtggtaagggagagctggggcattgatctgggatgcagaggttgctgtggttgagagctactccagtgagcaacatgatggcttcagagtgagcaggccccatgggagagggcccagctgtgtcttcctggagcggtaacacctttcccctattccataggtatcctggcatccatctgtggtggccttgtgatgcttttgcctgaaaccaagggtattgccttgccagagacagtggatgatgtagaaaaacttggcagtccacattcctgtaaatgtggcaggaataagaaaaccccagtttcccgctctcacctttgaggcccccgacaaagacagaaagaaggagctatccaggagctgatcctccttgcaaagctgtgccttgcagagatgcacgtgtgcatttcagctacatcatgccgcgctgttgtaatactgtataaagacctcaatctatccagagtatttttatataatgttggatgagttaggatttgtaatgctgttgaagtttctgggaacacataatatgtagccagtttaacaaagaagctgtcaggtgcacagcccttcctgggtttttttcttgtgttccctgtggtctctgacccattaggctaaagagagacaagagaagcccccaacctgattctcatgacagctccatcaagaatgtgggatgtgccgaccaaggatttgagaaagttgtacagaaatgtgttcatcaaatctggtcaagggactaagctcctagctgaccattcattctgaagattgcatggaggatgaacatctgggaatcctgttaatgagaaggctgaatcacaggcacctgggccaaagggtgtgagcattcatgttctctgctcaccttggtttccgcacaccttcgcaatgtgaacaggtcaggagtccctcccgtccacctcctctgtaacagctggggttccaggcatggtttaggccctgttccagcaataagaaccaatctgctgtacaatctgaggacttggctctgttatttacaaaatgatgctgtggttctgagattatttgggacatttttggctctcctttagtggacacctagagccacagattcccttctttactaaacaaatcccatggattctgatttctgggtcttaggattttaaaagtgaagggatatttttcttatatttgtgagttcagttccgatggtgcccgtggtcaaaagcgaaaaacatggacaattcctattcattcttagcactttgacatgtcttggggaaaagcttacattttaatttaaaagaaagatcaattatatccatgcttaacaggatcagcaggagctttataaatgactttacagagactaataagggatttgatctttctttttttgttatcgaggcttttgaaatgtggaacttgtgtgttctgctttatatgttatattcaatatcttttcagatgcagtctatattttatgctgagttttaaaaatgaaatactttatgcaaacaggcaaaattggtaccaaagggaaacattaaccatgaggaagagcatttttctaaggagaacaggtgacaatatacacatgtgcgctaatcgtaaaatgagcatcttagtctttaaaacacatcagaattgaatacgaataatctatttgtcgatgaaataaacacaactctttgaggatttgagactacattcaccctttattcacagtcacttgcagttttgcttttctctgcatttctctgctgtaagatgactgttgcattgttgaattgtattttgagtggatatttttgtttggtaacaattaaaattttaaatcgtaaaaaatgtacatttgccc

SEQ ID NO: 33891 - DNA, 3145 bp, Homo sapiens
ctgcgggcggcgggcggcgggcgcaccatgccctccttcgacgaggcgctgcagcgggtgggcgagttcgggcgcttccagaggcgcgtgtttttgctgctgtgcctgacgggcgtcaccttcgccttcctcttcgtcggcgtggtcttcctgggcacgcagcccgaccactactggtgccgcgggccaagtgccgcggcgctggccgagcgctgcggctggagcccggaggaggagtggaaccgcacggcgcccgcctcccgcggcccagagccccccgagcgccgcggccgctgccagcgctacctcctggaggcggccaacgacagcgcctccgccactagcgctctcagctgcgcggacccactcgccgccttccccaaccgttcggctccccttgtgccgtgccgcggcggctggcgctacgcccaggcccactccaccatcgtcagcgagtttgaccttgtctgtgtcaatgcgtggatgctggacctcacccaagccatcctgaacctcggcttcctgactggagcattcaccttaggctatgcagcagacaggtatggcaggatcgtcatttacttgctatcctgccttggtgttggcgtcactggggttgtggtggcctttgcaccaaacttccctgtgtttgtgatcttccgcttcctgcaaggtgtatttggaaaggggacgtggatgacttgctacgtgattgtgacagaaatagtaggttcgaaacaaaggaggattgtgggaatcgtgattcaaatgttctttacccttggaatcataattctccctggaattgcctacttcatccccaactggcaaggaatccagttagccatcacgctgcccagctttctcttcctcctttattactgggtggtccctgagtctccccgttggctgattactcggaagaaaggagataaagcattacagatcctgagacgcattgctaagtgcaatgggaaatacctctcatcaaattactcagagatcactgttacagatgaggaagttagtaatccatcctttttagatctggtgagaactccccaaatgaggaaatgcacacttattcttatgtttgcttggttcacaagcgcagtggtgtatcaaggacttgtcatgcgcctgggaattatagggggcaacctctatatagactttttcatctcgggcgtggtggaactgccaggagctctcttgatcttactaaccattgagcgccttggacgacgcctcccctttgcggcaagcaatatagtggcaggggtggcatgccttgtcactgcgttcttaccagaaggaatagcatggttgaggaccacagtggctacattgggaagactagggataaccatggcctttgaaattgtttatttggtaaattcagaattgtacccaacaacattacgaaatttcggagtttcgctctgttcaggtctgtgtgattttgggggaatcatagccccatttctgctctttcggctagcagccgtgtggctagaactacctctgatcatctttggtatcctggcatccatctgtggtggccttgtgatgcttttgcctgaaaccaagggtattgccttgccagagacagtggatgatgtagaaaaacttggcagtccacattcctgtaaatgtggcaggaataagaaaaccccagtttcccgctctcacctttgaggcccccgacaaagacagaaagaaggagctatccaggagctgatcctccttgcaaagctgtgccttgcagagatgcacgtgtgcatttcagctacatcatgccgcgctgttgtaatactgtataaagacctcaatctatccagagtatttttatataatgttggatgagttaggatttgtaatgctgttgaagtttctgggaacacataatatgtagccagtttaacaaagaagctgtcaggtgcacagcccttcctgggtttttttcttgtgttccctgtggtctctgacccattaggctaaagagagacaagagaagcccccaacctgattctcatgacagtcctagctgaccattcattctgaagattgcatggaggatgaacatctgggaatcctgttaatgagaaggctgaatcacaggcacctgggccaaagggtgtgagcattcatgttctctgctcaccttggtttccgcacaccttcgcaatgtgaacaggtcaggagtccctcccgtccacctcctctgtaacagctggggttccaggcatggtttaggccctgttccagcaataagaaccaatctgctgtacaatctgaggacttggctctgttatttacaaaatgatgctgtggttctgagattatttgggacatttttggctctcctttagtggacacctagagccacagattcccttctttactaaacaaatcccatggattctgatttctgggtcttaggattttaaaagtgaagggatatttttcttatatttgtgagttcagttccgatggtgcccgtggtcaaaagcgaaaaacatggacaattcctattcattcttagcactttgacatgtcttggggaaaagcttacattttaatttaaaagaaagatcaattatatccatgcttaacaggatcagcaggagctttataaatgactttacagagactaataagggatttgatctttctttttttgttatcgaggcttttgaaatgtggaacttgtgtgttctgctttatatgttatattcaatatcttttcagatgcagtctatattttatgctgagttttaaaaatgaaatactttatgcaaacaggcaaaattggtaccaaagggaaacattaaccatgaggaagagcatttttctaaggagaacaggtgacaatatacacatgtgcgctaatcgtaaaatgagcatcttagtctttaaaacacatcagaattgaatacgaataatctatttgtcgatgaaataaacacaactctttgaggatttgagactacattcaccctttattcacagtcacttgcagttttgcttttctctgcatttctctgctgtaagatgactgttgcattgttgaattgtattttgagtggatatttttgtttggtaacaattaaaattttaaatcgtaaaaaatgtacatttgccc

SEQ ID NO: 33892 - DNA, 670 bp, Homo sapiens
ttcccagtggcccaggcagggatgttgtgtcagtagcctgaagggcccacagtgggagcatttaaaccatgcacattggcagatgctgccaatcagggcttgattgcccaaagagggttgttaggcatttaccagcacaccactaggctacaaagaagtggagaaaataggggagggtggcttttcaagaagtttggctctaaagagcagaaaaagaaaggatggtaatggaaggatgaggtgagattgagagaaggctggtcaaacaggaaaggtctgaatgtgtttgaaagcttctcccaataggttgaagatactggaggaagggttgatccctacagtgaggagcccaaagagacaggcctaggagaaggctggtcccggagtagacaccaggacaagctttccactgtaaggtaacaggaggaatcggagggagaggggcaggtaagtgagagtgtcagtgagcgggcgcagaggggactcccctccagcacttctgtttccctgtgatgcaggagaggaggccttgggtgttggaccctaagaaggaactcagtcaatcactgtgagatgtgtgagtgaacacatggctgccaggtatacaggggccgtggtgctactcagggtttgaggaagggagagaacctttgaagctgtggtaagggag

SEQ ID NO: 33893 - DNA, 283 bp, Homo sapiens
cagcgcctccgccactagcgctctcagctgcgcggacccactcgccgccttccccaaccgttcggctccccttgtgccgtgccgcggcggctggcgctacgcccaggcccactccaccatcgtcagcgaggtaagggcgccccggccctttggaagccggcgggagaggacgatgctggctcccaggcggacaagccgcgtgtgagacgctggccgccaggggaggtcggtggagacggggaccggtcggctacctctggggacagacaggattcagcgcacc

SEQ ID NO: 33894 - DNA, 2178 bp, Homo sapiens
ggttttaagtgatattaagagtattggcttatatttaagaagtcaaaagataccactttatgaggaatgccagcttttggtgagaaaaggatttgattttcagagaaaacagtatggcaaactaaagaagtttactactgtaaatcctgagttttataatgaaccaaaaaccaaactttatcttaagctaagtcggaaggaaagatcttcagcttatagcaaaaatgatctttgggtggtttcaaaaaccctagactttgagctggatacttttatcgcatgtagtgctttctttggaccatcatctatcaatgagatagaaatactgcctttgaaaggctatttcccttctaattggcccactaacatggttgtccatgcgttattggtttgtaatgctagcacagaactgactactttgaaaaacattcaggactactttaatccagctactctacctctaacacagtacctgttaacaacgtcttcgccaactatagttagtaacaaaagagtcagtaagagaaaatttatcccaccagccttcacaaatgtcagtacaaaatttgaactactcagcctaggagcaacattgaagttagctagtgagttgattcaggtacacaagttaaacaaggatcaagctacagctctaattcaaatagctcaaatgatggcatcacatgaaagcattgaagaagtgaaggaactgcaaactcataccttccctatcacaatcatacatggtgtgtttggagcaggaaagagttacttgctggcagtggtgattttgttctttgtacagctgtttgaaaagagtgaagctcccaccattggaaatgcaaggccgtggaaacttctgatttcttcttctactaatgtggctgttgacagagtacttcttgggcttctcagtcttggatttgaaaactttatcagagttgggagtgttaggaagattgccaaaccaattttaccttatagcttgcatgctggctcagaaaatgaaagtgaacagttaaaagaactacatgcactaatgaaagaagacctgactcctacggaaagagtctatgtgagaaaaagcattgagcagcataaactggggaccaatagaaccctgctgaagcaggtttgagtgtgaaaagctgattcttgttggggatcccaaacagctacctcctactattcagggttctgatgcagctcatgaaaatggattggaacaaactctttttgatcgactttgcttaatgggtcacaagccaattctattgagaactcaataccgttgtcatcctgcaatcagtgctattgctaatgatctgttttacaaaggagccctcatgaatggtgtaacagaaatagagcggagccctttattggaatggctaccaaccctgtgtttttataatgttaaaggactagaacagatagaaagagataacagctttcataatgtggcagaagctacgtttacactcaagctgattcaatcactgattgcaagtggaatagcaggctctatgattggtgtgataacattatacaaatcccagatgtacaagctttgtcatttactcagtgctgtggactttcaccatcctgatattaaaactgtgcaggtgtccacagtagatgcttttcagggagctgaaaaggagatcattattctgtcctgtgtaaggacaagacaagtaggattcattgattcagaaaaaagaatgaatgttgcattgactagaggaaagaggcatttgttgattgtgggaaatttagcctgtttgaggaaaaatcaactttggggacgagtgatccaacactgcgaaggaagggaagatggattgcaacatgcaaaccagtatgaaccacagctgaaccatctccttaaagattattttgaaaaacaagtggaagaaaaacagaagaaaaagagtgaaaaagagaaatctaaagataaatctcattcataaaaagacatggtgtaaatattttgtatttatgtaaattcagactcattttacatgatatattttttatatttttattactctaaaccctcttattaaaaatatgatatttaaataacatagtaaacacatgtaaaaattttgttcttcaaaaaagtgtacaaaaggtagtataaaatcctactaataaaaataagcttttttctaa

SEQ ID NO: 33895 - DNA, 2456 bp, Homo sapiens
  misc_feature (1877)..(1877): n is a, c, g, or t
  misc_feature (1882)..(1882): n is a, c, g, or t
  misc_feature (1884)..(1884): n is a, c, g, or t
  misc_feature (1887)..(1887): n is a, c, g, or t
  misc_feature (1890)..(1890): n is a, c, g, or t
cgatattggagtatgtatccatttacagtatatatccacttactgtttatttccataaaaaactgttctctgtaatgcttacaaagtgatggctaagttatgaattattctactcatctttttcaaatgcccctttttttaaaattgtttatttgcttcatttttattaggtcttcgccaactatagttagtaacaaaagagtcagtaagagaaaatttatcccaccagccttcacaaatgtcagtacaaaatttgaactactcagcctaggagcaacattgaagttagctagtgagttgattcaggtacacaagttaaacaaggatcaagctacagctctaattcaaatagctcaaatgatggcatcacatgaaagcattgaagaagtgaaggaactgcaaactcataccttccctatcacaatcatacatggtgtgtttggagcaggaaagagttacttgctggcagtggtgattttgttctttgtacagctgtttgaaaagagtgaagctcccaccattggaaatgcaaggccgtggaaacttctgatttcttcttctactaatgtggctgttgacagagtacttcttgggcttctcagtcttggatttgaaaactttatcagagttgggagtgttaggaagattgccaaaccaattttaccttatagcttgcatgctggctcagaaaatgaaagtgaacagttaaaagaactacatgcactaatgaaagaagacctgactcctacggaaagagtctatgtgagaaaaagcattgagcagcataaactggggaccaatagaaccctgctgaagcaggtttgagtgtgaaaagctgattcttgttggggatcccaaacagctacctcctactattcagggttctgatgcagctcatgaaaatggattggaacaaactctttttgatcgactttgcttaatgggtcacaagccaattctattgagaactcaataccgttgtcatcctgcaatcagtgctattgctaatgatctgttttacaaaggagccctcatgaatggtgtaacagaaatagagcggagccctttattggaatggctaccaaccctgtgtttttataatgttaaaggactagaacagatagaaagagataacagctttcataatgtggcagaagctacgtttacactcaagctgattcaatcactgattgcaagtggaatagcaggctctatgattggtgtgataacattatacaaatcccagatgtacaagctttgtcatttactcagtgctgtggactttcaccatcctgatattaaaactgtgcaggtgtccacagtagatgcttttcagggagctgaaaaggagatcattattctgtcctgtgtaaggacaagacaagtaggattcattgattcagaaaaaagaatgaatgttgcattgactagaggaaagaggcatttgttgattgtgggaaatttagcctgtttgaggaaaaatcaactttggggacgagtgatccaacactgcgaaggaagggaagatggattgcaacatgcaaaccagtatgaaccacagctgaaccatctccttaaagattattttgaaaaacaagtggaagaaaaacagaagaaaaagagtgaaaaagagaaatctaaagataaatctcattcataaaaagacatggtgtaaatattttgtatttatgtaaattcagactcattttacatgatatattttttatatttttattactctaaaccctcttattaaaaatatgatatttaaataacatagtaaacacatgtaaaaattttgttcttcaaaaaagtgtacaaaaggtagtataaaatcctactaataaaaataagcttttttctaaaaaaaaaaaaanaaaananaanaanaaaaaaaaaaaaaaaaaaaaaaaaaaaaaaaaaaaaaaaaaaaaaaagagaaggaggagaacaaaaaaacgagcgggagaaaaaaaaaaggagaaaagaaccagaaaaagacaaaaaaagaagcacaaaaagagagaggaacgatagctaagagaaagaaagagaggaagacaaaaaaaaaaggaagaaaagagcagaaacacaaaaaaagagaaaaacgggcgcaaaagagaaaagaaagagagagggagcgagagaagaaaaagagaagaaaaaaaacaagagaggacggaaagaagagagaaagagagaaagcaaaacaacacagaacagagaggtagagagaaaagaaagagagtgagaataaatcgatcgatggggcagggtcggcgacagaaagcaaggtgagtataaatacatagcgacattcatgggtctgagtagagcaggtagatcaaacggaccgagagaggagaactagaccgtaatgagagaaggaaggagaaaagatacaagaggagagagagaggcaagcaggaggggggagaggagaagaggggaggcgg

SEQ ID NO: 33896 - DNA, 923 bp, Homo sapiens
ggttttaagtgatattaagagtattggcttatatttaagaagtcaaaagataccactttatgaggaatgccagcttttggtgagaaaaggatttgattttcagagaaaacagtatggcaaactaaagaagtttactactgtaaatcctgagttttataatgaaccaaaaaccaaactttatcttaagctaagtcggaaggaaagatcttcagcttatagcaaaaatgatctttgggtggtttcaaaaaccctagactttgagctggatacttttatcgcatgtagtgctttctttggaccatcatctatcaatgagatagaaatactgcctttgaaaggctatttcccttctaattggcccactaacatggttgtccatgcgttattggtttgtaatgctagcacagaactgactactttgaaaaacattcaggactactttaatccagctactctacctctaacacagtacctgttaacaacgtaagtcattttttacctttgagtcattggtattaaaaaatggtaatcagaagtaaatatgaaaattcaataaaagtacagtatataaatgttgccaataaaattgtaattatttttcagactatgacattattctctgtcagtggttaaaaagagaaaaggggctgggtgcagtggctcatgcctgtaatcccagcactttgggaggccgaggtgggcagatcaccagaggtcgggagttcgagaccagcctgaccaacatggagaaaccctgtctctactaaaaatacaaaattagctgggcatactggcgcatgcctgtaatcacagctattcgggaggctgaggcaggagaattgcttgaacctgggaggcggaggttgcggtgaccgggtgccattgcaccccagcctgggcaacaagtgaaactctatctcaaa

SEQ ID NO: 33897 - DNA, 1865 bp, Homo sapiens
cgatattggagtatgtatccatttacagtatatatccacttactgtttatttccataaaaaactgttctctgtaatgcttacaaagtgatggctaagttatgaattattctactcatctttttcaaatgcccctttttttaaaattgtttatttgcttcatttttattaggtcttcgccaactatagttagtaacaaaagagtcagtaagagaaaatttatcccaccagccttcacaaatgtcagtacaaaatttgaactactcagcctaggagcaacattgaagttagctagtgagttgattcaggtacacaagttaaacaaggatcaagctacagctctaattcaaatagctcaaatgatggcatcacatgaaagcattgaagaagtgaaggaactgcaaactcataccttccctatcacaatcatacatggtgtgtttggagcaggaaagagttacttgctggcagtggtgattttgttctttgtacagctgtttgaaaagagtgaagctcccaccattggaaatgcaaggccgtggaaacttctgatttcttcttctactaatgtggctgttgacagagtacttcttgggcttctcagtcttggatttgaaaactttatcagagttgggagtgttaggaagattgccaaaccaattttaccttatagcttgcatgctggctcagaaaatgaaagtgaacagttaaaagaactacatgcactaatgaaagaagacctgactcctacggaaagagtctatgtgagaaaaagcattgagcagcataaactggggaccaatagaaccctgctgaagcaggtttgagtgtgaaaagctgattcttgttggggatcccaaacagctacctcctactattcagggttctgatgcagctcatgaaaatggattggaacaaactctttttgatcgactttgcttaatgggtcacaagccaattctattgagaactcaataccgttgtcatcctgcaatcagtgctattgctaatgatctgttttacaaaggagccctcatgaatggtgtaacagaaatagagcggagccctttattggaatggctaccaaccctgtgtttttataatgttaaaggactagaacagatagaaagagataacagctttcataatgtggcagaagctacgtttacactcaagctgattcaatcactgattgcaagtggaatagcaggctctatgattggtgtgataacattatacaaatcccagatgtacaagctttgtcatttactcagtgctgtggactttcaccatcctgatattaaaactgtgcaggtgtccacagtagatgcttttcagggagctgaaaaggagatcattattctgtcctgtgtaaggacaagacaagtaggattcattgattcagaaaaaagaatgaatgttgcattgactagaggaaagaggcatttgttgattgtgggaaatttagcctgtttgaggaaaaatcaactttggggacgagtgatccaacactgcgaaggaagggaagatggattgcaacatgcaaaccagtatgaaccacagctgaaccatctccttaaagattattttgaaaaacaagtggaagaaaaacagaagaaaaagagtgaaaaagagaaatctaaagataaatctcattcataaaaagacatggtgtaaatattttgtatttatgtaaattcagactcattttacatgatatattttttatatttttattactctaaaccctcttattaaaaatatgatatttaaataacatagtaaacacatgtaaaaattttgttcttcaaaaaagtgtacaaaaggtagtataaaatcctactaataaaaataagcttttttctaa

SEQ ID NO: 33898 - DNA, 356 bp, Homo sapiens
ttttttttattatctaatgctacatttagcattttaaaagcaagtacaagtgcctgattcttttcttgcatttacctagttttcaagacaatgaatttttccctgtcatcttcaaaatgcgactagttgttaatttttaatatcattaagaacttatgaatttaaacctatctgttgggtttcagttcattaaaatttttatccctttcgaagctcaaattgtcccatatttggtcaaaggggccttttaaaataaactcctgagtctttgaagtgagtctacaaatctttgatagcttccttattatctggtatgtcaagatgttccgactctgttcttttaatggaaaatgaca

SEQ ID NO: 33899 - DNA, 424 bp, Homo sapiens
tgtggtgaatcacctgagaatgcaggatgtgactcagggagtttggggtgggtctgagattctgcatttctcacagactcccaggtaatgctgatgctgccagttcggaaactacattttgagtagcaaggtactagagcactgcattgaaagggatctgaggctacatctgcactcagtggcaaagagtgttgtgatcaattagtaatgtctgccacaggcagagaaatgagctgtgaataatgtgccatctttgccctacaagtctatgttgaaaatgatgcattattcaagaaagaggagggaaaaagtaaggtattgatatcataatatgttatacaagcatacaaatgaatgtcttcatatttttgatagcataaattccaggctgtattgtgttttttaaaaggcaagtttggagaat

SEQ ID NO: 33900 - DNA, 516 bp, Homo sapiens
ctgtgcttcactttggatagttagtttcttttgctatgtcttcaagttcacagatactttttttggcagtatctaatctgctgtcaataccacccagtacatttttcatgtaaaatattgtattttccatctctataatttcaaattgggtctttttatgtcactcttgatcaggttcatgctttcctctatcttcatatacatttacagcatatctgtaatagctgtttaatgtttttgttggcttattttattacttctgtcatgtctggatctgtttttactaagtgacttttctccttgttatgagtcatttttttcccatgcttggaatttataattggatttccagagaatgaaaactttacattgttgttgttgttgttttaaaatattattattcctagccaagtgcggtgtcgcatgcctgtaccctagccctttgggaggctgagacaggtggattgcttgagtccaggagtttgagaccgacctgggcaacatggcaaaactcca

SEQ ID NO: 33901 - DNA, 330 bp, Homo sapiens
aggactccttaattcctagaaatttaacttgaatgaaatctttaacaaaacttagtgccataggaaaaaatatatacatgtatatgtacatacatagttttttcttactttcttattcattctgaaaatctctgccttttaaatgcagtgtttagaccacctacatttaatgcaattattaatttgatagttgttaggtctattatcttatgatttgttttacattcatgccatgtattcattgttgctcttttctttttctcatgtcctatcttcttttaattaatttttttatttaaatttgtctttagttttatcttactatttatt

SEQ ID NO: 33902 - DNA, 501 bp, Homo sapiens
ttgcaattcttttgtagtttccagcccatttcattttcagttgataaggaggagattgctcccaaattttcagaaatggactgtgtaggagtgtgactagggtctcagatgcagccatttcttggctgggtctggggaaaagccaagggatgtgtgctaaaggtagatggacagagggtgggaagtcccttattatttccacttttttctccatctctgactctgccatctctttctgcctctgtactttctgggagctggttctgctgatacttctgctgaatctaaatgctgacctaacttggcaattcttttatgttaggagtcttagctgtgacagttcatccgcttcttcgcccttccatttcacttcttttctccttctctgactgggagaggaggagcctccactcagtatttagaacagagtaaataccttctcctgatcactcctccttccaacctccagaattttttgaaattaaaattcacattctggga

SEQ ID NO: 33903 - DNA, 374 bp, Homo sapiens
ttctgttacagtaatttatcaccatttaattggtttaagtataattaaacaattttgagtaacaaaattttaccataagtgttttgcaggttcaggactgtggagcccttctatattggttccatatccctaaagtgtcatttctttagacctgataaagatcagacacagattgaatagttagttaagatcatgctcgtaggctaggtgcggtggctcactcctgtattcccagcactttgggaggccaaagcaggtgggtcacttgagttcaggagtccgagaccagcctgggcaatgtggcgaaatctcatctctaccaacaaatacaaagattagctgggtgcggtagtgctcacctaggcaaaaaaaaa

SEQ ID NO: 33904 - DNA, 996 bp, Homo sapiens
cttttattatggatgtacagataaaaagttactattttagtttgctaacaagaatgatttttaacaagggtgaccttgttaaaaatcattcttgttagcaaactaaaatagtaacttttattatggatgtacagataaatattaattttattatagttttaagtacttgtgatcatgtactttttgattctaaaatagttgtctaggacaattttgggattcttaattatattttagttaagaaaattgtttaaatatagcaatacaaccaataatttgttttatgtttcactgcatataaatatttccattaaatcaagaatgtatattatctagtttttactatacttattttaaaatttttgaggaatcatagattctaatttttaagaacaaattctgaaggtggtaggattaaaagaatatttccactgatggctaagcaaagaagttgtaagatgactcactgaggaagggactgctttatacatcacagtactgctatttaaaaggaaaacagaaatttttaaatcccttcaaatgtttcacttttgctatgctgggaaaaattttgaagttcttggtaaactgaataatgctaatccatgtttcctgcacattagttcctttaatggcagggaaggccatctggttaacctgtattcacaaactctcaagagtttctacttatttcaggagcttaagaatttagataactcagccgggcgtggtgactcatgcctataatcccagcactttgggaggctgaggcgggtagatcgctagaggcaaggagttcaaaaccagcctgggcaacatggtgaaaccctgtctctactaaaaatacagaaaattatccaggcgtggtggccggcatctgtaattccagctactcagaaggctgaggcataagaattgcttgaacctgggaggtggaggttgcagtgagccaagattgcaccactgcactccagcctgggtgacagagtatgactg

SEQ ID NO: 33905 - DNA, 1955 bp, Homo sapiens
cagagtgattcctttctttatgttgttataaataagacagcacagcataaattaagaggcactcaataaacatctacttataagtgttagaaagcatgtgtgtcaaaattgactacttgtatataaattttcaacttcaaactattccctgttagacttcagttttaaattgtgaaatattccatttaagaaaacaaaatttctttttttaacattggtttgaaaaagatgaaatttacttctcctatatgctctttaagtatatagttattattatttttgctttctcttcctagattttccacagaatgagcctcagatcaagaatcagtttaataagaagctatcaggaagacttgaaaatacaaaacagcaattgcagctgcctcttcatccttcatgggaagcaagcagaaggcgaaaagaacagcaatctaatattgctgtgtttcaggggaaaaaaattacgtttgatgattgattagtgcctctttctgcaaacttttccatctaaaaaaaaaaatgttttttttaagacaggatctcattctgttgcccagactagagtacaatattgcaatcacagctcactgcagcctcaaactcctgggctcaagtgatcctcccacctctgcctcccaaagggctgggactgcaggtgcatgcactaccatgcccagctttctcaccccaggctctgcagctattacttaaactcgtatttgaataagtctcttggggagaattatagaatgtttgtttttgtatttttttttaaagtaaattcaacttacgcttatataagcctttcacaaatccaatatgtacttaaattgatttttaataatatccctcagactgtttcccttatgaagtaatttggggattttagtgatctcatattttctctttagtgcttatcatgaaatgtgcttcactggttcagctctgttgtttccttaaacataaatgtcaatatatatttaaaataataatggaaacataggaaatcagctatttaaaccagatcacccttgttaaaaatcattcttgttagcaaactaaaatagtaacttttattatggatgtacagataaatattaattttattatagttttaagtacttgtgatcatgtactttttgattctaaaatagttgtctaggacaattttgggattcttaattatattttagttaagaaaattgtttaaatatagcaatacaaccaataatttgttttatgtttcactgcatataaatatttccattaaatcaagaatgtatattatctagtttttactatacttattttaaaatttttgaggaatcatagattctaatttttaagaacaaattctgaaggtggtaggattaaaagaatatttccactgatggctaagcaaagaagttgtaagatgactcactgaggaagggactgctttatacatcacagtactgctatttaaaaggaaaacagaaatttttaaatcccttcaaatgtttcacttttgctatgctgggaaaaattttgaagttcttggtaaactgaataatgctaatccatgtttcctgcacattagttcctttaatggcagggaaggccatctggttaacctgtattcacaaactctcaagagtttctacttatttcaggagcttaagaatttagataactcagccgggcgtggtgactcatgcctataatcccagcactttgggaggctgaggcgggtagatcgctagaggcaaggagttcaaaaccagcctgggcaacatggtgaaaccctgtctctactaaaaatacagaaaattatccaggcgtggtggccggcatctgtaattccagctactcagaaggctgaggcataagaattgcttgaacctgggaggtggaggttgcagtgagccaagattgcaccactgcactccagcctgggtgacagagtatgactg

SEQ ID NO: 33906 - DNA, 2823 bp, Homo sapiens
cgcggtctgagagaccggttcacgtgcaggcagcggcggatcatattccttcatctaccatggctcagccgggaactctgaacctcaataacgaggttgtgaagatgagaaaagaagtgaagagaattcgagttttagttatccgaaaacttgtcaggagtgttggccgactgaagtcaaaaaagggtactgaagatgcactgttaaaaaaccaaagacgggcgcaaagattgcttgaagaaatccatgccatgaaggaattgaaacctgacatagtaactaaatctgctcttggtgatgatatcaactttgaaaaaatcttcaaaaagccagattctactgcaactgaaagagcaattgccagactagcagtacatcctcttctgaagaaaaagatagatgtgctaaaagctgctgtacaagcctttaaagaagcaagacaaaatgttgctgaagttgagtcatcaaagaatgcttcagaggacaatcattctgagaatactttgtattcaaatgataatggaagtaatttacagcgtgaagcaactgtcatcagtgagcaaaaagtcaaagaaaccaaaatattggcgaagaaaccaatacataattcaaaggaaaaaatagcaaagatggaacatggacctaaagcagtgactattgcaaattctccatcaaagccttcagaaaaggattctgtagtttcccttgagtcccagaagacacctgctgacccaaaactgaaaactctaagtcaaaccaaaaaaaacaaaggatctgatagctcactctctggtaacagtgatggcggagaagaattttgtgaagaggagaaggaatattttgatgatagcacagaagaaaggttttacaagcagtcttccatgtctgaagatagtgatagcggtgacgacttcttcattgggaaagtcagacggacacgaaagaaggaaagtagttgtcattcttcagttaaggaacaaaaaccactagaaaaagtgtttcttaaagaagatacaggtgaaactcatggggatacaagaaatgacaaaatcaagccaagtacagaaaccagaaagttagaatcagtgtttttccactctttatctggatctaaaagctctagaagaaatttcaaagaacaggctccaaaaacaagatccctagattttccacagaatgagcctcagatcaagaatcagtttaataagaagctatcaggaagacttgaaaatacaaaacagcaattgcagctgcctcttcatccttcatgggaagcaagcagaaggcgaaaagaacagcaatctaatattgctgtgtttcaggggaaaaaaattacgtttgatgattgattagtgcctctttctgcaaacttttccatctaaaaaaaaaaatgttttttttaagacaggatctcattctgttgcccagactagagtacaatattgcaatcacagctcactgcagcctcaaactcctgggctcaagtgatcctcccacctctgcctcccaaagggctgggactgcaggtgcatgcactaccatgcccagctttctcaccccaggctctgcagctattacttaaactcgtatttgaataagtctcttggggagaattatagaatgtttgtttttgtatttttttttaaagtaaattcaacttacgcttatataagcctttcacaaatccaatatgtacttaaattgatttttaataatatccctcagactgtttcccttatgaagtaatttggggattttagtgatctcatattttctctttagtgcttatcatgaaatgtgcttcactggttcagctctgttgtttccttaaacataaatgtcaatatatatttaaaataataatggaaacataggaaatcagctatttaaaccagatcacccttgttaaaaatcattcttgttagcaaactaaaatagtaacttttattatggatgtacagataaatattaattttattatagttttaagtacttgtgatcatgtactttttgattctaaaatagttgtctaggacaattttgggattcttaattatattttagttaagaaaattgtttaaatatagcaatacaaccaataatttgttttatgtttcactgcatataaatatttccattaaatcaagaatgtatattatctagtttttactatacttattttaaaatttttgaggaatcatagattctaatttttaagaacaaattctgaaggtggtaggattaaaagaatatttccactgatggctaagcaaagaagttgtaagatgactcactgaggaagggactgctttatacatcacagtactgctatttaaaaggaaaacagaaatttttaaatcccttcaaatgtttcacttttgctatgctgggaaaaattttgaagttcttggtaaactgaataatgctaatccatgtttcctgcacattagttcctttaatggcagggaaggccatctggttaacctgtattcacaaactctcaagagtttctacttatttcaggagcttaagaatttagataactcagccgggcgtggtgactcatgcctataatcccagcactttgggaggctgaggcgggtagatcgctagaggcaaggagttcaaaaccagcctgggcaacatggtgaaaccctgtctctactaaaaatacagaaaattatccaggcgtggtggccggcatctgtaattccagctactcagaaggctgaggcataagaattgcttgaacctgggaggtggaggttgcagtgagccaagattgcaccactgcactccagcctgggtgacagagtatgactg

SEQ ID NO: 33907 - DNA, 3955 bp, Homo sapiens
ggccgcgtccccgccggccctgcagacgtggcggggcgggacccgctgggcactcccgcgcgtactcggccgcctgagcgatactaaaatgtctgatgatgctggtgacaccttagccactggagacaaagcagaagttactgagatgcctaatagtgattctttacctgaggatgcagaagtgcattgtgattcagctgcagtttcacatgagccaacaccagctgaccccagaggggaggggcatgaaaatgcagctgtgcagggtgcaggggctgccgccattgggccccctgtgcagcctcaggatgccaacgccctggagccccctctcaatggagacgtgactgaggatacacttgctgaatgtattgattccgtcagccttgaggcagaacccagatccgaaatacccctgcaagaacagaattatctggctgtggattcccctccaagtggaggaggatgggcaggctggggatcctggggcaaatctctgctgtcgtcagcatctgccacagtaggtcatggattgacggcagtcaaggaaaaagcaggagccactctacggattcatggtgtaaattctggatcttctgaaggagcccaaccaaatactgaaaacggagtccctgaaataacagatgcagccacagatcagggccctgcagaaagcccacccacttccccttcatcagcctctcggggtatgctgtctgccatcaccaatgtggttcaaaacacaggtaaaagtgtcttaactggaggccttgatgcgttggaattcatcggcaagaaaaccatgaatgtccttgcagaaagtgacccgggctttaagcggaccaagacgctcatggagagaactgtttccttgtctcagatgttaagggaagctaaggagaaggagaagcagagactggcacagcagctcacgatggagagaaccgcgcactacgggatgctgtttgatgaatatcaaggcttgtcacacctggaagccctggaaattctgtccaatgaaagcgaaagcaaggttcagtcatttttagcatcacttgatggagagaagctggaactcttaaaaaatgacctaatttccattaaagacatctttgcagccaaagaattagagaatgaagaaaatcaagaagaacaaggcttagaagaaaagggagaagaatttgctcgcatgcttacagagcttctctttgaattacatgtggcggccacacctgacaaactcaataaggccatgaagagggctcatgactgggtggaagaggatcaaaccgtggtgtcagtagatgtggcaaaagtgtccgaagaagaaacaaagaaggaagaaaaggaagagaaatctcaagaccctcaagaagacaaaaaggaggaaaagaaaactaagaccatagaggaagtatacatgtcgtccattgaaagtctggcggaggtaacagcgcgctgtattgagcagcttcataaagtagcagaattaattcttcatggacaagaagaggaaaaaccagctcaggaccaagcaaaagttctaataaaattaactactgcaatgtgcaatgaagtggcctccttatcaaagaagtttacgaattctttaaccactgttgggagcaacaagaaggccgaggtccttaaccccatgatcagtagtgtattgttagagggctgcaacagtacaacgtacatacaggatgccttccagctgctgctgcctgttctgcaggtctcacatatccagaccagttgtttgaaagcacagccgtgacctggccagactccatctagttaaaggagacagctggccgccttgcctcaatatgtaccatttaaggggatgttctctgtgcgcctggccacagacatccatttgaggacactacaagcaattttgcacagacaatattgagaatgcaaatttagagagagttatcatttctctcaatgtgtataattgtttttacaaacaattgtgttttctttatgttaatttaaacttacacagcttatattgaaaatttcctttcatctgaaatttatttacaaatattcgtgttcattttcctggttaagcatgctatatttagaaactcatggggagaccttagacttttgtttaatcctttatgtttcaacctttaaatgttccattcttatagtattactttaaatcaattctaaaactgaactttgttttgttacataaatgtcgcaggcaaaaataacactacttatagattttacctattatggtaaaaaataggaacatattgtcattctttttttttttttttttttgagacagagtctcactctgtcgccaggctggagtgcgttggcacaatctcggctcactgcaacctccgcctcctgggttcaatcgattctcctgcctcagcctcctgagtagctgggactacaggtgtgtgccaccacgcccagccaattttttttgtatttttagtagagacagggtttcaccatgttggccaggatggtctcgatctcctgacctcgtgatctgcccgcctcagcctcccaaagtgctgggattacaggcttgagccactgcgcccggccggtcattcattcttgcaacaagcatttattgagcacctactgtgtgctcacagtaaagaaacgtgatcttatcccagtagaggtagatattctgaaaaagaataattcttaaactgcttaaaacaggggtccccacccccaggccacagaccagtaccagtccgtggcactggttaggaaccaggccacacagcagggggtgagcggtgggtgagtgagcacagcttcatctgtatttacagctgctccccagagcttgcattactgcctgagctctgcctcccgtcaggtcagcagcagcattagagtctcatgggagtgcgaaccctgttgtgaactgcacatgcgagggatctaggttgtgcactccttatgagaatctaatgcctgatgaatctaatgcctcatgatctgaggttgaatagcttcgtgccgaaaccatcccccacccccatcccgctaccccgagtccgtgaaaaaattgtcttccatgaaaccggtccctggtaccagaaaggttggggaccactggcttaaaataccaataaatttttgaaccttaaaaactttgaagaacaaggtaaattggtgttttatttaatgtcctaccctttaatttgttgcattttcctatactctttacactattttatcccaaactatgtatatgaggtgaaaatatatatgaaaagggatactgaagaatatttagtttaaaattaatttcttacgatcacgagcacatggtggcataattacaaagcttggaagtattcaaatagaaaatcaaaggtgtttcaatacagtagaatcccaggactgcattttaaaatcgcctcacagatcacactcgctggtggcaaatatcatcatcgttgctaaaggacagaaaatactgatgtgtgttttaactaactggtatattgatccatgggaggctgcacagaagaccctgcggccaggaggggcattgtcagtggctgcttctcctgagctccacgccttcattgcagctgcatgttcgatacaatacacctgcttcacagccccatggacatccctacaggtactgtcatgtgaagccttgcctagtagttctctccagggcaaatgaagctcacagttttgcaaggtggaaacctcttattcacatttgctttgattccccgatggagtagactgcctttgttccatacaggcaaagtaaggatattttaatatcatcctacttcttattagcatttcatttgtctatgtactgtatttcatttgtatgtctcctgaaacatccaaatagagaacataagaacactttatgtacaatctggaaaaaaattacctgagaaatcaattaaagattttt

SEQ ID NO: 33908 - DNA, 4021 bp, Homo sapiens
acccacgccctgtctgttctttcagtccagccaacactctatgcaggcaccgcctccactcgcagcccccgggatgggtcccactctctaccgcagatccccaggccccctccacccagtcgggtagccctcgcctctgccatccgatactaaaatgtctgatgatgctggtgacaccttagccactggagacaaagcagaagttactgagatgcctaatagtgattctttacctgaggatgcagaagtgcattgtgattcagctgcagtttcacatgagccaacaccagctgaccccagaggggaggggcatgaaaatgcagctgtgcagggtgcaggggctgccgccattgggccccctgtgcagcctcaggatgccaacgccctggagccccctctcaatggagacgtgactgaggatacacttgctgaatgtattgattccgtcagccttgaggcagaacccagatccgaaatacccctgcaagaacagaattatctggctgtggattcccctccaagtggaggaggatgggcaggctggggatcctggggcaaatctctgctgtcgtcagcatctgccacagtaggtcatggattgacggcagtcaaggaaaaagcaggagccactctacggattcatggtgtaaattctggatcttctgaaggagcccaaccaaatactgaaaacggagtccctgaaataacagatgcagccacagatcagggccctgcagaaagcccacccacttccccttcatcagcctctcggggtatgctgtctgccatcaccaatgtggttcaaaacacaggtaaaagtgtcttaactggaggccttgatgcgttggaattcatcggcaagaaaaccatgaatgtccttgcagaaagtgacccgggctttaagcggaccaagacgctcatggagagaactgtttccttgtctcagatgttaagggaagctaaggagaaggagaagcagagactggcacagcagctcacgatggagagaaccgcgcactacgggatgctgtttgatgaatatcaaggcttgtcacacctggaagccctggaaattctgtccaatgaaagcgaaagcaaggttcagtcatttttagcatcacttgatggagagaagctggaactcttaaaaaatgacctaatttccattaaagacatctttgcagccaaagaattagagaatgaagaaaatcaagaagaacaaggcttagaagaaaagggagaagaatttgctcgcatgcttacagagcttctctttgaattacatgtggcggccacacctgacaaactcaataaggccatgaagagggctcatgactgggtggaagaggatcaaaccgtggtgtcagtagatgtggcaaaagtgtccgaagaagaaacaaagaaggaagaaaaggaagagaaatctcaagaccctcaagaagacaaaaaggaggaaaagaaaactaagaccatagaggaagtatacatgtcgtccattgaaagtctggcggaggtaacagcgcgctgtattgagcagcttcataaagtagcagaattaattcttcatggacaagaagaggaaaaaccagctcaggaccaagcaaaagttctaataaaattaactactgcaatgtgcaatgaagtggcctccttatcaaagaagtttacgaattctttaaccactgttgggagcaacaagaaggccgaggtccttaaccccatgatcagtagtgtattgttagagggctgcaacagtacaacgtacatacaggatgccttccagctgctgctgcctgttctgcaggtctcacatatccagaccagttgtttgaaagcacagccgtgacctggccagactccatctagttaaaggagacagctggccgccttgcctcaatatgtaccatttaaggggatgttctctgtgcgcctggccacagacatccatttgaggacactacaagcaattttgcacagacaatattgagaatgcaaatttagagagagttatcatttctctcaatgtgtataattgtttttacaaacaattgtgttttctttatgttaatttaaacttacacagcttatattgaaaatttcctttcatctgaaatttatttacaaatattcgtgttcattttcctggttaagcatgctatatttagaaactcatggggagaccttagacttttgtttaatcctttatgtttcaacctttaaatgttccattcttatagtattactttaaatcaattctaaaactgaactttgttttgttacataaatgtcgcaggcaaaaataacactacttatagattttacctattatggtaaaaaataggaacatattgtcattctttttttttttttttttttgagacagagtctcactctgtcgccaggctggagtgcgttggcacaatctcggctcactgcaacctccgcctcctgggttcaatcgattctcctgcctcagcctcctgagtagctgggactacaggtgtgtgccaccacgcccagccaattttttttgtatttttagtagagacagggtttcaccatgttggccaggatggtctcgatctcctgacctcgtgatctgcccgcctcagcctcccaaagtgctgggattacaggcttgagccactgcgcccggccggtcattcattcttgcaacaagcatttattgagcacctactgtgtgctcacagtaaagaaacgtgatcttatcccagtagaggtagatattctgaaaaagaataattcttaaactgcttaaaacaggggtccccacccccaggccacagaccagtaccagtccgtggcactggttaggaaccaggccacacagcagggggtgagcggtgggtgagtgagcacagcttcatctgtatttacagctgctccccagagcttgcattactgcctgagctctgcctcccgtcaggtcagcagcagcattagagtctcatgggagtgcgaaccctgttgtgaactgcacatgcgagggatctaggttgtgcactccttatgagaatctaatgcctgatgaatctaatgcctcatgatctgaggttgaatagcttcgtgccgaaaccatcccccacccccatcccgctaccccgagtccgtgaaaaaattgtcttccatgaaaccggtccctggtaccagaaaggttggggaccactggcttaaaataccaataaatttttgaaccttaaaaactttgaagaacaaggtaaattggtgttttatttaatgtcctaccctttaatttgttgcattttcctatactctttacactattttatcccaaactatgtatatgaggtgaaaatatatatgaaaagggatactgaagaatatttagtttaaaattaatttcttacgatcacgagcacatggtggcataattacaaagcttggaagtattcaaatagaaaatcaaaggtgtttcaatacagtagaatcccaggactgcattttaaaatcgcctcacagatcacactcgctggtggcaaatatcatcatcgttgctaaaggacagaaaatactgatgtgtgttttaactaactggtatattgatccatgggaggctgcacagaagaccctgcggccaggaggggcattgtcagtggctgcttctcctgagctccacgccttcattgcagctgcatgttcgatacaatacacctgcttcacagccccatggacatccctacaggtactgtcatgtgaagccttgcctagtagttctctccagggcaaatgaagctcacagttttgcaaggtggaaacctcttattcacatttgctttgattccccgatggagtagactgcctttgttccatacaggcaaagtaaggatattttaatatcatcctacttcttattagcatttcatttgtctatgtactgtatttcatttgtatgtctcctgaaacatccaaatagagaacataagaacactttatgtacaatctggaaaaaaattacctgagaaatcaattaaagattttt

SEQ ID NO: 33909 - DNA, 4169 bp, Homo sapiens
ggccgcgtccccgccggccctgcagacgtggcggggcgggacccgctgggcactcccgcgcgtactcggccgcctgagcgatactaaaatgtctgatgatgctggtgacaccttagccactggagacaaagcagaagttactgagatgcctaatagtgattctttacctgaggatgcagaagtgcattgtgattcagctgcagtttcacatgagccaacaccagctgaccccagaggggaggggcatgaaaatgcagctgtgcagggtgcaggggctgccgccattgggccccctgtgcagcctcaggatgccaacgccctggagccccctctcaatggagacgtgactgaggatacacttgctgaatgtattgattccgtcagccttgaggcagaacccagatccgaaatacccctgcaagaacagaattatctggctgtggattcccctccaagtggaggaggatgggcaggctggggatcctggggcaaatctctgctgtcgtcagcatctgccacagtaggtcatggattgacggcagtcaaggaaaaagcaggagccactctacggattcatggtgtaaattctggatcttctgaaggagcccaaccaaatactgaaaacggagtccctgaaataacagatgcagccacagatcagggccctgcagaaagcccacccacttccccttcatcagcctctcggggtatgctgtctgccatcaccaatgtggttcaaaacacaggtaaaagtgtcttaactggaggccttgatgcgttggaattcatcggcaagaaaaccatgaatgtccttgcagaaagtgacccgggctttaagcggaccaagacgctcatggagagaactgtttccttgtctcagatgttaagggaagctaaggagaaggagaagcagagactggcacagcagctcacgatggagagaaccgcgcactacgggatgctgtttgatgaatatcaaggcttgtcacacctggaagccctggaaattctgtccaatgaaagcgaaagcaaggttcagtcatttttagcatcacttgatggagagaagctggaactcttaaaaaatgacctaatttccattaaagacatctttgcagccaaagaattagagaatgaagaaaatcaagaagaacaaggcttagaagaaaagggagaagaatttgctcgcatgcttacagagcttctctttgaattacatgtggcggccacacctgacaaactcaataaggccatgaagagggctcatgactgggtggaagaggatcaaaccgtggtgtcagtagatgtggcaaaagtgtccgaagaagaaacaaagaaggaagaaaaggaagagaaatctcaagaccctcaagaagacaaaaaggaggaaaagaaaactaagaccatagaggaagtatacatgtcgtccattgaaagtctggcggaggtaacagcgcgctgtattgagcagcttcataaagtagcagaattaattcttcatggacaagaagaggaaaaaccagctcaggaccaagcaaaagttctaataaaattaactactgcaatgtgcaatgaagtggcctccttatcaaagaagtttacgaattctttaaccactgttgggagcaacaagaaggccgaggtccttaaccccatgatcagtagtgtattgttagagggctgcaacagtacaacgtacatacaggatgccttccagctgctgctgcctgttctgcaggtctcacatatccagaccagttgtttgaaagcacagccgtgacctggccagactccatctagttaaaggagacagctggccgccttgcctcaatatgtaccatttaaggggatgttctctgtgcgcctggccacagacatccatttgaggacactacaagcaattttgcacagacaatattgagaatgcaaatttagagagagttatcatttctctcaatgtgtataattgtttttacaaacaattgtgttttctttatgttaatttaaacttacacagcttatattgaaaatttcctttcatctgaaatttatttacaaatattcgtgttcattttcctggttaagcatgctatatttagaaactcatggggagaccttagacttttgtttaatcctttatgtttcaacctttaaatgttccattcttatagtattactttaaatcaattctaaaactgaactttgttttgttacataaatgtcgcaggcaaaaataacactacttatagattttacctattatggtaaaaaataggaacatattgtcattctttttttttttttttttttgagacagagtctcactctgtcgccaggctggagtgcgttggcacaatctcggctcactgcaacctccgcctcctgggttcaatcgattctcctgcctcagcctcctgagtagctgggactacaggtgtgtgccaccacgcccagccaattttttttgtatttttagtagagacagggtttcaccatgttggccaggatggtctcgatctcctgacctcgtgatctgcccgcctcagcctcccaaagtgctgggattacaggcttgagccactgcgcccggccggtcattcattcttgcaacaagcatttattgagcacctactgtgtgctcacagtaaagaaacgtgatcttatcccagtagaggtagatattctgaaaaagaataattcttaaactgcttaaaacaggggtccccacccccaggccacagaccagtaccagtccgtggcactggttaggaaccaggccacacagcagggggtgagcggtgggtgagtgagcacagcttcatctgtatttacagctgctccccagagcttgcattactgcctgagctctgcctcccgtcaggtcagcagcagcattagagtctcatgggagtgcgaaccctgttgtgaactgcacatgcgagggatctaggttgtgcactccttatgagaatctaatgcctgatgaatctaatgcctcatgatctgaggttgaatagcttcgtgccgaaaccatcccccacccccatcccgctaccccgagtccgtgaaaaaattgtcttccatgaaaccggtccctggtaccagaaaggttggggaccactggcttaaaataccaataaatttttgaaccttaaaaactttgaagaacaaggtaaattggtgttttatttaatgtcctaccctttaatttgttgcattttcctatactctttacactattttatcccaaactatgtatatgaggtgaaaatatatatgaaaagggatactgaagaatatttagtttaaaattaatttcttacgatcacgagcacatggtggcataattacaaagcttggaagtattcaaatagaaaatcaaaggtgtttcaatacagtagaatcccaggactgcattttaaaatcgcctcacagatcacactcgctggtggcaaatatcatcatcgttgctaaaggacagaaaatactgatgtgtgttttaactaactggtatattgatccatgggaggctgcacagaagaccctgcggccaggaggggcattgtcagtggctgcttctcctgagctccacgccttcattgcagctgcatgttcgatacaatacacctgcttcacagccccatggacatccctacaggtactgtcatgtgaagccttgcctagtagttctctccagggcaaatgaagctcacagttttgcaaggtggaaacctcttattcacatttgctttgattccccgatggagtagactgcctttgttccatacaggcaaagtaaggatattttaatatcatcctacttcttattagcatttcatttgtctatgtactgtatttcatttgtatgtctcctgaaacatccaaatagagaacataagaacactttatgtacaatctggaaaaaaattacctgagaaatcaattaaagattttttaccccctgttaaggaacaacagaccacaccacaacaatctctgtgcggcgcgcctcgcgcccaggaaaaggtttaaaaccatgcgggggggggccgcgcgccaagaggcggtaggaaacagggcaaaacgtgcctagggaacacccggcaaggcaagcgtgggttccccaaaaaacgcgcggggacggcggcgacaccaagggtcgagaaacg

SEQ ID NO: 33910 - DNA, 3468 bp, Homo sapiens
tgatatgtgaggtattgtgttagatactctaggattcaagagtgagcagaagaaatactgtctctgtccctcagtagcttccagggtgaaaggaagacagatcattaagaaatattgtaggaccagccaggtatcctagggaaccttgggaaatttctccagagagatggttgagactaattcggtttattcagcactgtggctctgtggacataaaagggcacctgggtaccattagggttgcaatgctaagcataacaatatcgaagtcataaatatgatgttgtcccaggtctcttaggcctgagaaaggtcatgcctttgttcatcccagtccttctttcagcaaatagctgctgaccacctacagctgtgaacaagacaagcgaggtccctccctgacctcttgttgcctttgggttgtcctgggggtgtccctgctggagctgccaaacagcaagacttcagcggccctgcacccggatgcatctgctgcctcactgccatgctcacgaatggaagacattcatcttttgcccagcggctggcgggcaggctgctacaacctccacttagtctaccccagctgcaggctgtaatgttgggggagctgccacatcctgaaggatgaaaaataaatcacgcttcttctgtcgtgttctatttctaggcttagaagaaaagggagaagaatttgctcgcatgcttacagagcttctctttgaattacatgtggcggccacacctgacaaactcaataaggccatgaagagggctcatgactgggtggaagaggatcaaaccgtggtgtcagtagatgtggcaaaagtgtccgaagaagaaacaaagaaggaagaaaaggaagagaaatctcaagaccctcaagaagacaaaaaggaggaaaagaaaactaagaccatagaggaagtatacatgtcgtccattgaaagtctggcggaggtaacagcgcgctgtattgagcagcttcataaagtagcagaattaattcttcatggacaagaagaggaaaaaccagctcaggaccaagcaaaagttctaataaaattaactactgcaatgtgcaatgaagtggcctccttatcaaagaagtttacgaattctttaaccactgttgggagcaacaagaaggccgaggtccttaaccccatgatcagtagtgtattgttagagggctgcaacagtacaacgtacatacaggatgccttccagctgctgctgcctgttctgcaggtctcacatatccagaccagttgtttgaaagcacagccgtgacctggccagactccatctagttaaaggagacagctggccgccttgcctcaatatgtaccatttaaggggatgttctctgtgcgcctggccacagacatccatttgaggacactacaagcaattttgcacagacaatattgagaatgcaaatttagagagagttatcatttctctcaatgtgtataattgtttttacaaacaattgtgttttctttatgttaatttaaacttacacagcttatattgaaaatttcctttcatctgaaatttatttacaaatattcgtgttcattttcctggttaagcatgctatatttagaaactcatggggagaccttagacttttgtttaatcctttatgtttcaacctttaaatgttccattcttatagtattactttaaatcaattctaaaactgaactttgttttgttacataaatgtcgcaggcaaaaataacactacttatagattttacctattatggtaaaaaataggaacatattgtcattctttttttttttttttttttgagacagagtctcactctgtcgccaggctggagtgcgttggcacaatctcggctcactgcaacctccgcctcctgggttcaatcgattctcctgcctcagcctcctgagtagctgggactacaggtgtgtgccaccacgcccagccaattttttttgtatttttagtagagacagggtttcaccatgttggccaggatggtctcgatctcctgacctcgtgatctgcccgcctcagcctcccaaagtgctgggattacaggcttgagccactgcgcccggccggtcattcattcttgcaacaagcatttattgagcacctactgtgtgctcacagtaaagaaacgtgatcttatcccagtagaggtagatattctgaaaaagaataattcttaaactgcttaaaacaggggtccccacccccaggccacagaccagtaccagtccgtggcactggttaggaaccaggccacacagcagggggtgagcggtgggtgagtgagcacagcttcatctgtatttacagctgctccccagagcttgcattactgcctgagctctgcctcccgtcaggtcagcagcagcattagagtctcatgggagtgcgaaccctgttgtgaactgcacatgcgagggatctaggttgtgcactccttatgagaatctaatgcctgatgaatctaatgcctcatgatctgaggttgaatagcttcgtgccgaaaccatcccccacccccatcccgctaccccgagtccgtgaaaaaattgtcttccatgaaaccggtccctggtaccagaaaggttggggaccactggcttaaaataccaataaatttttgaaccttaaaaactttgaagaacaaggtaaattggtgttttatttaatgtcctaccctttaatttgttgcattttcctatactctttacactattttatcccaaactatgtatatgaggtgaaaatatatatgaaaagggatactgaagaatatttagtttaaaattaatttcttacgatcacgagcacatggtggcataattacaaagcttggaagtattcaaatagaaaatcaaaggtgtttcaatacagtagaatcccaggactgcattttaaaatcgcctcacagatcacactcgctggtggcaaatatcatcatcgttgctaaaggacagaaaatactgatgtgtgttttaactaactggtatattgatccatgggaggctgcacagaagaccctgcggccaggaggggcattgtcagtggctgcttctcctgagctccacgccttcattgcagctgcatgttcgatacaatacacctgcttcacagccccatggacatccctacaggtactgtcatgtgaagccttgcctagtagttctctccagggcaaatgaagctcacagttttgcaaggtggaaacctcttattcacatttgctttgattccccgatggagtagactgcctttgttccatacaggcaaagtaaggatattttaatatcatcctacttcttattagcatttcatttgtctatgtactgtatttcatttgtatgtctcctgaaacatccaaatagagaacataagaacactttatgtacaatctggaaaaaaattacctgagaaatcaattaaagattttt

SEQ ID NO: 33911 - DNA, 2568 bp, Homo sapiens
cttgcttgtgtctattcatttcaggaagtatacatgtcgtccattgaaagtctggcggaggtaacagcgcgctgtattgagcagcttcataaagtagcagaattaattcttcatggacaagaagaggaaaaaccagctcaggaccaagcaaaagttctaataaaattaactactgcaatgtgcaatgaagtggcctccttatcaaagaagtttacgaattctttaaccactgttgggagcaacaagaaggccgaggtccttaaccccatgatcagtagtgtattgttagagggctgcaacagtacaacgtacatacaggatgccttccagctgctgctgcctgttctgcaggtctcacatatccagaccagttgtttgaaagcacagccgtgacctggccagactccatctagttaaaggagacagctggccgccttgcctcaatatgtaccatttaaggggatgttctctgtgcgcctggccacagacatccatttgaggacactacaagcaattttgcacagacaatattgagaatgcaaatttagagagagttatcatttctctcaatgtgtataattgtttttacaaacaattgtgttttctttatgttaatttaaacttacacagcttatattgaaaatttcctttcatctgaaatttatttacaaatattcgtgttcattttcctggttaagcatgctatatttagaaactcatggggagaccttagacttttgtttaatcctttatgtttcaacctttaaatgttccattcttatagtattactttaaatcaattctaaaactgaactttgttttgttacataaatgtcgcaggcaaaaataacactacttatagattttacctattatggtaaaaaataggaacatattgtcattctttttttttttttttttttgagacagagtctcactctgtcgccaggctggagtgcgttggcacaatctcggctcactgcaacctccgcctcctgggttcaatcgattctcctgcctcagcctcctgagtagctgggactacaggtgtgtgccaccacgcccagccaattttttttgtatttttagtagagacagggtttcaccatgttggccaggatggtctcgatctcctgacctcgtgatctgcccgcctcagcctcccaaagtgctgggattacaggcttgagccactgcgcccggccggtcattcattcttgcaacaagcatttattgagcacctactgtgtgctcacagtaaagaaacgtgatcttatcccagtagaggtagatattctgaaaaagaataattcttaaactgcttaaaacaggggtccccacccccaggccacagaccagtaccagtccgtggcactggttaggaaccaggccacacagcagggggtgagcggtgggtgagtgagcacagcttcatctgtatttacagctgctccccagagcttgcattactgcctgagctctgcctcccgtcaggtcagcagcagcattagagtctcatgggagtgcgaaccctgttgtgaactgcacatgcgagggatctaggttgtgcactccttatgagaatctaatgcctgatgaatctaatgcctcatgatctgaggttgaatagcttcgtgccgaaaccatcccccacccccatcccgctaccccgagtccgtgaaaaaattgtcttccatgaaaccggtccctggtaccagaaaggttggggaccactggcttaaaataccaataaatttttgaaccttaaaaactttgaagaacaaggtaaattggtgttttatttaatgtcctaccctttaatttgttgcattttcctatactctttacactattttatcccaaactatgtatatgaggtgaaaatatatatgaaaagggatactgaagaatatttagtttaaaattaatttcttacgatcacgagcacatggtggcataattacaaagcttggaagtattcaaatagaaaatcaaaggtgtttcaatacagtagaatcccaggactgcattttaaaatcgcctcacagatcacactcgctggtggcaaatatcatcatcgttgctaaaggacagaaaatactgatgtgtgttttaactaactggtatattgatccatgggaggctgcacagaagaccctgcggccaggaggggcattgtcagtggctgcttctcctgagctccacgccttcattgcagctgcatgttcgatacaatacacctgcttcacagccccatggacatccctacaggtactgtcatgtgaagccttgcctagtagttctctccagggcaaatgaagctcacagttttgcaaggtggaaacctcttattcacatttgctttgattccccgatggagtagactgcctttgttccatacaggcaaagtaaggatattttaatatcatcctacttcttattagcatttcatttgtctatgtactgtatttcatttgtatgtctcctgaaacatccaaatagagaacataagaacactttatgtacaatctggaaaaaaattacctgagaaatcaattaaagattttt

SEQ ID NO: 33912 - DNA, 2569 bp, Homo sapiens
gtacccctagtttagaagtgtcatagaagtatacatgtcgtccattgaaagtctggcggaggtaacagcgcgctgtattgagcagcttcataaagtagcagaattaattcttcatggacaagaagaggaaaaaccagctcaggaccaagcaaaagttctaataaaattaactactgcaatgtgcaatgaagtggcctccttatcaaagaagtttacgaattctttaaccactgttgggagcaacaagaaggccgaggtccttaaccccatgatcagtagtgtattgttagagggctgcaacagtacaacgtacatacaggatgccttccagctgctgctgcctgttctgcaggtctcacatatccagaccagttgtttgaaagcacagccgtgacctggccagactccatctagttaaaggagacagctggccgccttgcctcaatatgtaccatttaaggggatgttctctgtgcgcctggccacagacatccatttgaggacactacaagcaattttgcacagacaatattgagaatgcaaatttagagagagttatcatttctctcaatgtgtataattgtttttacaaacaattgtgttttctttatgttaatttaaacttacacagcttatattgaaaatttcctttcatctgaaatttatttacaaatattcgtgttcattttcctggttaagcatgctatatttagaaactcatggggagaccttagacttttgtttaatcctttatgtttcaacctttaaatgttccattcttatagtattactttaaatcaattctaaaactgaactttgttttgttacataaatgtcgcaggcaaaaataacactacttatagattttacctattatggtaaaaaataggaacatattgtcattctttttttttttttttttttgagacagagtctcactctgtcgccaggctggagtgcgttggcacaatctcggctcactgcaacctccgcctcctgggttcaatcgattctcctgcctcagcctcctgagtagctgggactacaggtgtgtgccaccacgcccagccaattttttttgtatttttagtagagacagggtttcaccatgttggccaggatggtctcgatctcctgacctcgtgatctgcccgcctcagcctcccaaagtgctgggattacaggcttgagccactgcgcccggccggtcattcattcttgcaacaagcatttattgagcacctactgtgtgctcacagtaaagaaacgtgatcttatcccagtagaggtagatattctgaaaaagaataattcttaaactgcttaaaacaggggtccccacccccaggccacagaccagtaccagtccgtggcactggttaggaaccaggccacacagcagggggtgagcggtgggtgagtgagcacagcttcatctgtatttacagctgctccccagagcttgcattactgcctgagctctgcctcccgtcaggtcagcagcagcattagagtctcatgggagtgcgaaccctgttgtgaactgcacatgcgagggatctaggttgtgcactccttatgagaatctaatgcctgatgaatctaatgcctcatgatctgaggttgaatagcttcgtgccgaaaccatcccccacccccatcccgctaccccgagtccgtgaaaaaattgtcttccatgaaaccggtccctggtaccagaaaggttggggaccactggcttaaaataccaataaatttttgaaccttaaaaactttgaagaacaaggtaaattggtgttttatttaatgtcctaccctttaatttgttgcattttcctatactctttacactattttatcccaaactatgtatatgaggtgaaaatatatatgaaaagggatactgaagaatatttagtttaaaattaatttcttacgatcacgagcacatggtggcataattacaaagcttggaagtattcaaatagaaaatcaaaggtgtttcaatacagtagaatcccaggactgcattttaaaatcgcctcacagatcacactcgctggtggcaaatatcatcatcgttgctaaaggacagaaaatactgatgtgtgttttaactaactggtatattgatccatgggaggctgcacagaagaccctgcggccaggaggggcattgtcagtggctgcttctcctgagctccacgccttcattgcagctgcatgttcgatacaatacacctgcttcacagccccatggacatccctacaggtactgtcatgtgaagccttgcctagtagttctctccagggcaaatgaagctcacagttttgcaaggtggaaacctcttattcacatttgctttgattccccgatggagtagactgcctttgttccatacaggcaaagtaaggatattttaatatcatcctacttcttattagcatttcatttgtctatgtactgtatttcatttgtatgtctcctgaaacatccaaatagagaacataagaacactttatgtacaatctggaaaaaaattacctgagaaatcaattaaagattttt

SEQ ID NO: 33913 - DNA, 2380 bp, Homo sapiens
ggacgcgtgggtcgacccacgcgtccggaattctttaaccactgttgggagcaacaagaaggccgaggtccttaaccccatgatcagtagtgtattgttagagggctgcaacagtacaacgtacatacaggatgccttccagctgctgctgcctgttctgcaggtctcacatatccagaccagttgtttgaaagcacagccgtgacctggccagactccatctagttaaaggagacagctggccgccttgcctcaatatgtaccatttaaggggatgttctctgtgcgcctggccacagacatccatttgaggacactacaagcaattttgcacagacaatattgagaatgcaaatttagagagagttatcatttctctcaatgtgtataattgtttttacaaacaattgtgttttctttatgttaatttaaacttacacagcttatattgaaaatttcctttcatctgaaatttatttacaaatattcgtgttcattttcctggttaagcatgctatatttagaaactcatggggagaccttagacttttgtttaatcctttatgtttcaacctttaaatgttccattcttatagtattactttaaatcaattctaaaactgaactttgttttgttacataaatgtcgcaggcaaaaataacactacttatagattttacctattatggtaaaaaataggaacatattgtcattctttttttttttttttttttgagacagagtctcactctgtcgccaggctggagtgcgttggcacaatctcggctcactgcaacctccgcctcctgggttcaatcgattctcctgcctcagcctcctgagtagctgggactacaggtgtgtgccaccacgcccagccaattttttttgtatttttagtagagacagggtttcaccatgttggccaggatggtctcgatctcctgacctcgtgatctgcccgcctcagcctcccaaagtgctgggattacaggcttgagccactgcgcccggccggtcattcattcttgcaacaagcatttattgagcacctactgtgtgctcacagtaaagaaacgtgatcttatcccagtagaggtagatattctgaaaaagaataattcttaaactgcttaaaacaggggtccccacccccaggccacagaccagtaccagtccgtggcactggttaggaaccaggccacacagcagggggtgagcggtgggtgagtgagcacagcttcatctgtatttacagctgctccccagagcttgcattactgcctgagctctgcctcccgtcaggtcagcagcagcattagagtctcatgggagtgcgaaccctgttgtgaactgcacatgcgagggatctaggttgtgcactccttatgagaatctaatgcctgatgaatctaatgcctcatgatctgaggttgaatagcttcgtgccgaaaccatcccccacccccatcccgctaccccgagtccgtgaaaaaattgtcttccatgaaaccggtccctggtaccagaaaggttggggaccactggcttaaaataccaataaatttttgaaccttaaaaactttgaagaacaaggtaaattggtgttttatttaatgtcctaccctttaatttgttgcattttcctatactctttacactattttatcccaaactatgtatatgaggtgaaaatatatatgaaaagggatactgaagaatatttagtttaaaattaatttcttacgatcacgagcacatggtggcataattacaaagcttggaagtattcaaatagaaaatcaaaggtgtttcaatacagtagaatcccaggactgcattttaaaatcgcctcacagatcacactcgctggtggcaaatatcatcatcgttgctaaaggacagaaaatactgatgtgtgttttaactaactggtatattgatccatgggaggctgcacagaagaccctgcggccaggaggggcattgtcagtggctgcttctcctgagctccacgccttcattgcagctgcatgttcgatacaatacacctgcttcacagccccatggacatccctacaggtactgtcatgtgaagccttgcctagtagttctctccagggcaaatgaagctcacagttttgcaaggtggaaacctcttattcacatttgctttgattccccgatggagtagactgcctttgttccatacaggcaaagtaaggatattttaatatcatcctacttcttattagcatttcatttgtctatgtactgtatttcatttgtatgtctcctgaaacatccaaatagagaacataagaacactttatgtacaatctggaaaaaaattacctgagaaatcaattaaagattttt

SEQ ID NO: 33914 - DNA, 2256 bp, Homo sapiens
ggccgcgtccccgccggccctgcagacgtggcggggcgggacccgctgggcactcccgcgcgtactcggccgcctgagcgatactaaaatgtctgatgatgctggtgacaccttagccactggagacaaagcagaagttactgagatgcctaatagtgattctttacctgaggatgcagaagtgcattgtgattcagctgcagtttcacatgagccaacaccagctgaccccagaggggaggggcatgaaaatgcagctgtgcagggtgcaggggctgccgccattgggccccctgtgcagcctcaggatgccaacgccctggagccccctctcaatggagacgtgactgaggatacacttgctgaatgtattgattccgtcagccttgaggcagaacccagatccgaaatacccctgcaagaacagaattatctggctgtggattcccctccaagtggaggaggatgggcaggctggggatcctggggcaaatctctgctgtcgtcagcatctgccacagtaggtcatggattgacggcagtcaaggaaaaagcaggagccactctacggattcatggtgtaaattctggatcttctgaaggagcccaaccaaatactgaaaacggagtccctgaaataacagatgcagccacagatcagggccctgcagaaagcccacccacttccccttcatcagcctctcggggtatgctgtctgccatcaccaatgtggttcaaaacacaggtaaaagtgtcttaactggaggccttgatgcgttggaattcatcggcaagaaaaccatgaatgtccttgcagaaagtgacccgggctttaagcggaccaagacgctcatggagagaactgtttccttgtctcagatgttaagggaagctaaggagaaggagaagcagagactggcacagcagctcacgatggagagaaccgcgcactacgggatgctgtttgatgaatatcaaggcttgtcacacctggaagccctggaaattctgtccaatgaaagcgaaagcaaggttcagtcatttttagcatcacttgatggagagaagctggaactcttaaaaaatgacctaatttccattaaagacatctttgcagccaaagaattagagaatgaagaaaatcaagaagaacaaggcttagaagaaaagggagaagaatttgctcgcatgcttacagagcttctctttgaattacatgtggcggccacacctgacaaactcaataaggccatgaagagggctcatgactgggtggaagaggatcaaaccgtggtgtcagtagatgtggcaaaagtgtccgaagaagaaacaaagaaggaagaaaaggaagagaaatctcaagaccctcaagaagacaaaaaggaggaaaagaaaactaagaccatagaggaagtatacatgtcgtccattgaaagtctggcggaggtaacagcgcgctgtattgagcagcttcataaagtagcagaattaattcttcatggacaagaagaggaaaaaccagctcaggaccaagcaaaagttctaataaaattaactactgcaatgtgcaatgaagtggcctccttatcaaagaagtttacgaattctttaaccactgttgggagcaacaagaaggccgaggtccttaaccccatgatcagtagtgtattgttagagggctgcaacagtacaacgtacatacaggatgccttccagctgctgctgcctgttctgcaggtctcacatatccagaccagttgtttgaaagcacagccgtgacctggccagactccatctagttaaaggagacagctggccgccttgcctcaatatgtaccatttaaggggatgttctctgtgcgcctggccacagacatccatttgaggacactacaagcaattttgcacagacaatattgagaatgcaaatttagagagagttatcatttctctcaatgtgtataattgtttttacaaacaattgtgttttctttatgttaatttaaacttacacagcttatattgaaaatttcctttcatctgaaatttatttacaaatattcgtgttcattttcctggttaagcatgctatatttagaaactcatggggagaccttagacttttgtttaatcctttatgtttcaacctttaaatgttccattcttatagtattactttaaatcaattctaaaactgaactttgttttgttacataaatgtcgcagcaatacttcggtgttctcttgtgtgttgt

SEQ ID NO: 33915 - DNA, 988 bp, Homo sapiens
cggacgcgtgggcggacgcgttgggtgcctcatgatctgaggttgaatagcttcgtgccgaaaccatcccccacccccatcccgctaccccgagtccgtgaaaaaattgtcttccatgaaaccggtccctggtaccagaaaggttggggaccactggcttaaaataccaataaatttttgaaccttaaaaactttgaagaacaaggtaaattggtgttttatttaatgtcctaccctttaatttgttgcattttcctatactctttacactattttatcccaaactatgtatatgaggtgaaaatatatatgaaaagggatactgaagaatatttagtttaaaattaatttcttacgatcacgagcacatggtggcataattacaaagcttggaagtattcaaatagaaaatcaaaggtgtttcaatacagtagaatcccaggactgcattttaaaatcgcctcacagatcacactcgctggtggcaaatatcatcatcgttgctaaaggacagaaaatactgatgtgtgttttaactaactggtatattgatccatgggaggctgcacagaagaccctgcggccaggaggggcattgtcagtggctgcttctcctgagctccacgccttcattgcagctgcatgttcgatacaatacacctgcttcacagccccatggacatccctacaggtactgtcatgtgaagccttgcctagtagttctctccagggcaaatgaagctcacagttttgcaaggtggaaacctcttattcacatttgctttgattccccgatggagtagactgcctttgttccatacaggcaaagtaaggatattttaatatcatcctacttcttattagcatttcatttgtctatgtactgtatttcatttgtatgtctcctgaaacatccaaatagagaacataagaacactttatgtacaatctggaaaaaaattacctgagaaatcaattaaagattttt

SEQ ID NO: 33916 - DNA, 2011 bp, Homo sapiens
ggccgcgtccccgccggccctgcagacgtggcggggcgggacccgctgggcactcccgcgcgtactcggccgcctgagcgatactaaaatgtctgatgatgctggtgacaccttagccactggagacaaagcagaagttactgagatgcctaatagtgattctttacctgaggatgcagaagtgcattgtgattcagctgcagtttcacatgagccaacaccagctgaccccagaggggaggggcatgaaaatgcagctgtgcagggtgcaggggctgccgccattgggccccctgtgcagcctcaggatgccaacgccctggagccccctctcaatggagacgtgactgaggatacacttgctgaatgtattgattccgtcagccttgaggcagaacccagatccgaaatacccctgcaagaacagaattatctggctgtggattcccctccaagtggaggaggatgggcaggctggggatcctggggcaaatctctgctgtcgtcagcatctgccacagtaggtcatggattgacggcagtcaaggaaaaagcaggagccactctacggattcatggtgtaaattctggatcttctgaaggagcccaaccaaatactgaaaacggagtccctgaaataacagatgcagccacagatcagggccctgcagaaagcccacccacttccccttcatcagcctctcggggtatgctgtctgccatcaccaatgtggttcaaaacacaggtaaaagtgtcttaactggaggccttgatgcgttggaattcatcggcaagaaaaccatgaatgtccttgcagaaagtgacccgggctttaagcggaccaagacgctcatggagagaactgtttccttgtctcagatgttaagggaagctaaggagaaggagaagcagagactggcacagcagctcacgatggagagaaccgcgcactacgggatgctgtttgatgaatatcaaggcttgtcacacctggaagccctggaaattctgtccaatgaaagcgaaagcaaggttcagtcatttttagcatcacttgatggagagaagctggaactcttaaaaaatgacctaatttccattaaagacatctttgcagccaaagaattagagaatgaagaaaatcaagaagaacaaggcttagaagaaaagggagaagaatttgctcgcatgcttacagagcttctctttgaattacatgtggcggccacacctgacaaactcaataaggccatgaagagggctcatgactgggtggaagaggatcaaaccgtggtgtcagtagatgtggcaaaagtgtccgaagaagaaacaaagaaggaagaaaaggaagagaaatctcaagaccctcaagaagacaaaaaggaggaaaagaaaactaagaccatagaggaagtatacatgtcgtccattgaaagtctggcggaggtaacagcgcgctgtattgagcagcttcataaagtagcagaattaattcttcatggacaagaagaggaaaaaccagctcaggaccaagcaaaagttctaataaaattaactactgcaatgtgcaatgaagtggcctccttatcaaagaagtttacgaattctttaaccactgttggggccttcagcaatagagcttcactgtatacaagcagaatgacaagggaggtggaagctcattgatatgataggctggacaaaatgcatttgcaccctcgtgtggtccaagttacctgatatccatggactttgatataaacactaggcttgcagagaggtgcgaggtcttaatcaagatggaatagccttagtgacaccggttcctaaggctctattgcaccctcttgttacccttttcacagtttactaggtgaggaaactgaggcctagaggggtgaattgattcactcaagcctctcagtagatctcctaattcccagttggttatccaccagatacatcagatagacaccaactctttggttctctgtgtttgtttaggcttga

SEQ ID NO: 33917 - DNA, 1145 bp, Homo sapiens
  misc_feature (1116)..(1116): n is a, c, g, or t
ggccgcgtccccgccggccctgcagacgtggcggggcgggacccgctgggcactcccgcgcgtactcggccgcctgagcgatactaaaatgtctgatgatgctggtgacaccttagccactggagacaaagcagaagttactgagatgcctaatagtgattctttacctgaggatgcagaagtgcattgtgattcagctgcagtttcacatgagccaacaccagctgaccccagaggggaggggcatgaaaatgcagctgtgcagggtgcaggggctgccgccattgggccccctgtgcagcctcaggatgccaacgccctggagccccctctcaatggagacgtgactgaggatacacttgctgaatgtattgattccgtcagccttgaggcagaacccagatccgaaatacccctgcaagaacagaattatctggctgtggattcccctccaagtggaggaggatgggcaggctggggatcctggggcaaatctctgctgtcgtcagcatctgccacagtaggtcatggattgacggcagtcaaggaaaaagcaggagccactctacggattcatggtgtaaattctggatcttctgaaggagcccaaccaaatactgaaaacggagtccctgaaataacagatgcagccacagatcagggccctgcagaaagcccacccacttccccttcatcagcctctcggggtatgctgtctgccatcaccaatgtggttcaaaacacaggtaaaagtgtcttaactggaggccttgatgcgttggaattcatcggcaagaaaaccatgaatgtccttgcagaaagtgacccgggctttaagcggaccaagacgctcatggagagaactgtttccttgtctcagatgttaagggaagctaaggagaaggagaagcagagactggcacagcagctcacgatggagagaaccgcgcactacgggatgctgtttgatgaatatcaaggcttgtcacacctggaagccctggaaattctgtccaatgaaagcgaaagcaaggtacttctgcactactcgtttgaaatggcatgcttagtcatgtgttgcttaaacatgaaagaaactggaaaatctgccattanaagatctcatttttagagcctcaaaaaaa

SEQ ID NO: 33918 - DNA, 345 bp, Homo sapiens
tgttaaaaattttaaagtctatgaaataagtaaattacaatagataacgttaatttaaagtctacagtagtgcatagtaatgtcttaggccttcacattcactcaccacccactcactgactcacccagagcaacttctcgtactgcaagctccattcatatacttaccattgtgttacaattgcctatggtattcagtatagtaacacactgtgcaggtgcctacgagcaataggctattccctgtaggctaggtgtataatagcctatacaatctaggtgtgtgtaagtatactctatgatgttagcacaacataactaaatcacctaatgacacattcctca

SEQ ID NO: 33919 - DNA, 474 bp, Homo sapiens
tacccacatctgtcccgtggttcggatccagttctcccgtgcgttatgggtatccacgtgtttggtcttagccatcactccaggaaagtggctcctccctgaggacagggctctgtctctgatgctgctggcctccctccagtgctgccctcctccgtttggggcttggtggatacaagtgctgacacacaaaggcaggcaggcaggcctcgggccagggtgtcctccaggcccctctgatggcagggaccagcgagacctggggaaactgcacagtctgtgcctgtctgtgctctcaggagactgagggaattagtgggtgggagagattttatgttggattaaaaactgcacctccaggccgggcatggtgtctcatgcctgtaatcccagcactttgggaggccaaggtgggaggatcacttgagccctggagtttgaggcttcaggaagctatgattacaccactgctct

SEQ ID NO: 33920 - DNA, 202 bp, Homo sapiens
tatcccttttttgaccaaaaattacatccaataatatgcatatagataacttatctgaaacaatgaaaacaagcaatgttcacaaagctgccatcattaacaagactcaaaccaagacttgtgatggtgccgaggccattggagctatggtcacataccccaatacctacaggtagcaggggacaacccctctttctagaat

SEQ ID NO: 33921 - DNA, 298 bp, Homo sapiens
tagcccctgggtcaaatctggccagccatgagtgagctaagaatggttgttacatttttacatggtcatatgttaaatggtttgaccaggcatggtggctcatgcatgtaatcccaccactttgggaggccaaagagggaggatcacttaaggccagtttgagaccagcctgggcaacttactgcctaggcaataagtaagaccccatttctacaaacaaacaaagcacaaacattttaaatggttatacaaatccctacataatatcctcaactttacctcttggctggcaaagcct

SEQ ID NO: 33922 - DNA, 289 bp, Homo sapiens
tgtcacctgtttttagtgtattcagggcataaacacacactgtatctctgaaatcctgaaacatttaaatcacccccatggaactcacacgtcgcaaatgagctctctgcatatgattaatttgcacatttgcctccaattcagtgtgtttattctaggcaaaggaataatcttctataaagcactgatgcttaggttttaaatagtgtaagatgttattgcatttgtaaaagaacatttgctcaaacttctagcacaaagttccaaatgtccaccgggggaaaaaaaa

SEQ ID NO: 33923 - DNA, 210 bp, Homo sapiens
taataaactacattacagtgtaaacattacttttatgttaacttgaaaaacaaaaaattgtgtgactttctttatttcaatattcactttattgcagtggtctggaagtaaacctgcaatatctgcaagttatgcctgtggtagatacacaaaagataaatacatagcactacaaaaaaatgcatcaaatcacaaaggaagacagcaaga

SEQ ID NO: 33924 - DNA, 659 bp, Homo sapiens
gtatttttagtagagatggagtttcaccgtgttagccaggatggtctcgatctcctgaccttgtgatctgcctgccttggcctcccgaagtgctgggattacaggcgtgagctaccacacccagccaaccccatcctttttttaaaaaaaagaaaaaagaaaaaggcagagtctcaggtgcttacccgaggcctgctgagttggaatctttacagtcatgcattgcttaatgatggggagctgctctgtgaaatgcattgttgggcgatttcatcattgtgcaaacatcataaagtgtgcttacgcagacctagacggtattgcctactacaaggtactgtgtgacgcttcacccgtcggtttgggcagtttatgggccaccctttaagtagcaaggggtctggggcactcttctcaacattggctgcacactgaaaactcccacagagcttaaaaaatatattgatgcctagatgccacccccagagcttccggtttaatggatatgcgggtgtagcctgggggtagtacattttcaaagttcgccaggtatttctacacaacacggaacagctggcctaaggcctgcagaagcagatcaaaccaactcggctctcagatgcttctttgttgcagcataagacatctacatcatcaag

SEQ ID NO: 33925 - DNA, 977 bp, Homo sapiens
ctagataaaatatatgaaaccacagtttttgacattgaacaacaggcaacatgggactgttatctctaagagaagggaaaaaaccaaggtgatccctacagttgccctggcttactgcttaggcacagtttctaggctacagcaagggaaagagaaccaaaactgaaactggcaaccttactgactagagacagagatgacagtctgagaagagtaaggcaaagtgctgaaaaggctggaactctctacagagacagccccttggttttttgtatatatagtaatctgtgcatgaatgagatgaagttcctcaaagcccaagatggaaccttcagaaagcaattgactgaataattcacaaaattcatgatttgtattcccaccagccagtgtgaagagtagtgggactaatttagtctcagaataaaaactattctggagcttccataacaaagtataaagcaagccttggaagaagcaaactgattagcaagttacataattgtgcaccacactaacaccaaataccctttaaaggaatatttaaaggagcacccttcaaacaaaacccactacccagaaaagtcacaaccttgcatttaatcagtaattatcgagtgtgcaaaaataccaacttacatgaccagtaagctgaggagggataatcaatcaataggaaaaaaccccagaatgacggtgataatagaatagaaaagaaccagcctggcacagtggctcatgcctgtaatctcagcactttgggaggcccaggcaggtggactgcctgaggtcaggagtttgagaccagcctggccaacatgttgaaaccccgtctgcatgaaaaatagaaaaaattagccaggcatggtggcgggtgcctgtaatcccagctactcgggaagctgaggcaggagaatcacttgaacccgggaggcagagcttgcagtgagccaagatcgtgccattgcactccagcc

SEQ ID NO: 33926 - DNA, 1115 bp, Homo sapiens
  misc_feature (1004)..(1004): n is a, c, g, or t
ctggtaccggtccgaaggtccgtaaatcagaagggagcgaaggtttttgctgcgccaacgcagtgaccgaaggctccgctcacgcccggctgatcctgcctgaagatggtgccactggtggctgtggtatcagggccccgtgcccagctctttgcctgcctgctcaggctgggcactcagcaggtcggcccccttcagctgcacaccggggccagccatgcggccaggaaccattatgaggtgctggtgctgggtgggggcagtggcggaatcaccatggctgcccgcatgaagaggaaagtgggtgcagagaatgtggccattgttgagcccagtgagagacatttctaccagccaatctggacactggtgggtgctggtgccaaacaattgtcctcatctggtcgtcccacggcaagtgtgattccatctggtgtagaatggatcaaagctagagtgactgagttgaacccagacaagaactgcattcacacagatgacgacgagaagatctcctaccgatatcttattattgctctcggaatccagctggactatgagaagattaaaggcctacctgaaggtttcgctcatcccaaaatagggtcgaattattcagttaagactgtagagaagacatggaaagctctgcaggacttcaaagagggcaatgccatcttcaccttcccaaatactccagtgaagtgtgctggagcccctcagaagatcatgtacttatcagaagcctacttcaggaagacagggaagcgatccaaggccaatatcattttcaacacttctcttggagccattttcggggttaagaagtatgcagatgccctgcaggagatcatccaggagcggaacctcactgttaactacaagaaaaacctcatattgaaatgcttcatgtcacacctccaatgagcccaccagatgtcctcaagaccagtcctgtggctgatgctgctggttggggtggatgtggataaagaaactctgcnacacaggaggtaccccaatgtgtttgggattggggactgcaccaaccttcctacgtcaaagaccgctgctgcagtagctgcccagtcaggaatacttgatagaacaattct

SEQ ID NO: 33927 - DNA, 1190 bp, Homo sapiens
  misc_feature (1079)..(1079): n is a, c, g, or t
ctggtaccggtccgaaggtccgtaaatcagaagggagcgaaggtttttgctgcgccaacgcagtgaccgaaggctccgctcacgcccggctgatcctgcctgaagatggtgccactggtggctgtggtatcagggccccgtgcccagctctttgcctgcctgctcaggctgggcactcagcaggtcggcccccttcagctgcacaccggggccagccatgcggccaggaaccattatgaggtgctggtgctgggtgggggcagtggcggaatcaccatggctgcccgcatgaagaggaaagtgggtgcagagaatgtggccattgttgagcccagtgagagacatttctaccagccaatctggacactggtgggtgctggtgccaaacaattgtcctcatctggtcgtcccacggcaagtgtgattccatctggtgtagaatggatcaaagctagagtgactgagttgaacccagacaagaactgcattcacacagatgacgacgagaagatctcctaccgatatcttattattgctctcggaatccagctggactatgagaagattaaaggcctacctgaaggtttcgctcatcccaaaatagggtcgaattattcagttaagactgtagagaagacatggaaagctctgcaggacttcaaagagggcaatgccatcttcaccttcccaaatactccagtgaagtgtgctggagcccctcagaagatcatgtacttatcagaagcctacttcaggaagacagggaagcgatccaaggccaatatcattttcaacacttctcttggagccattttcggggttaagaagtatgcagatgccctgcaggagatcatccaggagcggaacctcactgttaactacaagaaaaacctcattgaagtccgagccgataaacaagaggctgtatttgagaacctggacaaaccaggagagacccaagtgattttcatattgaaatgcttcatgtcacacctccaatgagcccaccagatgtcctcaagaccagtcctgtggctgatgctgctggttggggtggatgtggataaagaaactctgcnacacaggaggtaccccaatgtgtttgggattggggactgcaccaaccttcctacgtcaaagaccgctgctgcagtagctgcccagtcaggaatacttgatagaacaattct

SEQ ID NO: 33928 - DNA, 379 bp, Homo sapiens
gaggagggtaaagagacatatagggaatcaaggaataaggtttccgtacatctttcaaagtactaaaattttgaccctattaaaccatgataagttattacatgtgctgtaaaacctacagcatccactaagatgtctgcacacagagatatactcaaaaataccacagataaacctcaatggaattctaaaaaaagaaaattaaagtaacacacatgaaagcaaggcgttacaaaacaacaattacaaaaaaagaaaaaaaaacggataagcagaaatcataaagtaaaatggcaggtttgtgacccaacatatcaataattacaaataaaagtggtctaatgtgaacaaagttgctgagtattgaagagtgtctata

SEQ ID NO: 33929 - DNA, 419 bp, Homo sapiens
acacctgtaatcccagctactcaggatgctgaggcaggagaatcacttgaatccgggaggcggagggtgcagtgagccaagattgcgccattgcactccagcctgggtgacaacagcgaaactccatctcaaaaaaaaagaaaggggaagacatgcatgtaaaaatacatctggctatgatatatcagataaatgtaaccaacaacgaaaaggaagagtagtaatacaaacactaagcaaaatagaattcaaggcaaaaatggtaagtggaacaaagatgagtatttaatcatggtaaacaataaaaaaatccatgaagaaattataataaccatgaactttttttttgacacagggttaggctagaggctggagtgcagtggcacaatcacagctcgctgcagccttgacctcccggc

SEQ ID NO: 33930 - DNA, 887 bp, Homo sapiens
tattctttccaaagaagtattactgtcactgggttctaaaaaaaaatccaatatgcttatagaacacttcaaactaaaaaatcagcaactatttcttgaataatttatccttagttctaaaattgagtataatcagcaaagagatgaattgagtgcctcattcatagtcaatgtttattcttcaattaggcattgttatattcagcacagaaaagagtgacaagaaaataacttggctagagcatgactgactgggatgtgtgtttaaaagatttcgtaaaaggctgtatgtttatctagtcttaacttttattaatcactatgtgactgtccatttaaataacaattaatgaggtattattactacttaatagataaaagaaatgaagaggccagcctggagcctcatcataccataactagaacctgctgagacagatttacctcacgagaaactagtcctttacccaacaaactatttgaaaccttccagactatgccactaaggccatagatccctctagcctacaagagattaaaaggcctaaatctatcaacacctcatatccttgtttacgtaagtctccaccagaaatactgttaactctcatgcccctactactctacacatccctctcatctgaatgagctcctcagctctacctcttctgtgatcagcaaactccactttctagccttatggaaaacataactcccccaaatatgctactttaataaatcccacagaggctgatgttattcagttcctccacacgtctcaaaaccatgtccttgcaggccatggtggggcagaggttgggaagatggcctggtgaggctgggcagagagaggttggggcagcgaccaggcgtggtctccgccagtg

SEQ ID NO: 33931 - DNA, 830 bp, Homo sapiens
ttcctctagcacagcagctcgcaagctaaaattaccgccccccccggcccctccagatttcctcgcattttgtagcggccacctaccattactgactaaagaggtgtatgtacaagtgcaccaggaaagggcttctcttgttgagcacaggataaaggcttaggaaaaggcttttggcccatttgcttttatcctgcctggaaaatgaggtgagctactatctcgctttcatcctcatagcagcctggatattagcagtcatcttgcagccatgaggataaaacctataatctaatggtatggaaaaggaaaacaagagaagctgagatccatattgattcccttgagccgcagccccttcctcgtatgtctgcctcagcctttcttttgcctgaaaccaataaactccttacttctttaggccatttcttagtcaggttttctgtggcttgaaacaggacacattcctaattgatatactcatgtaaggagaagtaactcaaatggtaaacaataccatcggactaaacacaacatctaattagaagtaggttctggtgcaaacacgtccaggtgtcctgcagaagtcctgaccatgccagggagagtaaggaaatgtgtgttctgctcctccactttattgccaaattttctactttgtaacctccaaaagccatgttctggctgctaccccaaccacgtcaccaaaactatcctcatcaaggatatcaactgcctcctttgtcacaaaatccaatgaatacattttggctcttaacctctccacagaacttgacacttgttgactggttcctttttttaaaaaaaaa

SEQ ID NO: 33932 - DNA, 578 bp, Homo sapiens
ttcctctagcacagcagctcgcaagctaaaattaccgccccccccggcccctccagatttcctcgcattttgtagcggccacctaccattactgactaaagaggtgtatgtacaagtgcaccaggaaagggcttctcttgttgagcacaggataaaggcttaggaaaaggcttttggcccatttgcttttatcctgcctggaaaatgaggtgagctactatctcgctttcatcctcatagcagcctggatattagcagtcatcttgcagccatgaggataaaacctataatctaatggtatggaaaaggaaaacaagagaagctgagatccatattgattcccttgagccgcagccccttcctcgtatgtctgcctcagcctttcttttgcctgaaaccaataaactccttacttctttaggccatttcttagtcaggttttctgtggcttgaaacaggacacattcctaattgatatactcatgtaaggagaagtaactcaaatggtattgtttaccatttgagttacttctccttacatgagtatatcaattaggaatgtggcttgaaacaggaca

SEQ ID NO: 33933 - DNA, 397 bp, Homo sapiens
ggcggatgagaccagaaaacctgctatttgttaaaaaatcataaaacaacatctaattggccaataagaaatgagatttactgttctatctgcaggtgagtcaagagaatgtagaaactgggtaattaaaacaaagtcaggccaggtgtggtggctcatgcctgtaatcctagcactttgcaaggcggaggcaggcggatcacttgaggtcaggagctccagaccagcctggccaacatggtgaagccctatccctgctaaaaatacaaaaattagctggaaatcgctggaacctgggaggcagaggttgcagtgagctgagatcgtgccactgcactccagcctgggcaacagagcaagatgctgtctaaaaaaaaataaataaataaataaaatg

SEQ ID NO: 33934 - DNA, 348 bp, Homo sapiens
ttggggaataaaaaaaaagatgagattcattcacttctgaacccatctgcaaccatccaagcatggcagctgatttctaaggacagaaccaaggagggcagtaaacactcagtattcacccatctttgaggcgtaaaggggagtaaagacttagactgtaggtccagagcagacctcagcaagtaagaacaagtgatgctggccatttggtgtaagcctccacctttgctgatcccaggctctaaatagaatttgattgtggactccatctctctgaatttgctcctgccttcttctgagtgttgaaggatcctgaactatcatctccgtttctccttaaacaacagc

SEQ ID NO: 33935 - DNA, 594 bp, Homo sapiens
gggaagggaaggaaattcaggtctttagctatgcattcataaactggacttaagaagagccttcctcctcttataatgctaactgctcttaatatttccttcttaatgaacagttgatataagagttttctcctttcatctaagaaatacagaacaatctgcaagttttcttagttgtttgttaaatggacttcgaaatgattgagaaattcgtatttctcagcgaaaataagtattaagttaatggacaagtagcagtccttgttgccaccaagattttgcatctgaattgtatatataaactgtgtcaggaatatcataaaatcatgttgaggctgcagggacaaggaaatttcatctcatgaatctgtttgatgttttcgggatgtcctgagagaaaaattctttgacctgcctagtgagcaaggtctaagtttgtacacccaggtcacattgtaccctgggctttccaaagatttatcctgcatctgagccaaaggcttttgaagcctgtggttgctggaattttagggtgtatctctttgcttcttcagatgagacatttcttaaggtagaataatggttaaaaaaaaa

SEQ ID NO: 33936 - DNA, 246 bp, Homo sapiens
gtaggggcttgaagttggaccccacaggggagaccttgaaggttgttgagccagggaagggatgtactcagagccatggtggaggggcatccaggctataaacagctgccaaaatctggggaaaataggatcaaagttaggggacagttgtagttctggtgagagacggtgaggtcccgagctcctgggatgagaaaacgaaactggaataggtagacacagtattccttcaagttgtgctttatg

SEQ ID NO: 33937 - DNA, 913 bp, Homo sapiens
ttgggcgcgtactgtgtctatgtgttagcaacacgctgtgttgacataactcatggaacctgtgaagaagctggtctcatagtactaaatggtggtctaggagcagccgggcggatagcactgggtatatgcaaagaatggcaagtgtacgagctgtgcccaatcttgaaatcaacccctaccagccagcacctccttcaggttacttcatggcagctatcccacagactcagaacggtgctgcatactatcctcctagccaaattgctcaactaagaccaagtcctcgctggactgctgagggtgccagaccccatccattccaaaataggcccagtgctatccgcccggctgctcctagaccaccatttagtactatgagaccagcttcttcacaggttccatgagttatgtcaacacagcgtgttgctaacacatcgacacagacaatgggtccacgtcctgcagctgctgctgctgccactccacattataactatgctgcgggagttcgcagtcctcagaaacatcttaatgcacagccacaagttacaatgcaacagcctgctgctcatgtacaaggtcaggaacctttgactgcttccatgttggtatctgcccatgctcaagagcaaaagcaaatgttgggtgaacggctgtttcctcttattcaagccatgcaccttactcttgctggtaaaatcactggcatgttgttggagattggtaattcagaacttcttcatatgctggagtctccagagtcactccgttctaaggttaatgaaactgtagctgtactacaagcccaccaagctgaagtggctgcccagaaagcagttaaccgtgccaccggtgttccaactgtttaaaattgatcaggtaccatgaaaagaaacttgtgcttcacaga

SEQ ID NO: 33938 - DNA, 842 bp, Homo sapiens
tatgttgctttagctcagcgcaaagaagagtgccaggctcacctcactaaccagtatatgcaaagaatggcaagtgtacgagctgtgcccaatcttgaaatcaacccctaccagccagcacctccttcaggttacttcatggcagctatcccacagactcagaacggtgctgcatactatcctcctagccaaattgctcaactaagaccaagtcctcgctggactgctgagggtgccagaccccatccattccaaaataggcccagtgctatccgcccggctgctcctagaccaccatttagtactatgagaccagcttcttcacaggttccatgagttatgtcaacacagcgtgttgctaacacatcgacacagacaatgggtccacgtcctgcagctgctgctgctgccactccacattataactatgctgcgggagttcgcagtcctcagaaacatcttaatgcacagccacaagttacaatgcaacagcctgctgctcatgtacaaggtcaggaacctttgactgcttccatgttggtatctgcccatgctcaagagcaaaagcaaatgttgggtgaacggctgtttcctcttattcaagccatgcaccttactcttgctggtaaaatcactggcatgttgttggagattggtaattcagaacttcttcatatgctggagtctccagagtcactccgttctaaggttaatgaaactgtagctgtactacaagcccaccaagctgaagtggctgcccagaaagcagttaaccgtgccaccggtgttccaactgtttaaaattgatcaggtaccatgaaaagaaacttgtgcttcacaga

SEQ ID NO: 33939 - DNA, 302 bp, Homo sapiens
agagacatgtgcaaaaatgtttgcatcagcattttcacagtagcaaaaaatctagaaacaattcaaatgtccatcaacatgagagtgaattaattcatcgcataaaaattcacttaatggaatattaagtagagtttaaatgaatggattataaaaacatatgtcaatatgggtgaatcttagcagtataataccaactgactaaaaagcaaatctcaaggtaaataagttgatagagaaaggaaagctaaggaatgacgagatttggagggagagagtcaggagtgtgggaatttggagga

SEQ ID NO: 33940 - DNA, 941 bp, Homo sapiens
ggcccttgtccactagaggcaaggtgccccctgaccccttcttccaaatatacgcttttgtcttttattcctgcattcgcccgctttgttcagtccccctaggtccatgtgggttacatagtggcgccgcagaacagggacttcaaggacgtaaacgaagaaggtctgctggagcagaggaactgaaattgagaaggtgaacggggaccccaggccgagtctgccgacagggatataaggagatggacaagccgtgtgggtgccctcaaggtgtgtgcaaccatggaatgggagactggaggaacccagggtggccaaccatgggtccggtccctctggtgtgagccatgagccagctgagcctgagtgcgaagacggagagaaggccgaccacagtcatgacatcaacccccataacctggggacaactcaagaaaaccacacaggaggctgagaaactactggagcaccagggacagtctgtaaagttggatggaccatcaatgggaaaatgagagctgcccaccctggccttacactccttcaattaatacataaacagaaaggaggatatacagagagccaaaggcccatgggacgtgaccaacattccactgagtctatacgatcaaacagcaaactgtttatcatgaatacagaatgtgggcaaactcatgactgtgcctgccccagaaggtttgctgagggcaattgcttcctgacgccaagctccttgaggttatctattgggacatccagagaatgcagtcttgcaagcctactctggaccgagcagctgaccccctcttccacttcccttcacactatctcttttgcctaataaatacggaaggctgtgtacaaggtcaggtcccttgtccactagaggcaaggtgcttcctgacccttcttccaaatatactcttttgtctttgtctttt

SEQ ID NO: 33941 - DNA, 888 bp, Homo sapiens
ggcccttgtccactagaggcaaggtgccccctgaccccttcttccaaatatacgcttttgtcttttattcctgcattcgcccgctttgttcagtccccctaggtccatgtgggttacatagtggcgccgcagaacagggacttcaaggacgtaaacgaagaaggtctgctggagcagaggaactgaaattgagaaggtgaacggggaccccaggccgagtctgccgacagggatataaggagatggacaagccgtgtgggtgccctcaaggtgtgtgcaaccatggaatgggagactggaggaacccagggtggccaaccatgggtccggtccctctggtgtgagccatgagccagctgagcctgagtgcgaagacggagagaaggccgaccacagtcatgacatcaacccccataacctggggacaactcaagaaaaccacacaggaggctgagaaactactggagcaccagggacagtctgtaaagttggatggaccatcaatgggaaaatgagagctgcccaccctggccttacactccttcaattaatacataaacagaaaggaggatatacagagagccaaaggcccatgggacgtgaccaacattccactgagtctatacgatcaaacagcaaactgtttatcatgaatacagaatgtgggcaaactcatgactgtgcctgccccagaaggtttgctgagggcaattgcttcctgacgccaagctccttgaggttatctattgggacatccagagaatgcagtcttgcaagcctactctggaccgagcagctgaccccctcttccacttcccttctgtcgtcttctcccctactgtcgtcttctccccttctgtcgtctttctccccttctgtcgtcttctc

SEQ ID NO: 33942 - DNA, 2652 bp, Homo sapiens
  misc_feature (872)..(872): n is a, c, g, or t
gatgcaggaactgagcttcatcgctcttcaatgttagctgaagcaatggctaatttagtagttgacaaatctaaaaggagccaagggtcaagctctaaaatgggaaaatgttataattgtggaaaaactggacatttaaaaaaggaatgccaccagatctcaggacagaaaggatcttacaatgcagttcccccatcagcggaaaaaacgccaggactttgtcctcgctgtaacaaaggaaatcactgggctaatcactgctgctcaaaatttcatcggaatggcaccccgttttaggcatgggttcctggaggcacattgattccatcaccccaggaacaccaggaagtgcaggattagatctacctgccagagaaagaatcacattagttgggggagacaaacccatcaaagttcccactggtatttggggaacttcaccagcaggatacatgggactaattttaggcaaaagccgccttaacttgcaaggcatgactgtagtcccaggagctgttgactctgattatgaaggagaaactcaagtagttttaatgtcacaagatctttgggtttttgaactgggagaatatattgctcaattattgcttattccctgcaaattacacccttctccatgaaaggagaaacgaggaaataaagggtttgggagcacaactacatgggaaatctatctatcccgacccatagcctctaatagacccacctgtgtagtacaaattaaaggaaagaaattttatgggcttatggatacgggaactgatgtatcagtaatatctaaagacaattggcccacatcctggctcttgcaattaacttctacatccctagtggaagtaggaacagctcanagtgttcaacagagtgctgagattttaccttgtcttggtccggatgggcagtcatgtacttttcagccttatgttgcaaatatagctatcagtttatggggctgagacttacttacagcatgggagatgagacttacaaatgaaaactttgataacccaggatttaaaatgttgaaggacatggatatcagagtgaaaaaggtttagggaaattcctacaggaaaatcctaacctgatatcagtaactggcaaaacagatagaaaaaggctaggaaatcaggatttctgacagaggtcattgatatttctcccctgcccactgccttaccattagaatggcttagtgacaaacctgtgcgggtggatcaatggcccctaacacaggagaagctagatacctctggtgcttcagcgcaatgctgagagctaattacagtcattcaggttttacagctcacagcttcagatcctatcaacattgtctgtaattcagcttatgttgtaaacgtagccagtcacattcacatggaaactgctacagttaaaagtacactagacccagaactgcttaatttgtttcacttattctcaaatgctgcatgctacatgccaaacaggtgagacagctggtcatgtacagtgacattgtctgtcatcatttgctcatatggggatacttaaacaattaaaaactgacaatggactcgcttatactagtcatgcttttcaaaatttcttatagctttgggctataacccataaaataggaattccttataatcctaaaggacaaggcattgtagagcaggcacattgaacattacaacacatgttgaaaagacgaaaggggtataggaggccaactaccacctcaatcaaaactacatttagccttatttacttcacatttttggactcctggtacagatggtaagactccagcagaaagacattggcaagtgttagaggaaaagaggaaagtttatctgaaagcattatggaaatccctggaaggacaatggaaaggtcgggtggatttactgacgtggagaagagggtatgcttgtgttttcacaggagatggacaagccgtgtgggtgccctcaaggtgtgtgcaaccatggaatgggagactggaggaacccagggtggccaaccatgggtccggtccctctggtgtgagccatgagccagctgagcctgagtgcgaagacggagagaaggccgaccacagtcatgacatcaacccccataacctggggacaactcaagaaaaccacacaggaggctgagaaactactggagcaccagggacagtctgtaaagttggatggaccatcaatgggaaaatgagagctgcccaccctggccttacactccttcaattaatacataaacagaaaggaggatatacagagagccaaaggcccatgggacgtgaccaacattccactgagtctatacgatcaaacagcaaactgtttatcatgaatacagaatgtgggcaaactcatgactgtgcctgccccagaaggtttgctgagggcaattgcttcctgacgccaagctccttgaggttatctattgggacatccagagaatgcagtcttgcaagcctactctggaccgagcagctgaccccctcttccacttcccttcacactatctcttttgcctaataaatacggaaggctgtgtacaaggtcaggtcccttgtccactagaggcaaggtgcttcctgacccttcttccaaatatactcttttgtctttgtctttt

SEQ ID NO: 33943 - DNA, 489 bp, Homo sapiens
cactactctcgaaaaattgcttgtgacagtataaatgagtattcagacattgtggaagacactttggcggcaatatgcaatgatatccagggccataaatccgttcttatccttgggcctccagaaatctgattataggcagccataaggaaggaatcttaaaagaagagaaggctactaatatggtttggatctgtgtccccgcatgtcgaattgcaatccccagtgttggaggaagggcctggtggaaggtgactggatcatggggaaggatttctcccttgttgttctcgtgatagtgagcgagttctcgtaagatctggttctttaataaaagtgtaaggcacttccccctgtgttcctcctgctctggccacgtaagacattgcctgctttcccctttgccttctgccatgattgaaattcccgagcctccccagccatgcttcttgcacagcctgcagaaccatgagccaattaaacttctct

SEQ ID NO: 33944 - DNA, 585 bp, Homo sapiens
  misc_feature (1)..(1): n is a, c, g, or t
  misc_feature (8)..(8): n is a, c, g, or t
  misc_feature (28)..(28): n is a, c, g, or t
nacccccngtgaacctgcccccccctgnccccccccccaatgtgggattaccgggtgtgagcccccacccgtgccccggcccagcaaccccggtttaaccaagatggcctgggtgattccctcatgccagcctaaagtatgagaacctgataccagtagaggagttaaaacctaataatttgcccccatcaaaattatggaggtgaaggagtggggatccgttatgtgagataaattccctgtcctatccatggaaggaatttagtaaaataatgtcctagatcctgataaatcaacgagtagtagtatccagcatgttttcctagagatatggaaataatcatcaaaagaaacataaacggacgtgggtaataatgagtaataatggttgcccctggagaggaggactcagtatggcgaggtatgtggcagggggttattatttttctaaccatgtgattctttggttgaaattaaaataaaagaaaaaattgttcttagattgggaagattgtccaggagcctgagagaagttctgggagagcagttctttcttattgtccttttcctgattatggggaaaaa

SEQ ID NO: 33945 - DNA, 368 bp, Homo sapiens
tctaaaattgtaatggttttacattttacatttaatggtccattttgagataaatttaaataagatatgaagtttaggttgaggtttatttttttaaagcaagaggtgtacaatggctccagcatcaatagcatgattttactacctacttgctctagattatcaatcacatgtcctattcataatatcggttcctctgtttacataccatattggcatctatctatatgtgtgataggtgtttgaaactcaaattttcaaacttatattaataatttccactccaaactcagttttttctatatttcttattgagatttttgagccaaatatcctccaagcaaatggaattacaatgtggaaggtag

SEQ ID NO: 33946 - DNA, 669 bp, Homo sapiens
ccctagcaacttcctgtacccctagcaaccttcctgtacccctagcaaccttcctgtacccctagcaaccttcctgtatccctagcaaccttcctgtacccctagcaaccttcctgtacccctagcaaccttcctgtccttccaatatgtgacgtagatcattttcaacagagtagcaggcaagcgcattctacagagagtaaagtacaatcagagcacattccaaatggaagttggccttatagttaatgagtttcttagaacaacaaaagcccagctatgaagggtgactttggtcctgcgtgagttcagtctctggtgaggaagctgcaatgctttctaagactctggagagtctgggaaccttgaagcagccagatgcgtgatagttatttgcaggtgttgcctgaggaacgatgggacacgtatagcttttggtagtgctggttttgggactggggaacctaaaaccttcaagaggacagtttccctccaaagaattaatcagtggggaatgtttttgcaacaaaagtgttcaacccataggcagtggggggcaccacatgggggaggaaacagcattttaggatgctgggccaagggaaggaagttgggctctttacctaacagctgatcttcgacctaaaagttgtcattgcgttccctttc

SEQ ID NO: 33947 - DNA, 327 bp, Homo sapiens
aagacactgaagctatctgctgttaattcctttaaaaaaaaaaaaaaagcacctagttcattttcaggtggcctctttaaatttagtaatggttctaaagtgatacagaattattaattttaacttcagagaaatgctttttactattctaataattttctgttaaagttaattatttttacagcagtaaatttcaagtccataattgtgatctaagttctctcttaaaaattaagccccaaggccaggtgcactggctcatgctctgggaggacggcttgaggccaggagtttgagaccagcctgggtaacatagtgagaccccaa

SEQ ID NO: 33948 - DNA, 2026 bp, Homo sapiens
catatcttcaaatcaaatttcagtggagtgtttaccgggcaaggaaggcaggggggtcagcttgctgacagcctcaacctgccagccctcagcctgcacatttgtgatcacctggtcacacacctgggcaggaggctgcccctccctggtttgaggaagcaggaaaaggtacccgcgagagacagccagcagttctgtggagcagcggtggccggctaggatgggctgtctctggggtctggctctgccccttttcttcttctgctgggaggttggggtctctgggagctctgcaggccccagcacccgcagagcagacactgcgatgacaacggacgacacagaagtgcccgctatgactctagcaccgggccacgccgctctggaaactcaaacgctgagcgctgagacctcttctagggcctcaaccccagccggccccattccagaagcagagaccaggggagccaagagaatttcccctgcaagagagaccaggagtttcacaaaaacatctcccaacttcatggtgctgatcgccacctccgtggagacatcagccgccagtggcagccccgagggagctggaatgaccacagttcagaccatcacaggcagtgatcccgaggaagccatctttgacaccctttgcaccgatgacagctctgaagaggcaaagacactcacaatggacatattgacattggctcacacctccacagaagctaagggcctgtcctcagagagcagtgcctcttccgacggcccccatccagtcatcaccccgtcacgggcctcagagagcagcgcctcttccgacggcccccatccagtcatcaccccgtcacgggcctcagagagcagcgcctcttccgacggcccccatccagtcatcaccccgtcatggtccccgggatctgatgtcactctcctcgctgaagccctggtgactgtcacaaacatcgaggttattaattgcagcatcacagaaatagaaacaacaacttccagcatccctggggcctcagacatagatctcatccccacggaaggggtgaaggcctcgtccacctccgatccaccagctctgcctgactccactgaagcaaaaccacacatcactgaggtcacagcctctgccgagaccctgtcctcagccctctctgttgagacaccaagttacgtcaaagtctcaggagcagctccggtctccatagaggctgggtcagcagtgggcaaaacaacttcctttgctgggagctctgcttcctcctacagcccctcggaagccgccctcaagaacttcaccccttcagagacaccgaccatggacatcgcaaccaaggggcccttccccaccagcagggaccctcttccttctgtccctccgactacaaccaacagcagccgagggacgaacagcaccttagccaagatcacaacctcagcgaagaccacgatgaagcccccaacagccacgcccacgactgcccggacgaggccgaccacagacgtgagtgcaggtgaaaatggaggtttcctcctcctgcggctgagtgtggcttccccggaagacctcactgaccccagagtggcagaaaggctgatgcagcagctccaccgggaactccacgcccacgcgcctcacttccaggtctccttactgcgtgtcaggagaggctaacggacatcagctgcagccaggcatgtcccgtatgccaaaagagggtgctgcccctagcctgggcccccaccgacagactgcagctgcgttactgtgctgagaggtacccagaaggttcccatgaagggcagcatgtccaagcccctgaccccagatgtggcaacaggaccctcgctcacatccaccggagtgtatgtgtggggaggggcttcacctgttcccagaggtgtccttggactcaccttggcacatgttctgtgtttcagtaaagagagacctgatcacccatctgtgtgcttccatcctgcattaaaattcactcagtgtggcccagaaaaaaaa

SEQ ID NO: 33949 - DNA, 1233 bp, Homo sapiens
agagaaggactggaagaatcttggagttgggaatgtcacacgtaattgaaggaagaacaagaaaactatagcagctgctcccaaccccagaacctttgctgtcttgggacggatcaccactgcaagaggggaagttgctactgtgatgaattctgccatgtggcaccagactgccacccagaccacagtgtcctctgcaaccctggtaactcacatacaggcccgattccaccgacagcaaagctggatgctatggctggcagaggcaaaccctttgcctgcacttcaggccaaagccgggatgtggcctagatggttcctaagcttctcagatgaccaagatggtgctgcagatggtgctgaggatggagaacccaccaagccccgctaggagccacctagactggatgcagagcatggttcagcgagttctccaaaccagcctcccaggaatgccattcaccatggctgtgaggagaataaagaagagagcctgactcctctcctgaggccccttccccaccctgagccagcaggatccacggagcagaggtcatctgtccccagcttggcccactgaggccagcatggctgggcccaggatgcttgtctctcagctcccatcctgtgtacttccacattggtttaaccagaggaaaaccgaaatctacaattgtcataaacacatttaaatgtgcgtagaatcagccatacaaattgtgaaacataaaacatttggctcatggtattattcactgttttgtggtggttacagtgactatagcaaacatttcttgaaagtagaaaataagaacccagcaccccttgagctaagtaatgtgccctctgtcctcaatattccttcctgggctccacattactgcccttaagtctggaaatattctggtctgagccccgtagtccaggcctcatgttcaggctttctgtccccagtgatgagaggagagacggcagacctttctccggtgagctcagatgggcctcccggagtctcctggggtgcacaggatttcaaagatccaggaggcgctgccaggggctgtgaggtctgatgaacctctcaccttccctcccacacctgcccttttcctgtttctgtggatgcttttgctgtccttggcttcctggactccagacctcagggtcatcttttgcttctctctgcaaggtgccaagtctctctaggtttttgtttgtttgttttgttattga

SEQ ID NO: 33950 - DNA, 756 bp, Homo sapiens
aaggagtcacggggcgcgcacgccagtttattaaataacaagtgcagattgatgagtatgatcactccaagcccatccaggggcaacagaagaagccctttgaggtgcactggaggaagcacaccctgtcctatgtggacgtcggcactgggaagagccagaggacaacacatcacacacaagaaacagttgtgctcatgtgatgggggcctcagcactaggaaggagtggactgttggcgcacgcagcagcttgaataaatctgaaagtcactacgctgcgtaagagaagccaaataaagcgcatgctgtgtacagagggtgtcgagaatgcctcctacgtgacggaaagcagatccgtggttccctgcagactggcaggagcagattccaaaggcacaggaagaagcttgcaggtagaatgtgttcattaccttctgcgcattataccacaaaaaagctgggaataaaaatgctaaccaaaaaaaaaggtgaaagtagataaaatttctcaactgtgtgatgggtaaacgtgcaggtttgctgtcatgctttgtttatgaagctgtggggtacaaggactctcatacgtcactgtggaatgcagaacgttgcagcctcatggaagaggatttggcagcatctaacaaaacgacatggcatttgcccttagactcagcaattctagaatctgcctcaaaaaaaactctggcaaagaaatgaaaggactttatccacagagttcttttcacagcct

SEQ ID NO: 33951 - DNA, 418 bp, Homo sapiens
gcctctggcgagctcatgggccagatgggctgaaaggacagctggctcttttgctctccagctccaccgggaactccacgcccacgcgcctcacttccaggtctccttactgcgtgtcaggagaggctaacggacatcagctgcagccaggcatgtcccgtatgccaaaagagggtgctgcccctagcctgggcccccaccgacagactgcagctgcgttactgtgctgagaggtacccagaaggttcccatgaagggcagcatgtccaagcccctgaccccagatgtggcaacaggaccctcgctcacatccaccggagtgtatgtgtggggaggggcttcacctgttcccagaggtgtccttggactcaccttggcacatgttctgtgtttcagtaaagagagacctgatcaccca

SEQ ID NO: 33952 - DNA, 611 bp, Homo sapiens
ccagaaggaggaatgaggaacgcctattgataaggggcagagtacatataatataatgcaaatatatatttgctttttcttaaaacatacaaagataaaaatctaaagtggttgctgtggaggacaggggtcagtggtggaagtgagaccgaaatagactctgaagtaatatctggactttgaaattgtaagtgttttacatattaccaaactaagtttttaagatagtccctaaaattgaaagaatggtatctgaaatgaatgaatctaaattccttggattgcattctacaggcgccaaccctgagaccaaaatttggaaggtggccctgagcagcagctgaagggaagtgggaggtgaagatcaggacaagaggcggcagcatggggcgtccgggagccgggtctcatgtggacagctgggcccgtgttcactgtgggagctggtgcgttccttcaccagcccacgctgcacaggttcaggatggtcaattccgggcacccctggcctgctccaggacatgctgctgccaccagagaaagcccctaggcagcgtcccgggtgctggtggtgtcagaatcgagtttgagtctgaggagtgacctggggc

SEQ ID NO: 33953 - DNA, 411 bp, Homo sapiens
aaggagtcacggggcgcgcacgccagtttattaaataacaagtgcagattgatgagtatgatcactccaagcccatccaggggcaacagaagaagccctttgaggtgcactggaggaagcacaccctgtcctatgtggacgtcggcactgggaagagccagaggacaacacatcacacacaagaaacagttgtgctcatgtgatgggggcctcagcactaggaaggagtggactgttggcgcacgcagcagcttgaataaatctgaaagtcactacgctgcgtaagagaagccaaataaagcgcatgctgtgtacagagggtgtcgagaatgcctcctacgtgacggaaagcagatccgtggttccctgcagactggcaggcttgttgaaagtcctgtagatcgactcgca

SEQ ID NO: 33954 - DNA, 444 bp, Homo sapiens
agagcagaggcccaggaagaagcttgctacaaagataaaaatctaaagtggttgctgtggaggacaggggtcagtggtggaagtgagaccgaaatagactctgaagtaatatctggactttgaaattgcgccaaccctgagaccaaaatttggaaggtggccctgagcagcagctgaagggaagtgggaggtgaagatcaggacaagaggcggcagcatggggcgtccgggagccgggtctcatgtggacagctgggcccgtgttcactgtgggagctggtgcgttccttcaccagcccacgctgcacaggttcaggatggtcaattccgggcacccctggcctgctccaggacatgctgctgccaccagagaaagcccctaggcagcgtcccgggtgctggtggtgtcagaatcgagtttgagtctgaggagtgacctggggc

SEQ ID NO: 33955 - DNA, 309 bp, Homo sapiens
  misc_feature (45)..(46): n is a, c, g, or t
  misc_feature (297)..(297): n is a, c, g, or t
  misc_feature (299)..(299): n is a, c, g, or t
  misc_feature (303)..(303): n is a, c, g, or t
  misc_feature (306)..(306): n is a, c, g, or t
ctaggtactctcaggagttattcttagcttgtgttggacatgctnntacgtgacggaaagcagatccgtggttccctgcagactggcaggagcagattccaaaggcacaggaagaagcttgcagtacaaagataaaaatctaaagtggttgctgtggaggacaggggtcagtggtggaagtgagaccgaaatagactctgaagtaatatctggactttgaaatttgcacagccagagaacaacacatcacacacaagaaacagttgtgctcatgtgatggggacctcagcactaggngngaanggnctg

SEQ ID NO: 33956 - DNA, 353 bp, Homo sapiens
ggaggatccctaacgatacatacagcattacttctgcgcattataccacaaaaaagctgggaataaaaatgctaaccaaaaaaaaaggtgaaagtagataaaatttctcaactgtgtgatgggtaaacgtgcaggtttgctgtcatgctttgtttatgaagctgtggggtacaaggactctcatacgtcactgtggaatgcagaacgttgcagcctcatggaagaggatttggcagcatctaacaaaacgacatggcatttgcccttagactcagcaattctagaatctgcctcaaaaaaaactctggcaaagaaatgaaaggactttatccacagagttcttttcacagcct

SEQ ID NO: 33957 - DNA, 322 bp, Homo sapiens
gtcctcctcctcctgctgtggctgagccttggggtgaagacaggcagctgctcccaaccccagaacctttgctgtcttgggacggatcaccactgcaagaggggaagttgctactgtgatgaattctgccatgtggcaccagactgccacccagaccacagtgtcctctgcaaccctgcttctcagatgaccaagatggtgctgcagatggtgctgaggatggagaacccaccaagccccgctaggagccacctagactggatgcagagcatgatttgaagattgtaccaggagagcagcaggaggaggacggggatcctct

SEQ ID NO: 33958 - DNA, 278 bp, Homo sapiens
ccctctccgacattctgcggccgcggctgtggtgagtgagtgaattgagatcaggtatggagggacttggctcctggtgagtgagttaattgagatgaggtgtggagggacctgtctcctggtgagtgagttaattgagatgaggtatggagggacctgtctcctggtgagtgagtgaattgagatcaggtatggagggacttggctcctggtgagtgagttaattgagaggtgggcagaaaagtgttagtaccaccctcattttacaaacacatcct

SEQ ID NO: 33959 - DNA, 238 bp, Homo sapiens
ccagagccaccaaggaggaaagtggggagaagaaactgtattatgaaggcagacgaacagttcctgcaaaggtgagatttgtgtgtgcagctgggccgcactggaccagggatgagagtgggtgcccgggactcgcctatactgcctgggggtgcagcccgcactcctcactatagtcaaatcgactatgcgtgctttccaggggcccgggagaggactccatggggagggatgctta

SEQ ID NO: 33960 - DNA, 220 bp, Homo sapiens
agagaaggactggaagaatcttggagttgggaatgtcacacgtaattgaaggaagaacaagaaaactatagtaaagaaccctggggtggtgatgtagtcatgggccaagtgtcctggaaccctggggtggtgatgtagtcatgggccaagtgtcctggaaccctggggtggtgatgtagttgtgggccaagtgtcctgggttttgggtggagaaagagtc

SEQ ID NO: 33961 - DNA, 195 bp, Homo sapiens
aacaccaaggatccctgggctcacgtccgaacctgcagacctggaggggcagggcttcaccttcaagggtgtggagggacctggctcctggtgagtgagtgaattgagatgaggtatggagggacctggctcctggtgagtgagtgaattgagatgaggtgtggagggacctgtctcctggtgagtgagttaatt

SEQ ID NO: 33962 - DNA, 176 bp, Homo sapiens
cgctaaagctgcctctagtcagacatgatggtatcttgggtagaaacttgaaggcgtgtggagggacctgtctcctggtgagtgagttaattgagatgaggtatggagggacctgtctcctggtgagtgagtgaattgagatcaggtatggagggacttggctcctggtgagtgag

SEQ ID NO: 33963 - DNA, 2179 bp, Homo sapiens
catatcttcaaatcaaatttcagtggagtgtttaccgggcaaggaaggcaggggggtcagcttgctgacagcctcaacctgccagccctcagcctgcacatttgtgatcacctggtcacacacctgggcaggaggctgcccctccctggtttgaggaagcaggaaaaggtacccgcgagagacagccagcagttctgtggagcagcggtggccggctaggatgggctgtctctggggtctggctctgccccttttcttcttctgctgggaggttggggtctctgggagctctgcaggccccagcacccgcagagcagacactgcgatgacaacggacgacacagaagtgcccgctatgactctagcaccgggccacgccgctctggaaactcaaacgctgagcgctgagacctcttctagggcctcaaccccagccggccccattccagaagcagagaccaggggagccaagagaatttcccctgcaagagagaccaggagtttcacaaaaacatctcccaacttcatggtgctgatcgccacctccgtggagacatcagccgccagtggcagccccgagggagctggaatgaccacagttcagaccatcacaggcagtgatcccgaggaagccatctttgacaccctttgcaccgatgacagctctgaagaggcaaagacactcacaatggacatattgacattggctcacacctccacagaagctaagggcctgtcctcagagagcagtgcctcttccgacggcccccatccagtcatcaccccgtcacgggcctcagagagcagcgcctcttccgacggcccccatccagtcatcaccccgtcacgggcctcagagagcagcgcctcttccgacggcccccatccagtcatcaccccgtcatggtccccgggatctgatgtcactctcctcgctgaagccctggtgactgtcacaaacatcgaggttattaattgcagcatcacagaaatagaaacaacaacttccagcatccctggggcctcagacatagatctcatccccacggaaggggtgaaggcctcgtccacctccgatccaccagctctgcctgactccactgaagcaaaaccacacatcactgaggtcacagcctctgccgagaccctgtccacagccggcaccacagagtcagctgcacctcatgccacggttgggaccccactccccactaacagcgccacagaaagagaagtgacagcacccggggccacgaccctcagtggagctctggtcacagttagcaggaatcccctggaagaaacctcagccctctctgttgagacaccaagttacgtcaaagtctcaggagcagctccggtctccatagaggctgggtcagcagtgggcaaaacaacttcctttgctgggagctctgcttcctcctacagcccctcggaagccgccctcaagaacttcaccccttcagagacaccgaccatggacatcgcaaccaaggggcccttccccaccagcagggaccctcttccttctgtccctccgactacaaccaacagcagccgagggacgaacagcaccttagccaagatcacaacctcagcgaagaccacgatgaagcccccaacagccacgcccacgactgcccggacgaggccgaccacagacgtgagtgcaggtgaaaatggaggtttcctcctcctgcggctgagtgtggcttccccggaagacctcactgaccccagagtggcagaaaggctgatgcagcagctccaccgggaactccacgcccacgcgcctcacttccaggtctccttactgcgtgtcaggagaggctaacggacatcagctgcagccaggcatgtcccgtatgccaaaagagggtgctgcccctagcctgggcccccaccgacagactgcagctgcgttactgtgctgagaggtacccagaaggttcccatgaagggcagcatgtccaagcccctgaccccagatgtggcaacaggaccctcgctcacatccaccggagtgtatgtgtggggaggggcttcacctgttcccagaggtgtccttggactcaccttggcacatgttctgtgtttcagtaaagagagacctgatcacccatctgtgtgcttccatcctgcattaaaattcactcagtgtggcccagaaaaaaaa

SEQ ID NO: 33964 - DNA, 4259 bp, Homo sapiens
gtgttgcctaggctggtctcaaactgctgggcttaagtgatcgttcctccttggcctcccgaagtgctggaattataggtgtgaaccaccatgtctggccttgtagtttatttctaagttcaaattaatgttggtgcttttcctccttttttcttagcagatggtttgctaggtgagtgtgtcctcgattctttaaatcaggggtccccaatccccaggccacagattgttccagtccatggcctgttaggaaccaggccacacagtaggaggtgagcagccagccagtgagcattactgtgtgagctccgccccctgccagagcattactgtgtgagctccgccccctgtcagagcattactgtgtgagctccgccccctgccagagattactgtgtgagctccgccccctgccagagcattactgtgtgagctccgccccctgtcattactgtgtgagctccgccccctgtcatatcattactgtgtgagctccgccccctgtcatatcattattgtgagctccgcccctgtcatatcattgctgtgtgagctccgcctcctgtcagatcagtggtggcattagattctcataggagtggaatcctgttgtgaactgcgcatgagaaggatctaggttatgccccgcttatgagaatctaatactgatgatctgagatggaaccgtttcatctccaaaccatccccacacttgtcagtggaaaaagtgtcttccgtgaaaccagtccctggtgccaaaaaggttagggactgccggtttaaataaccaaatgctaaaagaactggcatagaagtaaatgggctgctgctttatttttaggctgttctttttagagagcaatgacagttatttccaagtttgtcattagaaaataatattaggttggagcaaaagtaattgcagtttttgccattgctttcaatggtaaaaggcacaattacttttgcagcaacttaatattataaatttgttcttaaagtgtatttttgataagaaagccgttttgtttttccttctgttaattttttgtttttttcttggtcgagacagagtcttgccatgctgcccaggctggagtgcagtggtgtgatctcggctcactgcagcctccacctcctgggctccagcagtcctcccacctcaacctccctaagagctgagactacaggtgtgagccaccatgcctggctaatttttagagacagggtttcaccctcttgcccaggctggtcccaaactcctgggctcaagcagtcctcctgcctcagcctcccagagtattgggattataggtgtgagccactgccagaaaaacgtttcctaagacaaggcaggtcttacattatatttaaattttttttaatgatgtcttttttggcagtgcacagccagaggacaacacatcacacacaagaaacagttgtgctcatgtgatgggggcctcagcactaggaaggagtggactgttggcgcacgcagcagcttgaataaatctgaaagtcactacgctgcgtaagagaagccaaataaagcgcatgctgtgtacagagggtgtcgagaatgcctcctacgtgacggaaagcagatccgtggttccctgcagactggcaggagcagattccaaaggcacaggaagaagcttgcaggcagctgctcccaaccccagaacctttgctgtcttgggacggatcaccactgcaagaggggaagttgctactgtgatgaattctgccatgtggcaccagactgccacccagaccacagtgtcctctgcaaccctggtaactcacatacaggcccgattccaccgacagcaaagctggatgctatggctggcagaggcaaaccctttgcctgcacttcaggccaaagccgggatgtggcctagatggttcctaaggtccctgacaatcctgagatcttgcatcttgtctatttcaggtcaaaggtgcctacatgctccttctagctttgtttccctgatgttccttgccacctgctactcctctctgagctacttttccaggttccacagggagaggttcagctgtccgtggtagacatgagggtagagagtgaggtggttgggttccacttacctttctatcatcttgcagtatggatgtctcttgactggtaccgtgtagacttttgagggcacacaggagtctgcagagagatactggggacattgagcagcagcagtggggttgggaggcagaaatgaggacaggaacatttaccttgtgtttctctcagcttctcagatgaccaagatggtgctgcagatggtgctgaggatggagaacccaccaagccccgctaggagccacctagactggatgcagagcatggccccagcacccgcagagcagacactgcgatgacaacggacgacacagaagtgcccgctatgactctagcaccgggccacgccgctctggaaactcaaacgctgagcgctgagacctcttctagggcctcaaccccagccggccccattccagaagcagagaccaggggagccaagagaatttcccctgcaagagagaccaggagtttcacaaaaacatctcccaacttcatggtgctgatcgccacctccgtggagacatcagccgccagtggcagccccgagggagctggaatgaccacagttcagaccatcacaggcagtgatcccgaggaagccatctttgacaccctttgcaccgatgacagctctgaagaggcaaagacactcacaatggacatattgacattggctcacacctccacagaagctaagggcctgtcctcagagagcagtgcctcttccgacggcccccatccagtcatcaccccgtcacgggcctcagagagcagcgcctcttccgacggcccccatccagtcatcaccccgtcacgggcctcagagagcagcgcctcttccgacggcccccatccagtcatcaccccgtcatggtccccgggatctgatgtcactctcctcgctgaagccctggtgactgtcacaaacatcgaggttattaattgcagcatcacagaaatagaaacaacaacttccagcatccctggggcctcagacatagatctcatccccacggaaggggtgaaggcctcgtccacctccgatccaccagctctgcctgactccactgaagcaaaaccacacatcactgaggtcacagcctctgccgagaccctgtccacagccggcaccacagagtcagctgcacctcatgccacggttgggaccccactccccactaacagcgccacagaaagagaagtgacagcacccggggccacgaccctcagtggagctctggtcacagttagcaggaatcccctggaagaaacctcagccctctctgttgagacaccaagttacgtcaaagtctcaggagcagctccggtctccatagaggctgggtcagcagtgggcaaaacaacttcctttgctgggagctctgcttcctcctacagcccctcggaagccgccctcaagaacttcaccccttcagagacaccgaccatggacatcgcaaccaaggggcccttccccaccagcagggaccctcttccttctgtccctccgactacaaccaacagcagccgagggacgaacagcaccttagccaagatcacaacctcagcgaagaccacgatgaagcccccaacagccacgcccacgactgcccggacgaggccgaccacagacgtgagtgcaggtgaaaatggaggtttcctcctcctgcggctgagtgtggcttccccggaagacctcactgaccccagagtggcagaaaggctgatgcagcagctccaccgggaactccacgcccacgcgcctcacttccaggtctccttactgcgtgtcaggagaggctaacggacatcagctgcagccaggcatgtcccgtatgccaaaagagggtgctgcccctagcctgggcccccaccgacagactgcagctgcgttactgtgctgagaggtacccagaaggttcccatgaagggcagcatgtccaagcccctgaccccagatgtggcaacaggaccctcgctcacatccaccggagtgtatgtgtggggaggggcttcacctgttcccagaggtgtccttggactcaccttggcacatgttctgtgtttcagtaaagagagacctgatcacccatctgtgtgcttccatcctgcattaaaattcactcagtgtggcccagaaaaaaaa

SEQ ID NO: 33965 - DNA, 3646 bp, Homo sapiens
gtgttgcctaggctggtctcaaactgctgggcttaagtgatcgttcctccttggcctcccgaagtgctggaattataggtgtgaaccaccatgtctggccttgtagtttatttctaagttcaaattaatgttggtgcttttcctccttttttcttagcagatggtttgctaggtgagtgtgtcctcgattctttaaatcaggggtccccaatccccaggccacagattgttccagtccatggcctgttaggaaccaggccacacagtaggaggtgagcagccagccagtgagcattactgtgtgagctccgccccctgccagagcattactgtgtgagctccgccccctgtcagagcattactgtgtgagctccgccccctgccagagattactgtgtgagctccgccccctgccagagcattactgtgtgagctccgccccctgtcattactgtgtgagctccgccccctgtcatatcattactgtgtgagctccgccccctgtcatatcattattgtgagctccgcccctgtcatatcattgctgtgtgagctccgcctcctgtcagatcagtggtggcattagattctcataggagtggaatcctgttgtgaactgcgcatgagaaggatctaggttatgccccgcttatgagaatctaatactgatgatctgagatggaaccgtttcatctccaaaccatccccacacttgtcagtggaaaaagtgtcttccgtgaaaccagtccctggtgccaaaaaggttagggactgccggtttaaataaccaaatgctaaaagaactggcatagaagtaaatgggctgctgctttatttttaggctgttctttttagagagcaatgacagttatttccaagtttgtcattagaaaataatattaggttggagcaaaagtaattgcagtttttgccattgctttcaatggtaaaaggcacaattacttttgcagcaacttaatattataaatttgttcttaaagtgtatttttgataagaaagccgttttgtttttccttctgttaattttttgtttttttcttggtcgagacagagtcttgccatgctgcccaggctggagtgcagtggtgtgatctcggctcactgcagcctccacctcctgggctccagcagtcctcccacctcaacctccctaagagctgagactacaggtgtgagccaccatgcctggctaatttttagagacagggtttcaccctcttgcccaggctggtcccaaactcctgggctcaagcagtcctcctgcctcagcctcccagagtattgggattataggtgtgagccactgccagaaaaacgtttcctaagacaaggcaggtcttacattatatttaaattttttttaatgatgtcttttttggcagtgcacagccagaggacaacacatcacacacaagaaacagttgtgctcatgtgatgggggcctcagcactaggaaggagtggactgttggcgcacgcagcagcttgaataaatctgaaagtcactacgctgcgtaagagaagccaaataaagcgcatgctgtgtacagagggtgtcgagaatgcctcctacgtgacggaaagcagatccgtggttccctgcagactggcaggagcagattccaaaggcacaggaagaagcttgcagcttctcagatgaccaagatggtgctgcagatggtgctgaggatggagaacccaccaagccccgctaggagccacctagactggatgcagagcatggccccagcacccgcagagcagacactgcgatgacaacggacgacacagaagtgcccgctatgactctagcaccgggccacgccgctctggaaactcaaacgctgagcgctgagacctcttctagggcctcaaccccagccggccccattccagaagcagagaccaggggagccaagagaatttcccctgcaagagagaccaggagtttcacaaaaacatctcccaacttcatggtgctgatcgccacctccgtggagacatcagccgccagtggcagccccgagggagctggaatgaccacagttcagaccatcacaggcagtgatcccgaggaagccatctttgacaccctttgcaccgatgacagctctgaagaggcaaagacactcacaatggacatattgacattggctcacacctccacagaagctaagggcctgtcctcagagagcagtgcctcttccgacggcccccatccagtcatcaccccgtcacgggcctcagagagcagcgcctcttccgacggcccccatccagtcatcaccccgtcacgggcctcagagagcagcgcctcttccgacggcccccatccagtcatcaccccgtcatggtccccgggatctgatgtcactctcctcgctgaagccctggtgactgtcacaaacatcgaggttattaattgcagcatcacagaaatagaaacaacaacttccagcatccctggggcctcagacatagatctcatccccacggaaggggtgaaggcctcgtccacctccgatccaccagctctgcctgactccactgaagcaaaaccacacatcactgaggtcacagcctctgccgagaccctgtccacagccggcaccacagagtcagctgcacctcatgccacggttgggaccccactccccactaacagcgccacagaaagagaagtgacagcacccggggccacgaccctcagtggagctctggtcacagttagcaggaatcccctggaagaaacctcagccctctctgttgagacaccaagttacgtcaaagtctcaggagcagctccggtctccatagaggctgggtcagcagtgggcaaaacaacttcctttgctgggagctctgcttcctcctacagcccctcggaagccgccctcaagaacttcaccccttcagagacaccgaccatggacatcgcaaccaaggggcccttccccaccagcagggaccctcttccttctgtccctccgactacaaccaacagcagccgagggacgaacagcaccttagccaagatcacaacctcagcgaagaccacgatgaagcccccaacagccacgcccacgactgcccggacgaggccgaccacagacgtgagtgcaggtgaaaatggaggtttcctcctcctgcggctgagtgtggcttccccggaagacctcactgaccccagagtggcagaaaggctgatgcagcagctccaccgggaactccacgcccacgcgcctcacttccaggtctccttactgcgtgtcaggagaggctaacggacatcagctgcagccaggcatgtcccgtatgccaaaagagggtgctgcccctagcctgggcccccaccgacagactgcagctgcgttactgtgctgagaggtacccagaaggttcccatgaagggcagcatgtccaagcccctgaccccagatgtggcaacaggaccctcgctcacatccaccggagtgtatgtgtggggaggggcttcacctgttcccagaggtgtccttggactcaccttggcacatgttctgtgtttcagtaaagagagacctgatcacccatctgtgtgcttccatcctgcattaaaattcactcagtgtggcccagaaaaaaaa

SEQ ID NO: 33966 - DNA, 2125 bp, Homo sapiens
catatcttcaaatcaaatttcagtggagtgtttaccgggcaaggaaggcaggggggtcagcttgctgacagcctcaacctgccagccctcagcctgcacatttgtgatcacctggtcacacacctgggcaggaggctgcccctccctggtttgaggaagcaggaaaaggtacccgcgagagacagccagcagttctgtggagcagcggtggccggctaggatgggctgtctctggggtctggctctgccccttttcttcttctgctgggaggttggggtctctgggagctctgcaggccccagcacccgcagagcagacactgcgatgacaacggacgacacagaagtgcccgctatgactctagcaccgggccacgccgctctggaaactcaaacgctgagcgctgagacctcttctagggcctcaaccccagccggccccattccagaagcagagaccaggggagccaagagaatttcccctgcaagagagaccaggagtttcacaaaaacatctcccaacttcatggtgctgatcgccacctccgtggagacatcagccgccagtggcagccccgagggagctggaatgaccacagttcagaccatcacaggcagtgatcccgaggaagccatctttgacaccctttgcaccgatgacagctctgaagaggcaaagacactcacaatggacatattgacattggctcacacctccacagaagctaagggcctgtcctcagagagcagtgcctcttccgacggcccccatccagtcatcaccccgtcacgggcctcagagagcagcgcctcttccgacggcccccatccagtcatcaccccgtcacgggcctcagagagcagcgcctcttccgacggcccccatccagtcatcaccccgtcatggtccccgggatctgatgtcactctcctcgctgaagccctggtgactgtcacaaacatcgaggttattaattgcagcatcacagaaatagaaacaacaacttccagcatccctggggcctcagacatagatctcatccccacggaaggggtgaaggcctcgtccacctccgatccaccagctctgcctgactccactgaagcaaaaccacacatcactgaggtcacagcctctgccgagaccctgtccacagccggcaccacagagtcagctgcacctcatgccacggttgggaccccactccccactaacagcgccacagaaagagaagtgacagcacccggggccacgaccctcagtggagctctggtcacagttagcaggaatcccctggaagaaacctcagccctctctgttgagacaccaagttacgtcaaagtctcaggagcagctccggtctccatagaggctgggtcagcagtgggcaaaacaacttcctttgctgggagctctgcttcctcctacagcccctcggaagccgccctcaagaacttcaccccttcagagacaccgaccatggacatcgcaaccaaggggcccttccccaccagcagggaccctcttccttctgtccctccgactacaaccaacagcagccgagggacgaacagcaccttagccaagatcacaacctcagcgaagaccacgatgaagcccccaacagccacgcccacgactgcccggacgaggccgaccacagacgtgagtgcaggtgaaaatggaggtttcctcctcctgcggctgagtgtggcttccccggaagacctcactgaccccagagtggcagaaaggctgatgcagcagctccaccgggaactccacgcccacgcgcctcacttccaggtctccttactgcgtgtcaggagaggctaacggacatcagctgcagccaggcatgtcccgtatgccaaaagagggtgctgcccctagcctgggcccccaccgacagactgcagctgcgttactgtgctgagaggtacccagaaggttcccatgaagggcagcatgtccaagcccctgaccccagatgtggcaacaggaccctcgctcacatccaccggagtgtatgtgtggggaggggcttcacctgttcccagaggtgtccttggactcaccttggcacatgttctgtgtttcagtaaagagagacctgatcaccca

SEQ ID NO: 33967 - DNA, 4316 bp, Homo sapiens
gtgttgcctaggctggtctcaaactgctgggcttaagtgatcgttcctccttggcctcccgaagtgctggaattataggtgtgaaccaccatgtctggccttgtagtttatttctaagttcaaattaatgttggtgcttttcctccttttttcttagcagatggtttgctaggtgagtgtgtcctcgattctttaaatcaggggtccccaatccccaggccacagattgttccagtccatggcctgttaggaaccaggccacacagtaggaggtgagcagccagccagtgagcattactgtgtgagctccgccccctgccagagcattactgtgtgagctccgccccctgtcagagcattactgtgtgagctccgccccctgccagagattactgtgtgagctccgccccctgccagagcattactgtgtgagctccgccccctgtcattactgtgtgagctccgccccctgtcatatcattactgtgtgagctccgccccctgtcatatcattattgtgagctccgcccctgtcatatcattgctgtgtgagctccgcctcctgtcagatcagtggtggcattagattctcataggagtggaatcctgttgtgaactgcgcatgagaaggatctaggttatgccccgcttatgagaatctaatactgatgatctgagatggaaccgtttcatctccaaaccatccccacacttgtcagtggaaaaagtgtcttccgtgaaaccagtccctggtgccaaaaaggttagggactgccggtttaaataaccaaatgctaaaagaactggcatagaagtaaatgggctgctgctttatttttaggctgttctttttagagagcaatgacagttatttccaagtttgtcattagaaaataatattaggttggagcaaaagtaattgcagtttttgccattgctttcaatggtaaaaggcacaattacttttgcagcaacttaatattataaatttgttcttaaagtgtatttttgataagaaagccgttttgtttttccttctgttaattttttgtttttttcttggtcgagacagagtcttgccatgctgcccaggctggagtgcagtggtgtgatctcggctcactgcagcctccacctcctgggctccagcagtcctcccacctcaacctccctaagagctgagactacaggtgtgagccaccatgcctggctaatttttagagacagggtttcaccctcttgcccaggctggtcccaaactcctgggctcaagcagtcctcctgcctcagcctcccagagtattgggattataggtgtgagccactgccagaaaaacgtttcctaagacaaggcaggtcttacattatatttaaattttttttaatgatgtcttttttggcagtgcacagccagaggacaacacatcacacacaagaaacagttgtgctcatgtgatgggggcctcagcactaggaaggagtggactgttggcgcacgcagcagcttgaataaatctgaaagtcactacgctgcgtaagagaagccaaataaagcgcatgctgtgtacagagggtgtcgagaatgcctcctacgtgacggaaagcagatccgtggttccctgcagactggcaggagcagattccaaaggcacaggaagaagcttgcaggcagctgctcccaaccccagaacctttgctgtcttgggacggatcaccactgcaagaggggaagttgctactgtgatgaattctgccatgtggcaccagactgccacccagaccacagtgtcctctgcaaccctggtaactcacatacaggcccgattccaccgacagcaaagctggatgctatggctggcagaggcaaaccctttgcctgcacttcaggccaaagccgggatgtggcctagatggttcctaaggtccctgacaatcctgagatcttgcatcttgtctatttcaggtcaaaggtgcctacatgctccttctagctttgtttccctgatgttccttgccacctgctactcctctctgagctacttttccaggttccacagggagaggttcagctgtccgtggtagacatgagggtagagagtgaggtggttgggttccacttacctttctatcatcttgcagtatggatgtctcttgactggtaccgtgtagacttttgagggcacacaggagtctgcagagagatactggggacattgagcagcagcagtggggttgggaggcagaaatgaggacaggaacatttaccttgtgtttctctcagcttctcagatgaccaagatggtgctgcagatggtgctgaggatggagaacccaccaagccccgctaggagccacctagactggatgcagagcatggccccagcacccgcagagcagacactgcgatgacaacggacgacacagaagtgcccgctatgactctagcaccgggccacgccgctctggaaactcaaacgctgagcgctgagacctcttctagggcctcaaccccagccggccccattccagaagcagagaccaggggagccaagagaatttcccctgcaagagagaccaggagtttcacaaaaacatctcccaacttcatggtgctgatcgccacctccgtggagacatcagccgccagtggcagccccgagggagctggaatgaccacagttcagaccatcacaggcagtgatcccgaggaagccatctttgacaccctttgcaccgatgacagctctgaagaggcaaagacactcacaatggacatattgacattggctcacacctccacagaagctaagggcctgtcctcagagagcagtgcctcttccgacggcccccatccagtcatcaccccgtcacgggcctcagagagcagcgcctcttccgacggcccccatccagtcatcaccccgtcacgggcctcagagagcagcgcctcttccgacggcccccatccagtcatcaccccgtcacgggcctcagagagcagcgcctcttccgacggcccccatccagtcatcaccccgtcatggtccccgggatctgatgtcactctcctcgctgaagccctggtgactgtcacaaacatcgaggttattaattgcagcatcacagaaatagaaacaacaacttccagcatccctggggcctcagacatagatctcatccccacggaaggggtgaaggcctcgtccacctccgatccaccagctctgcctgactccactgaagcaaaaccacacatcactgaggtcacagcctctgccgagaccctgtccacagccggcaccacagagtcagctgcacctcatgccacggttgggaccccactccccactaacagcgccacagaaagagaagtgacagcacccggggccacgaccctcagtggagctctggtcacagttagcaggaatcccctggaagaaacctcagccctctctgttgagacaccaagttacgtcaaagtctcaggagcagctccggtctccatagaggctgggtcagcagtgggcaaaacaacttcctttgctgggagctctgcttcctcctacagcccctcggaagccgccctcaagaacttcaccccttcagagacaccgaccatggacatcgcaaccaaggggcccttccccaccagcagggaccctcttccttctgtccctccgactacaaccaacagcagccgagggacgaacagcaccttagccaagatcacaacctcagcgaagaccacgatgaagcccccaacagccacgcccacgactgcccggacgaggccgaccacagacgtgagtgcaggtgaaaatggaggtttcctcctcctgcggctgagtgtggcttccccggaagacctcactgaccccagagtggcagaaaggctgatgcagcagctccaccgggaactccacgcccacgcgcctcacttccaggtctccttactgcgtgtcaggagaggctaacggacatcagctgcagccaggcatgtcccgtatgccaaaagagggtgctgcccctagcctgggcccccaccgacagactgcagctgcgttactgtgctgagaggtacccagaaggttcccatgaagggcagcatgtccaagcccctgaccccagatgtggcaacaggaccctcgctcacatccaccggagtgtatgtgtggggaggggcttcacctgttcccagaggtgtccttggactcaccttggcacatgttctgtgtttcagtaaagagagacctgatcacccatctgtgtgcttccatcctgcattaaaattcactcagtgtggcccagaaaaaaaa

SEQ ID NO: 33968 - DNA, 2083 bp, Homo sapiens
gaggaggtttcacagcagaaaggacaccccggggctcctggataagccagaaaatgtgccaggggaagtcgggctccaagggcaccactctgggcttccagctgtgtgggctggaccaagaaggctcagagaaatgatctcaggcttgaagtggggagaagaaactgtattatgaaggcagacgaacagttcctgcaaaggccccagcacccgcagagcagacactgcgatgacaacggacgacacagaagtgcccgctatgactctagcaccgggccacgccgctctggaaactcaaacgctgagcgctgagacctcttctagggcctcaaccccagccggccccattccagaagcagagaccaggggagccaagagaatttcccctgcaagagagaccaggagtttcacaaaaacatctcccaacttcatggtgctgatcgccacctccgtggagacatcagccgccagtggcagccccgagggagctggaatgaccacagttcagaccatcacaggcagtgatcccgaggaagccatctttgacaccctttgcaccgatgacagctctgaagaggcaaagacactcacaatggacatattgacattggctcacacctccacagaagctaagggcctgtcctcagagagcagtgcctcttccgacggcccccatccagtcatcaccccgtcacgggcctcagagagcagcgcctcttccgacggcccccatccagtcatcaccccgtcacgggcctcagagagcagcgcctcttccgacggcccccatccagtcatcaccccgtcatggtccccgggatctgatgtcactctcctcgctgaagccctggtgactgtcacaaacatcgaggttattaattgcagcatcacagaaatagaaacaacaacttccagcatccctggggcctcagacatagatctcatccccacggaaggggtgaaggcctcgtccacctccgatccaccagctctgcctgactccactgaagcaaaaccacacatcactgaggtcacagcctctgccgagaccctgtccacagccggcaccacagagtcagctgcacctcatgccacggttgggaccccactccccactaacagcgccacagaaagagaagtgacagcacccggggccacgaccctcagtggagctctggtcacagttagcaggaatcccctggaagaaacctcagccctctctgttgagacaccaagttacgtcaaagtctcaggagcagctccggtctccatagaggctgggtcagcagtgggcaaaacaacttcctttgctgggagctctgcttcctcctacagcccctcggaagccgccctcaagaacttcaccccttcagagacaccgaccatggacatcgcaaccaaggggcccttccccaccagcagggaccctcttccttctgtccctccgactacaaccaacagcagccgagggacgaacagcaccttagccaagatcacaacctcagcgaagaccacgatgaagcccccaacagccacgcccacgactgcccggacgaggccgaccacagacgtgagtgcaggtgaaaatggaggtttcctcctcctgcggctgagtgtggcttccccggaagacctcactgaccccagagtggcagaaaggctgatgcagcagctccaccgggaactccacgcccacgcgcctcacttccaggtctccttactgcgtgtcaggagaggctaacggacatcagctgcagccaggcatgtcccgtatgccaaaagagggtgctgcccctagcctgggcccccaccgacagactgcagctgcgttactgtgctgagaggtacccagaaggttcccatgaagggcagcatgtccaagcccctgaccccagatgtggcaacaggaccctcgctcacatccaccggagtgtatgtgtggggaggggcttcacctgttcccagaggtgtccttggactcaccttggcacatgttctgtgtttcagtaaagagagacctgatcacccatctgtgtgcttccatcctgcattaaaattcactcagtgtggcccagaaaaaaaa

SEQ ID NO: 33969 - DNA, 2236 bp, Homo sapiens
catatcttcaaatcaaatttcagtggagtgtttaccgggcaaggaaggcaggggggtcagcttgctgacagcctcaacctgccagccctcagcctgcacatttgtgatcacctggtcacacacctgggcaggaggctgcccctccctggtttgaggaagcaggaaaaggtacccgcgagagacagccagcagttctgtggagcagcggtggccggctaggatgggctgtctctggggtctggctctgccccttttcttcttctgctgggaggttggggtctctgggagctctgcaggccccagcacccgcagagcagacactgcgatgacaacggacgacacagaagtgcccgctatgactctagcaccgggccacgccgctctggaaactcaaacgctgagcgctgagacctcttctagggcctcaaccccagccggccccattccagaagcagagaccaggggagccaagagaatttcccctgcaagagagaccaggagtttcacaaaaacatctcccaacttcatggtgctgatcgccacctccgtggagacatcagccgccagtggcagccccgagggagctggaatgaccacagttcagaccatcacaggcagtgatcccgaggaagccatctttgacaccctttgcaccgatgacagctctgaagaggcaaagacactcacaatggacatattgacattggctcacacctccacagaagctaagggcctgtcctcagagagcagtgcctcttccgacggcccccatccagtcatcaccccgtcacgggcctcagagagcagcgcctcttccgacggcccccatccagtcatcaccccgtcacgggcctcagagagcagcgcctcttccgacggcccccatccagtcatcaccccgtcacgggcctcagagagcagcgcctcttccgacggcccccatccagtcatcaccccgtcatggtccccgggatctgatgtcactctcctcgctgaagccctggtgactgtcacaaacatcgaggttattaattgcagcatcacagaaatagaaacaacaacttccagcatccctggggcctcagacatagatctcatccccacggaaggggtgaaggcctcgtccacctccgatccaccagctctgcctgactccactgaagcaaaaccacacatcactgaggtcacagcctctgccgagaccctgtccacagccggcaccacagagtcagctgcacctcatgccacggttgggaccccactccccactaacagcgccacagaaagagaagtgacagcacccggggccacgaccctcagtggagctctggtcacagttagcaggaatcccctggaagaaacctcagccctctctgttgagacaccaagttacgtcaaagtctcaggagcagctccggtctccatagaggctgggtcagcagtgggcaaaacaacttcctttgctgggagctctgcttcctcctacagcccctcggaagccgccctcaagaacttcaccccttcagagacaccgaccatggacatcgcaaccaaggggcccttccccaccagcagggaccctcttccttctgtccctccgactacaaccaacagcagccgagggacgaacagcaccttagccaagatcacaacctcagcgaagaccacgatgaagcccccaacagccacgcccacgactgcccggacgaggccgaccacagacgtgagtgcaggtgaaaatggaggtttcctcctcctgcggctgagtgtggcttccccggaagacctcactgaccccagagtggcagaaaggctgatgcagcagctccaccgggaactccacgcccacgcgcctcacttccaggtctccttactgcgtgtcaggagaggctaacggacatcagctgcagccaggcatgtcccgtatgccaaaagagggtgctgcccctagcctgggcccccaccgacagactgcagctgcgttactgtgctgagaggtacccagaaggttcccatgaagggcagcatgtccaagcccctgaccccagatgtggcaacaggaccctcgctcacatccaccggagtgtatgtgtggggaggggcttcacctgttcccagaggtgtccttggactcaccttggcacatgttctgtgtttcagtaaagagagacctgatcacccatctgtgtgcttccatcctgcattaaaattcactcagtgtggcccagaaaaaaaa

SEQ ID NO: 33970 - DNA, 2898 bp, Homo sapiens
ccaccctcatcccctgtgtaggaccactcctggctcgtgcacaccagagccagaggacaacacatcacacacaagaaacagttgtgctcatgtgatgggggcctcagcactaggaaggagtggactgttggcgcacgcagcagcttgaataaatctgaaagtcactacgctgcgtaagagaagccaaataaagcgcatgctgtgtacagagggtgtcgagaatgcctcctacgtgacggaaagcagatccgtggttccctgcagactggcaggagcagattccaaaggcacaggaagaagcttgcaggcagctgctcccaaccccagaacctttgctgtcttgggacggatcaccactgcaagaggggaagttgctactgtgatgaattctgccatgtggcaccagactgccacccagaccacagtgtcctctgcaaccctggtaactcacatacaggcccgattccaccgacagcaaagctggatgctatggctggcagaggcaaaccctttgcctgcacttcaggccaaagccgggatgtggcctagatggttcctaaggtccctgacaatcctgagatcttgcatcttgtctatttcaggtcaaaggtgcctacatgctccttctagctttgtttccctgatgttccttgccacctgctactcctctctgagctacttttccaggttccacagggagaggttcagctgtccgtggtagacatgagggtagagagtgaggtggttgggttccacttacctttctatcatcttgcagtatggatgtctcttgactggtaccgtgtagacttttgagggcacacaggagtctgcagagagatactggggacattgagcagcagcagtggggttgggaggcagaaatgaggacaggaacatttaccttgtgtttctctcagcttctcagatgaccaagatggtgctgcagatggtgctgaggatggagaacccaccaagccccgctaggagccacctagactggatgcagagcatggccccagcacccgcagagcagacactgcgatgacaacggacgacacagaagtgcccgctatgactctagcaccgggccacgccgctctggaaactcaaacgctgagcgctgagacctcttctagggcctcaaccccagccggccccattccagaagcagagaccaggggagccaagagaatttcccctgcaagagagaccaggagtttcacaaaaacatctcccaacttcatggtgctgatcgccacctccgtggagacatcagccgccagtggcagccccgagggagctggaatgaccacagttcagaccatcacaggcagtgatcccgaggaagccatctttgacaccctttgcaccgatgacagctctgaagaggcaaagacactcacaatggacatattgacattggctcacacctccacagaagctaagggcctgtcctcagagagcagtgcctcttccgacggcccccatccagtcatcaccccgtcacgggcctcagagagcagcgcctcttccgacggcccccatccagtcatcaccccgtcacgggcctcagagagcagcgcctcttccgacggcccccatccagtcatcaccccgtcatggtccccgggatctgatgtcactctcctcgctgaagccctggtgactgtcacaaacatcgaggttattaattgcagcatcacagaaatagaaacaacaacttccagcatccctggggcctcagacatagatctcatccccacggaaggggtgaaggcctcgtccacctccgatccaccagctctgcctgactccactgaagcaaaaccacacatcactgaggtcacagcctctgccgagaccctgtccacagccggcaccacagagtcagctgcacctcatgccacggttgggaccccactccccactaacagcgccacagaaagagaagtgacagcacccggggccacgaccctcagtggagctctggtcacagttagcaggaatcccctggaagaaacctcagccctctctgttgagacaccaagttacgtcaaagtctcaggagcagctccggtctccatagaggctgggtcagcagtgggcaaaacaacttcctttgctgggagctctgcttcctcctacagcccctcggaagccgccctcaagaacttcaccccttcagagacaccgaccatggacatcgcaaccaaggggcccttccccaccagcagggaccctcttccttctgtccctccgactacaaccaacagcagccgagggacgaacagcaccttagccaagatcacaacctcagcgaagaccacgatgaagcccccaacagccacgcccacgactgcccggacgaggccgaccacagacgtgagtgcaggtgaaaatggaggtttcctcctcctgcggctgagtgtggcttccccggaagacctcactgaccccagagtggcagaaaggctgatgcagcagctccaccgggaactccacgcccacgcgcctcacttccaggtctccttactgcgtgtcaggagaggctaacggacatcagctgcagccaggcatgtcccgtatgccaaaagagggtgctgcccctagcctgggcccccaccgacagactgcagctgcgttactgtgctgagaggtacccagaaggttcccatgaagggcagcatgtccaagcccctgaccccagatgtggcaacaggaccctcgctcacatccaccggagtgtatgtgtggggaggggcttcacctgttcccagaggtgtccttggactcaccttggcacatgttctgtgtttcagtaaagagagacctgatcacccatctgtgtgcttccatcctgcattaaaattcactcagtgtggcccagaaaaaaaa

SEQ ID NO: 33971 - DNA, 2179 bp, Homo sapiens
catatcttcaaatcaaatttcagtggagtgtttaccgggcaaggaaggcaggggggtcagcttgctgacagcctcaacctgccagccctcagcctgcacatttgtgatcacctggtcacacacctgggcaggaggctgcccctccctggtttgaggaagcaggaaaaggtacccgcgagagacagccagcagttctgtggagcagcggtggccggctaggatgggctgtctctggggtctggctctgccccttttcttcttctgctgggaggttggggtctctgggagctctgcaggccccagcacccgcagagcagacactgcgatgacaacggacgacacagaagtgcccgctatgactctagcaccgggccacgccgctctggaaactcaaacgctgagcgctgtgatcgtatatatgcccgcaatctggggaaggaaaaatatgttcatacccaaaacgggagccaagagaatttcccctgcaagagagaccaggagtttcacaaaaacatctcccaacttcatggtgctgatcgccacctccgtggagacatcagccgccagtggcagccccgagggagctggaatgaccacagttcagaccatcacaggcagtgatcccgaggaagccatctttgacaccctttgcaccgatgacagctctgaagaggcaaagacactcacaatggacatattgacattggctcacacctccacagaagctaagggcctgtcctcagagagcagtgcctcttccgacggcccccatccagtcatcaccccgtcacgggcctcagagagcagcgcctcttccgacggcccccatccagtcatcaccccgtcacgggcctcagagagcagcgcctcttccgacggcccccatccagtcatcaccccgtcatggtccccgggatctgatgtcactctcctcgctgaagccctggtgactgtcacaaacatcgaggttattaattgcagcatcacagaaatagaaacaacaacttccagcatccctggggcctcagacatagatctcatccccacggaaggggtgaaggcctcgtccacctccgatccaccagctctgcctgactccactgaagcaaaaccacacatcactgaggtcacagcctctgccgagaccctgtccacagccggcaccacagagtcagctgcacctcatgccacggttgggaccccactccccactaacagcgccacagaaagagaagtgacagcacccggggccacgaccctcagtggagctctggtcacagttagcaggaatcccctggaagaaacctcagccctctctgttgagacaccaagttacgtcaaagtctcaggagcagctccggtctccatagaggctgggtcagcagtgggcaaaacaacttcctttgctgggagctctgcttcctcctacagcccctcggaagccgccctcaagaacttcaccccttcagagacaccgaccatggacatcgcaaccaaggggcccttccccaccagcagggaccctcttccttctgtccctccgactacaaccaacagcagccgagggacgaacagcaccttagccaagatcacaacctcagcgaagaccacgatgaagcccccaacagccacgcccacgactgcccggacgaggccgaccacagacgtgagtgcaggtgaaaatggaggtttcctcctcctgcggctgagtgtggcttccccggaagacctcactgaccccagagtggcagaaaggctgatgcagcagctccaccgggaactccacgcccacgcgcctcacttccaggtctccttactgcgtgtcaggagaggctaacggacatcagctgcagccaggcatgtcccgtatgccaaaagagggtgctgcccctagcctgggcccccaccgacagactgcagctgcgttactgtgctgagaggtacccagaaggttcccatgaagggcagcatgtccaagcccctgaccccagatgtggcaacaggaccctcgctcacatccaccggagtgtatgtgtggggaggggcttcacctgttcccagaggtgtccttggactcaccttggcacatgttctgtgtttcagtaaagagagacctgatcacccatctgtgtgcttccatcctgcattaaaattcactcagtgtggcccagaaaaaaaa

SEQ ID NO: 33972 - DNA, 2130 bp, Homo sapiens
catatcttcaaatcaaatttcagtggagtgtttaccgggcaaggaaggcaggggggtcagcttgctgacagcctcaacctgccagccctcagcctgcacatttgtgatcacctggtcacacacctgggcaggaggctgcccctccctggtttgaggaagcaggaaaaggtacccgcgagagacagccagcagttctgtggagcagcggtggccggctaggatgggctgtctctggggtctggctctgccccttttcttcttctgctgggaggttggggtctctgggagctctgcaggccccagcacccgcagagcagacactgcgatgacaacggacgacacagaagtgcccgctatgactctagcaccgggccacgccgctctggaaactcaaacgctgagcgctgagacctcttctagggcctcaaccccagccggccccattccagaagcagagaccaggggagccaagagaatttcccctgcaagagagaccaggagtttcacaaaaacatctcccaacttcatggtgctgatcgccacctccgtggagacatcagccgccagtggcagccccgagggagctggaatgaccacagttcagaccatcacaggcagtgatcccgaggaagccatctttgacaccctttgcaccgatgacagctctgaagaggcaaagacactcacaatggacatattgacattggctcacacctccacagaagctaagggcctgtcctcagagagcagtgcctcttccgacggcccccatccagtcatcaccccgtcacgggcctcagagagcagcgcctcttccgacggcccccatccagtcatcaccccgtcacgggcctcagagagcagcgcctcttccgacggcccccatccagtcatcaccccgtcatggtccccgggatctgatgtcactctcctcgctgaagccctggtgactgtcacaaacatcgaggttattaattgcagcatcacagaaatagaaacaacaacttccagcatccctggggcctcagacatagatctcatccccacggaaggggtgaaggcctcgtccacctccgatccaccagctctgcctgactccactgaagcaaaaccacacatcactgaggtcacagcctctgccgagaccctgtccacagccggcaccacagagtcagctgcacctcatgccacggttgggaccccactccccactaacagcgccacagaaagagaagtgacagcacccggggccacgaccctcagtggagctctggtcacagttagcaggaatcccctggaagaaacctcagccctctctgttgagacaccaagttacgtcaaagtctcaggagcagctccggtctccatagaggctgggtcagcagtgggcaaaacaacttcctttgctgggagctctgcttcctcctacagcccctcggaagccgccctcaagaacttcaccccttcagagacaccgaccatggacatcgcaaccaaggggcccttccccaccagcagggaccctcttccttctgtccctccgactacaaccaacagcagccgagggacgaacagcaccttagccaagatcacaacctcagcgaagaccacgatgaagcccccaacagccacgcccacgactgcccggacgaggccgaccacagacgtgagtgcaggtgaaaatggaggtttcctcctcctgcggctgagtgtggcttccccggaagacctcactgaccccagagtggcagaaaggctgatgcagcaggtgagtgggcactttccgggccaggggagtagaggaaggggcgaggttcgcaggggctgcagggaagacccgcaggacacagaagagcagctaccgcacttggaagggagtctcgtttcttacggagaattgggagctgaatctgaggatctctgcctggctttgcttctgcctgccttctccgagttcttcatttccttctctgcaatgtaaacatgtgactcctagagcccccagtttcttctggtccttggaagcttggccttctggcctctgaggcaaaggtcagtgatactgatgggagggtaggtcggactcttggttgcaagtggcagaaacccaagtcagggcagtttatgcaa

SEQ ID NO: 33973 - DNA, 1184 bp, Homo sapiens
cggcctgatgttgacttcgggctggggcctcagacatagatctcatccccacggaaggggtgaaggcctcgtccacctccgatccaccagctctgcctgactccactgaagcaaaaccacacatcactgaggtcacagcctctgccgagaccctgtccacagccggcaccacagagtcagctgcacctcatgccacggttgggaccccactccccactaacagcgccacagaaagagaagtgacagcacccggggccacgaccctcagtggagctctggtcacagttagcaggaatcccctggaagaaacctcagccctctctgttgagacaccaagttacgtcaaagtctcaggagcagctccggtctccatagaggctgggtcagcagtgggcaaaacaacttcctttgctgggagctctgcttcctcctacagcccctcggaagccgccctcaagaacttcaccccttcagagacaccgaccatggacatcgcaaccaaggggcccttccccaccagcagggaccctcttccttctgtccctccgactacaaccaacagcagccgagggacgaacagcaccttagccaagatcacaacctcagcgaagaccacgatgaagcccccaacagccacgcccacgactgcccggacgaggccgaccacagacgtgagtgcaggtgaaaatggaggtttcctcctcctgcggctgagtgtggcttccccggaagacctcactgaccccagagtggcagaaaggctgatgcagcagctccaccgggaactccacgcccacgcgcctcacttccaggtctccttactgcgtgtcaggagaggctaacggacatcagctgcagccaggcatgtcccgtatgccaaaagagggtgctgcccctagcctgggcccccaccgacagactgcagctgcgttactgtgctgagaggtacccagaaggttcccatgaagggcagcatgtccaagcccctgaccccagatgtggcaacaggaccctcgctcacatccaccggagtgtatgtgtggggaggggcttcacctgttcccagaggtgtccttggactcaccttggcacatgttctgtgtttcagtaaagagagacctgatcacccatctgtgtgcttccatcctgcattaaaattcactcagtgtggcccagaaaaaaaa

SEQ ID NO: 33974 - DNA, 4176 bp, Homo sapiens
gtgttgcctaggctggtctcaaactgctgggcttaagtgatcgttcctccttggcctcccgaagtgctggaattataggtgtgaaccaccatgtctggccttgtagtttatttctaagttcaaattaatgttggtgcttttcctccttttttcttagcagatggtttgctaggtgagtgtgtcctcgattctttaaatcaggggtccccaatccccaggccacagattgttccagtccatggcctgttaggaaccaggccacacagtaggaggtgagcagccagccagtgagcattactgtgtgagctccgccccctgccagagcattactgtgtgagctccgccccctgtcagagcattactgtgtgagctccgccccctgccagagattactgtgtgagctccgccccctgccagagcattactgtgtgagctccgccccctgtcattactgtgtgagctccgccccctgtcatatcattactgtgtgagctccgccccctgtcatatcattattgtgagctccgcccctgtcatatcattgctgtgtgagctccgcctcctgtcagatcagtggtggcattagattctcataggagtggaatcctgttgtgaactgcgcatgagaaggatctaggttatgccccgcttatgagaatctaatactgatgatctgagatggaaccgtttcatctccaaaccatccccacacttgtcagtggaaaaagtgtcttccgtgaaaccagtccctggtgccaaaaaggttagggactgccggtttaaataaccaaatgctaaaagaactggcatagaagtaaatgggctgctgctttatttttaggctgttctttttagagagcaatgacagttatttccaagtttgtcattagaaaataatattaggttggagcaaaagtaattgcagtttttgccattgctttcaatggtaaaaggcacaattacttttgcagcaacttaatattataaatttgttcttaaagtgtatttttgataagaaagccgttttgtttttccttctgttaattttttgtttttttcttggtcgagacagagtcttgccatgctgcccaggctggagtgcagtggtgtgatctcggctcactgcagcctccacctcctgggctccagcagtcctcccacctcaacctccctaagagctgagactacaggtgtgagccaccatgcctggctaatttttagagacagggtttcaccctcttgcccaggctggtcccaaactcctgggctcaagcagtcctcctgcctcagcctcccagagtattgggattataggtgtgagccactgccagaaaaacgtttcctaagacaaggcaggtcttacattatatttaaattttttttaatgatgtcttttttggcagtgcacagccagaggacaacacatcacacacaagaaacagttgtgctcatgtgatgggggcctcagcactaggaaggagtggactgttggcgcacgcagcagcttgaataaatctgaaagtcactacgctgcgtaagagaagccaaataaagcgcatgctgtgtacagagggtgtcgagaatgcctcctacgtgacggaaagcagatccgtggttccctgcagactggcaggagcagattccaaaggcacaggaagaagcttgcaggcagctgctcccaaccccagaacctttgctgtcttgggacggatcaccactgcaagaggggaagttgctactgtgatgaattctgccatgtggcaccagactgccacccagaccacagtgtcctctgcaaccctggtaactcacatacaggcccgattccaccgacagcaaagctggatgctatggctggcagaggcaaaccctttgcctgcacttcaggccaaagccgggatgtggcctagatggttcctaaggtccctgacaatcctgagatcttgcatcttgtctatttcaggtcaaaggtgcctacatgctccttctagctttgtttccctgatgttccttgccacctgctactcctctctgagctacttttccaggttccacagggagaggttcagctgtccgtggtagacatgagggtagagagtgaggtggttgggttccacttacctttctatcatcttgcagtatggatgtctcttgactggtaccgtgtagacttttgagggcacacaggagtctgcagagagatactggggacattgagcagcagcagtggggttgggaggcagaaatgaggacaggaacatttaccttgtgtttctctcagcttctcagatgaccaagatggtgctgcagatggtgctgaggatggagaacccaccaagccccgctaggagccacctagactggatgcagagcatggtgagctccctgcaggttctctgagaaggggtggatggcagcctgctccttgcctttgtgccctccaggccccaaagtcagggaaccaaaagaagaaaggggccgtagctagggcagagctccactgcaatgattgttttaggggtaggagccaggattgccgtctgtggacactgaaatttgaatctcatatacttttgtgacaaaacattcttcctcttttgttcttctcctaccatctaaaaatgtagaaaacattcttagcctatgagttgcacaaaaacaggcagtggccagatttggcccatagaccatagtttgctgacttctgccctaaatcatcctccatttctttccttctgtgtccttgttactgacaaagccactttccctaaaatggggtctttccctgtttggtgccatgaagccaatatgcaaaaccgaaagtgagcctcaagcagtgcaggctttatttggtggccatggaattgagaagtgagagcttggctcacaaatcaacttttctgctcgtgagacccaggaagtcacagatacagggcatctttagtgaaggggctgagcattaaaagcaaggggaggagtggccaggtgcaatggctcactcccataaacccagaactttgggaggccaaaatgagaggattgctgagaccaggagttcgagaccatcctggtcaacatagtgatacacccccatctctacaaaaataaaaatgaaaaaagcaaggggaggaatcatgtgttttctgggtctgggtggagaaattttcaaaaccagagtgccaccttcctatttgtttttttatgttattttttcccatcattgtcatgttggttgttgactgttacggtgttagtgggactgtcatttaacatggaaattagattataatgaagttagaggtcaaatgagctgccatcttggattccatcagtcttagctggtttgatcaccagggagaagtttggacctcaggcatcctgcttcctaaagataaacagtgttaaggcagggtagatattcacggaggtcatgtgggtattgcactggatgacatcttggcttcagccctgatctgttcagagccctcagcacggtactggaggagaggccttgggccgcatcgtggcatattgtggctttggggagaaagaaaagcagatagtgcaatggaacgagcgtggacttgagagtcagacttgccttcaactcctagctctaccacttaccacctaggtgcccttaagccactttctcagcctttctgagactctgtatcctcatgtgtatcctagagtttgtctgatagggctatagtgagaattaattgaattaagtgtagtgagaattaagccaggtctggagaggcctggctactggtgagtgaggtaactgagatcaggtatggagaggactggctcctgatgagtgagttaattgagatgaggtatggagggacctgtctcctggtgactgagttaattgaaatgaggtgtggagggacctggctcctggtgagtgagttaattgagatccattatggagggacctggctcctggcgagtgagttaattgagacccggtatggagggacttggctcctggtgagtgagttaattgagatgcggtgtggagggacctggctcctggtgagtgagtgaattgagatgaggtatggagggacctggctcctggtgagtgagtgaattgagatgaggtttggagggacctggctcctggtgagtgagttaattgagatgaggtatggagggacctgg

SEQ ID NO: 33975 - DNA, 4928 bp, Homo sapiens
gtgttgcctaggctggtctcaaactgctgggcttaagtgatcgttcctccttggcctcccgaagtgctggaattataggtgtgaaccaccatgtctggccttgtagtttatttctaagttcaaattaatgttggtgcttttcctccttttttcttagcagatggtttgctaggtgagtgtgtcctcgattctttaaatcaggggtccccaatccccaggccacagattgttccagtccatggcctgttaggaaccaggccacacagtaggaggtgagcagccagccagtgagcattactgtgtgagctccgccccctgccagagcattactgtgtgagctccgccccctgtcagagcattactgtgtgagctccgccccctgccagagattactgtgtgagctccgccccctgccagagcattactgtgtgagctccgccccctgtcattactgtgtgagctccgccccctgtcatatcattactgtgtgagctccgccccctgtcatatcattattgtgagctccgcccctgtcatatcattgctgtgtgagctccgcctcctgtcagatcagtggtggcattagattctcataggagtggaatcctgttgtgaactgcgcatgagaaggatctaggttatgccccgcttatgagaatctaatactgatgatctgagatggaaccgtttcatctccaaaccatccccacacttgtcagtggaaaaagtgtcttccgtgaaaccagtccctggtgccaaaaaggttagggactgccggtttaaataaccaaatgctaaaagaactggcatagaagtaaatgggctgctgctttatttttaggctgttctttttagagagcaatgacagttatttccaagtttgtcattagaaaataatattaggttggagcaaaagtaattgcagtttttgccattgctttcaatggtaaaaggcacaattacttttgcagcaacttaatattataaatttgttcttaaagtgtatttttgataagaaagccgttttgtttttccttctgttaattttttgtttttttcttggtcgagacagagtcttgccatgctgcccaggctggagtgcagtggtgtgatctcggctcactgcagcctccacctcctgggctccagcagtcctcccacctcaacctccctaagagctgagactacaggtgtgagccaccatgcctggctaatttttagagacagggtttcaccctcttgcccaggctggtcccaaactcctgggctcaagcagtcctcctgcctcagcctcccagagtattgggattataggtgtgagccactgccagaaaaacgtttcctaagacaaggcaggtcttacattatatttaaattttttttaatgatgtcttttttggcagtgcacagccagaggacaacacatcacacacaagaaacagttgtgctcatgtgatgggggcctcagcactaggaaggagtggactgttggcgcacgcagcagcttgaataaatctgaaagtcactacgctgcgtaagagaagccaaataaagcgcatgctgtgtacagagggtgtcgagaatgcctcctacgtgacggaaagcagatccgtggttccctgcagactggcaggagcagattccaaaggcacaggaagaagcttgcaggcagctgctcccaaccccagaacctttgctgtcttgggacggatcaccactgcaagaggggaagttgctactgtgatgaattctgccatgtggcaccagactgccacccagaccacagtgtcctctgcaaccctggtaactcacatacaggcccgattccaccgacagcaaagctggatgctatggctggcagaggcaaaccctttgcctgcacttcaggccaaagccgggatgtggcctagatggttcctaaggtccctgacaatcctgagatcttgcatcttgtctatttcaggtcaaaggtgcctacatgctccttctagctttgtttccctgatgttccttgccacctgctactcctctctgagctacttttccaggttccacagggagaggttcagctgtccgtggtagacatgagggtagagagtgaggtggttgggttccacttacctttctatcatcttgcagtatggatgtctcttgactggtaccgtgtagacttttgagggcacacaggagtctgcagagagatactggggacattgagcagcagcagtggggttgggaggcagaaatgaggacaggaacatttaccttgtgtttctctcagcttctcagatgaccaagatggtgctgcagatggtgctgaggatggagaacccaccaagccccgctaggagccacctagactggatgcagagcatggtgagctccctgcaggttctctgagaaggggtggatggcagcctgctccttgcctttgtgccctccaggccccaaagtcagggaaccaaaagaagaaaggggccgtagctagggcagagctccactgcaatgattgttttaggggtaggagccaggattgccgtctgtggacactgaaatttgaatctcatatacttttgtgacaaaacattcttcctcttttgttcttctcctaccatctaaaaatgtagaaaacattcttagcctatgagttgcacaaaaacaggcagtggccagatttggcccatagaccatagtttgctgacttctgccctaaatcatcctccatttctttccttctgtgtccttgttactgacaaagccactttccctaaaatggggtctttccctgtttggtgccatgaagccaatatgcaaaaccgaaagtgagcctcaagcagtgcaggctttatttggtggccatggaattgagaagtgagagcttggctcacaaatcaacttttctgctcgtgagacccaggaagtcacagatacagggcatctttagtgaaggggctgagcattaaaagcaaggggaggagtggccaggtgcaatggctcactcccataaacccagaactttgggaggccaaaatgagaggattgctgagaccaggagttcgagaccatcctggtcaacatagtgatacacccccatctctacaaaaataaaaatgaaaaaagcaaggggaggaatcatgtgttttctgggtctgggtggagaaattttcaaaaccagagtgccaccttcctatttgtttttttatgttattttttcccatcattgtcatgttggttgttgactgttacggtgttagtgggactgtcatttaacatggaaattagattataatgaagttagaggtcaaatgagctgccatcttggattccatcagtcttagctggtttgatcaccagggagaagtttggacctcaggcatcctgcttcctaaagataaacagtgttaaggcagggtagatattcacggaggtcatgtgggtattgcactggatgacatcttggcttcagccctgatctgttcagagccctcagcacggtactggaggagaggccttgggccgcatcgtggcatattgtggctttggggagaaagaaaagcagatagtgcaatggaacgagcgtggacttgagagtcagatgaattgagatcaggtatggagggacttggctcctggtgagtgagttaattgagatgaggtgtggagggacctgtctcctggtgagtgagttaattgagatgaggtatggagggacctgtctcctggtgagtgagtgaattgagatcaggtatggagggacttggctcctggtgagtgagttaattgagactcggtgtggagggacctggctcctggtgagtgagttaattgagatgaggtatggagggacctggctcctggtgagtgagttaattgagatgaggtatggagggacctggctcctggtgagtgagttaattgagatgaggtatggagggacctggctcctggtgagtgagtgaattgagatcaggtatggagggacttggctcctggtgagtgagttaattgagactctgtatggagggacctggctcctggtgagtctcctggaggcagctgctatctgggaacacaggcacaggtgggaacagaccttcacttcctgctcacttaggttcagcgagttctccaaaccagcctcccaggaatgccattcaccatggctgtgaggagaataaagaagagagcctgactcctctcctgaggccccttccccaccctgagccagcaggatccacggagcagaggtcatctgtccccagcttggcccactgaggccagcatggctgggcccaggatgcttgtctctcagctcccatcctgtgtacttccacattggtttaaccagaggaaaaccgaaatctacaattgtcataaacacatttaaatgtgcgtagaatcagccatacaaattgtgaaacataaaacatttggctcatggtattattcactgttttgtggtggttacagtgactatagcaaacatttcttgaaagtagaaaataagaacccagcaccccttgagctaagtaatgtgccctctgtcctcaatattccttcctgggctccacattactgcccttaagtctggaaatattctggtctgagccccgtagtccaggcctcatgttcaggctttctgtccccagtgatgagaggagagacggcagacctttctccggtgagctcagatgggcctcccggagtctcctggggtgcacaggatttcaaagatccaggaggcgctgccaggggctgtgaggtctgatgaacctctcaccttccctcccacacctgcccttttcctgtttctgtggatgcttttgctgtccttggcttcctggactccagacctcagggtcatcttttgcttctctctgcaaggtgccaagtctctctaggtttttgtttgtttgttttgttattga

SEQ ID NO: 33976 - DNA, 4021 bp, Homo sapiens
gtgttgcctaggctggtctcaaactgctgggcttaagtgatcgttcctccttggcctcccgaagtgctggaattataggtgtgaaccaccatgtctggccttgtagtttatttctaagttcaaattaatgttggtgcttttcctccttttttcttagcagatggtttgctaggtgagtgtgtcctcgattctttaaatcaggggtccccaatccccaggccacagattgttccagtccatggcctgttaggaaccaggccacacagtaggaggtgagcagccagccagtgagcattactgtgtgagctccgccccctgccagagcattactgtgtgagctccgccccctgtcagagcattactgtgtgagctccgccccctgccagagattactgtgtgagctccgccccctgccagagcattactgtgtgagctccgccccctgtcattactgtgtgagctccgccccctgtcatatcattactgtgtgagctccgccccctgtcatatcattattgtgagctccgcccctgtcatatcattgctgtgtgagctccgcctcctgtcagatcagtggtggcattagattctcataggagtggaatcctgttgtgaactgcgcatgagaaggatctaggttatgccccgcttatgagaatctaatactgatgatctgagatggaaccgtttcatctccaaaccatccccacacttgtcagtggaaaaagtgtcttccgtgaaaccagtccctggtgccaaaaaggttagggactgccggtttaaataaccaaatgctaaaagaactggcatagaagtaaatgggctgctgctttatttttaggctgttctttttagagagcaatgacagttatttccaagtttgtcattagaaaataatattaggttggagcaaaagtaattgcagtttttgccattgctttcaatggtaaaaggcacaattacttttgcagcaacttaatattataaatttgttcttaaagtgtatttttgataagaaagccgttttgtttttccttctgttaattttttgtttttttcttggtcgagacagagtcttgccatgctgcccaggctggagtgcagtggtgtgatctcggctcactgcagcctccacctcctgggctccagcagtcctcccacctcaacctccctaagagctgagactacaggtgtgagccaccatgcctggctaatttttagagacagggtttcaccctcttgcccaggctggtcccaaactcctgggctcaagcagtcctcctgcctcagcctcccagagtattgggattataggtgtgagccactgccagaaaaacgtttcctaagacaaggcaggtcttacattatatttaaattttttttaatgatgtcttttttggcagtgcacagccagaggacaacacatcacacacaagaaacagttgtgctcatgtgatgggggcctcagcactaggaaggagtggactgttggcgcacgcagcagcttgaataaatctgaaagtcactacgctgcgtaagagaagccaaataaagcgcatgctgtgtacagagggtgtcgagaatgcctcctacgtgacggaaagcagatccgtggttccctgcagactggcaggagcagattccaaaggcacaggaagaagcttgcaggcagctgctcccaaccccagaacctttgctgtcttgggacggatcaccactgcaagaggggaagttgctactgtgatgaattctgccatgtggcaccagactgccacccagaccacagtgtcctctgcaaccctggtaactcacatacaggcccgattccaccgacagcaaagctggatgctatggctggcagaggcaaaccctttgcctgcacttcaggccaaagccgggatgtggcctagatggttcctaaggtccctgacaatcctgagatcttgcatcttgtctatttcaggtcaaaggtgcctacatgctccttctagctttgtttccctgatgttccttgccacctgctactcctctctgagctacttttccaggttccacagggagaggttcagctgtccgtggtagacatgagggtagagagtgaggtggttgggttccacttacctttctatcatcttgcagtatggatgtctcttgactggtaccgtgtagacttttgagggcacacaggagtctgcagagagatactggggacattgagcagcagcagtggggttgggaggcagaaatgaggacaggaacatttaccttgtgtttctctcagcttctcagatgaccaagatggtgctgcagatggtgctgaggatggagaacccaccaagccccgctaggagccacctagactggatgcagagcatggtgagctccctgcaggttctctgagaaggggtggatggcagcctgctccttgcctttgtgccctccaggccccaaagtcagggaaccaaaagaagaaaggggccgtagctagggcagagctccactgcaatgattgttttaggggtaggagccaggattgccgtctgtggacactgaaatttgaatctcatatacttttgtgacaaaacattcttcctcttttgttcttctcctaccatctaaaaatgtagaaaacattcttagcctatgagttgcacaaaaacaggcagtggccagatttggcccatagaccatagtttgctgacttctgccctaaatcatcctccatttctttccttctgtgtccttgttactgacaaagccactttccctaaaatggggtctttccctgtttggtgccatgaagccaatatgcaaaaccgaaagtgagcctcaagcagtgcaggctttatttggtggccatggaattgagaagtgagagcttggctcacaaatcaacttttctgctcgtgagacccaggaagtcacagatacagggcatctttagtgaaggggctgagcattaaaagcaaggggaggagtggccaggtgcaatggctcactcccataaacccagaactttgggaggccaaaatgagaggattgctgagaccaggagttcgagaccatcctggtcaacatagtgatacacccccatctctacaaaaataaaaatgaaaaaagcaaggggaggaatcatgtgttttctgggtctgggtggagaaattttcaaaaccagagtgccaccttcctatttgtttttttatgttattttttcccatcattgtcatgttggttgttgactgttacggtgttagtgggactgtcatttaacatggaaattagattataatgaagttagaggtcaaatgagctgccatcttggattccatcagtcttagctggtttgatcaccagggagaagtttggacctcaggcatcctgcttcctaaagataaacagtgttaaggcagggtagatattcacggaggtcatgtgggtattgcactggatgacatcttggcttcagccctgatctgttcagagccctcagcacggtactggaggagaggccttgggccgcatcgtggcatattgtggctttggggagaaagaaaagcagatagtgcaatggaacgagcgtggacttgagagtcagacttgccttcaactcctagctctaccacttaccacctaggtgcccttaagccactttctcagcctttctgagactctgtatcctcatgtgtatcctagagtttgtctgatagggctatagtgagaattaattgaattaagtgtagtgagaattaagccaggtctggagaggcctggctactggtgagtgaggtaactgagatcaggtatggagaggactggctcctgatgagtgagttaattgagatgaggtatggagggacctgtctcctggtgactgagttaattgaaatgaggtgtggagggacctggctcctggtgagtgagttaattgagatccattatggagggacctggctcctggcgagtgagttaattgagacccggtatggagggacccttggctaaggaccttgggtcacgcccc

SEQ ID NO: 33977 - DNA, 3863 bp, Homo sapiens
gtgttgcctaggctggtctcaaactgctgggcttaagtgatcgttcctccttggcctcccgaagtgctggaattataggtgtgaaccaccatgtctggccttgtagtttatttctaagttcaaattaatgttggtgcttttcctccttttttcttagcagatggtttgctaggtgagtgtgtcctcgattctttaaatcaggggtccccaatccccaggccacagattgttccagtccatggcctgttaggaaccaggccacacagtaggaggtgagcagccagccagtgagcattactgtgtgagctccgccccctgccagagcattactgtgtgagctccgccccctgtcagagcattactgtgtgagctccgccccctgccagagattactgtgtgagctccgccccctgccagagcattactgtgtgagctccgccccctgtcattactgtgtgagctccgccccctgtcatatcattactgtgtgagctccgccccctgtcatatcattattgtgagctccgcccctgtcatatcattgctgtgtgagctccgcctcctgtcagatcagtggtggcattagattctcataggagtggaatcctgttgtgaactgcgcatgagaaggatctaggttatgccccgcttatgagaatctaatactgatgatctgagatggaaccgtttcatctccaaaccatccccacacttgtcagtggaaaaagtgtcttccgtgaaaccagtccctggtgccaaaaaggttagggactgccggtttaaataaccaaatgctaaaagaactggcatagaagtaaatgggctgctgctttatttttaggctgttctttttagagagcaatgacagttatttccaagtttgtcattagaaaataatattaggttggagcaaaagtaattgcagtttttgccattgctttcaatggtaaaaggcacaattacttttgcagcaacttaatattataaatttgttcttaaagtgtatttttgataagaaagccgttttgtttttccttctgttaattttttgtttttttcttggtcgagacagagtcttgccatgctgcccaggctggagtgcagtggtgtgatctcggctcactgcagcctccacctcctgggctccagcagtcctcccacctcaacctccctaagagctgagactacaggtgtgagccaccatgcctggctaatttttagagacagggtttcaccctcttgcccaggctggtcccaaactcctgggctcaagcagtcctcctgcctcagcctcccagagtattgggattataggtgtgagccactgccagaaaaacgtttcctaagacaaggcaggtcttacattatatttaaattttttttaatgatgtcttttttggcagtgcacagccagaggacaacacatcacacacaagaaacagttgtgctcatgtgatgggggcctcagcactaggaaggagtggactgttggcgcacgcagcagcttgaataaatctgaaagtcactacgctgcgtaagagaagccaaataaagcgcatgctgtgtacagagggtgtcgagaatgcctcctacgtgacggaaagcagatccgtggttccctgcagactggcaggagcagattccaaaggcacaggaagaagcttgcaggcagctgctcccaaccccagaacctttgctgtcttgggacggatcaccactgcaagaggggaagttgctactgtgatgaattctgccatgtggcaccagactgccacccagaccacagtgtcctctgcaaccctggtaactcacatacaggcccgattccaccgacagcaaagctggatgctatggctggcagaggcaaaccctttgcctgcacttcaggccaaagccgggatgtggcctagatggttcctaaggtccctgacaatcctgagatcttgcatcttgtctatttcaggtcaaaggtgcctacatgctccttctagctttgtttccctgatgttccttgccacctgctactcctctctgagctacttttccaggttccacagggagaggttcagctgtccgtggtagacatgagggtagagagtgaggtggttgggttccacttacctttctatcatcttgcagtatggatgtctcttgactggtaccgtgtagacttttgagggcacacaggagtctgcagagagatactggggacattgagcagcagcagtggggttgggaggcagaaatgaggacaggaacatttaccttgtgtttctctcagcttctcagatgaccaagatggtgctgcagatggtgctgaggatggagaacccaccaagccccgctaggagccacctagactggatgcagagcatggtgagctccctgcaggttctctgagaaggggtggatggcagcctgctccttgcctttgtgccctccaggccccaaagtcagggaaccaaaagaagaaaggggccgtagctagggcagagctccactgcaatgattgttttaggggtaggagccaggattgccgtctgtggacactgaaatttgaatctcatatacttttgtgacaaaacattcttcctcttttgttcttctcctaccatctaaaaatgtagaaaacattcttagcctatgagttgcacaaaaacaggcagtggccagatttggcccatagaccatagtttgctgacttctgccctaaatcatcctccatttctttccttctgtgtccttgttactgacaaagccactttccctaaaatggggtctttccctgtttggtgccatgaagccaatatgcaaaaccgaaagtgagcctcaagcagtgcaggctttatttggtggccatggaattgagaagtgagagcttggctcacaaatcaacttttctgctcgtgagacccaggaagtcacagatacagggcatctttagtgaaggggctgagcattaaaagcaaggggaggagtggccaggtgcaatggctcactcccataaacccagaactttgggaggccaaaatgagaggattgctgagaccaggagttcgagaccatcctggtcaacatagtgatacacccccatctctacaaaaataaaaatgaaaaaagcaaggggaggaatcatgtgttttctgggtctgggtggagaaattttcaaaaccagagtgccaccttcctatttgtttttttatgttattttttcccatcattgtcatgttggttgttgactgttacggtgttagtgggactgtcatttaacatggaaattagattataatgaagttagaggtcaaatgagctgccatcttggattccatcagtcttagctggtttgatcaccagggagaagtttggacctcaggcatcctgcttcctaaagataaacagtgttaaggcagggtagatattcacggaggtcatgtgggtattgcactggatgacatcttggcttcagccctgatctgttcagagccctcagcacggtactggaggagaggccttgggccgcatcgtggcatattgtggctttggggagaaagaaaagcagatagtgcaatggaacgagcgtggacttgagagtcagatgaattgagatcaggtatggagggacttggctcctggtgagtgagttaattgagatgaggtgtggagggacctgtctcctggtgagtgagaccctgtctctaaaagaagaaaaagaccacctgggcatgggtctggaacccaccctagtggatcccagattccccacagagtctgtctaccccccttggtggcagttcttgagccaaacgagttactgctagaaattgaagggtttcctttgtgataaagtttttaagtatccatta

SEQ ID NO: 33978 - DNA, 1462 bp, Homo sapiens
catatcttcaaatcaaatttcagtggagtgtttaccgggcaaggaaggcaggggggtcagcttgctgacagcctcaacctgccagccctcagcctgcacatttgtgatcacctggtcacacacctgggcaggaggctgcccctccctggtttgaggaagcaggaaaaggtacccgcgagagacagccagcagttctgtggagcagcggtggccggctaggatgggctgtctctggggtctggctctgccccttttcttcttctgctgggaggttggggtctctgggagctctgcaggccccagcacccgcagagcagacactgcgatgacaacggacgacacagaagtgcccgctatgactctagcaccgggccacgccgctctggaaactcaaacgctgagcgctgagacctcttctagggcctcaaccccagccggccccattccagaagcagagaccaggggagccaagagaatttcccctgcaagagagaccaggagtttcacaaaaacatctcccaacttcatggtgctgatcgccacctccgtggagacatcagccgccagtggcagccccgagggagctggaatgaccacagttcagaccatcacaggcagtgatcccgaggaagccatctttgacaccctttgcaccgatgacagctctgaagaggcaaagacactcacaatggacatattgacattggctcacacctccacagaagctaagggcctgtcctcagagagcagtgcctcttccgacggcccccatccagtcatcaccccgtcacgggcctcagagagcagcgcctcttccgacggcccccatccagtcatcaccccgtcacgggcctcagagagcagcgcctcttccgacggcccccatccagtcatcaccccgtcatggtccccgggatctgatgtcactctcctcgctgaagccctggtgactgtcacaaacatcgaggttattaattgcagcatcacagaaatagaaacaacaacttccagcatccctggggcctcagacatagatctcatccccacggaaggggtgaaggcctcgtccacctccgatccaccagctctgcctgactccactgaagcaaaaccacacatcactgaggtcacagcctctgccgagaccctgtccacagccggcaccacagagtcagctgcacctcatgccacggttgggaccccactccccactaacagcgccacagaaagagaagtgacagcacccggggccacgaccctcagtggagctctggtcacagttagcaggaatcccctggaagaaacctcagccctctctgttgagacaccaagttacgtcaaagtctcaggagcagctccggtctccatagaggctgggtcagcagtgggcaaaacaacttcctttgctgggagctctgcttcctcctacagccccccgaaggtcaaaatcagggccgagtat

SEQ ID NO: 33979 - DNA, 904 bp, Homo sapiens
aacttggtgatagttgttcctagagtatcactcagccctctctgttgagacaccaagttacgtcaaagtctcaggagcagctccggtctccatagaggctgggtcagcagtgggcaaaacaacttcctttgctgggagctctgcttcctcctacagcccctcggaagccgccctcaagaacttcaccccttcagagacaccgaccatggacatcgcaaccaaggggcccttccccaccagcagggaccctcttccttctgtccctccgactacaaccaacagcagccgagggacgaacagcaccttagccaagatcacaacctcagcgaagaccacgatgaagcccccaacagccacgcccacgactgcccggacgaggccgaccacagacgtgagtgcaggtgaaaatggaggtttcctcctcctgcggctgagtgtggcttccccggaagacctcactgaccccagagtggcagaaaggctgatgcagcagctccaccgggaactccacgcccacgcgcctcacttccaggtctccttactgcgtgtcaggagaggctaacggacatcagctgcagccaggcatgtcccgtatgccaaaagagggtgctgcccctagcctgggcccccaccgacagactgcagctgcgttactgtgctgagaggtacccagaaggttcccatgaagggcagcatgtccaagcccctgaccccagatgtggcaacaggaccctcgctcacatccaccggagtgtatgtgtggggaggggcttcacctgttcccagaggtgtccttggactcaccttggcacatgttctgtgtttcagtaaagagagacctgatcacccatctgtgtgcttccatcctgcattaaaattcactcagtgtggcccagaaaaaaaa

SEQ ID NO: 33980 - DNA, 3190 bp, Homo sapiens
gtgttgcctaggctggtctcaaactgctgggcttaagtgatcgttcctccttggcctcccgaagtgctggaattataggtgtgaaccaccatgtctggccttgtagtttatttctaagttcaaattaatgttggtgcttttcctccttttttcttagcagatggtttgctaggtgagtgtgtcctcgattctttaaatcaggggtccccaatccccaggccacagattgttccagtccatggcctgttaggaaccaggccacacagtaggaggtgagcagccagccagtgagcattactgtgtgagctccgccccctgccagagcattactgtgtgagctccgccccctgtcagagcattactgtgtgagctccgccccctgccagagattactgtgtgagctccgccccctgccagagcattactgtgtgagctccgccccctgtcattactgtgtgagctccgccccctgtcatatcattactgtgtgagctccgccccctgtcatatcattattgtgagctccgcccctgtcatatcattgctgtgtgagctccgcctcctgtcagatcagtggtggcattagattctcataggagtggaatcctgttgtgaactgcgcatgagaaggatctaggttatgccccgcttatgagaatctaatactgatgatctgagatggaaccgtttcatctccaaaccatccccacacttgtcagtggaaaaagtgtcttccgtgaaaccagtccctggtgccaaaaaggttagggactgccggtttaaataaccaaatgctaaaagaactggcatagaagtaaatgggctgctgctttatttttaggctgttctttttagagagcaatgacagttatttccaagtttgtcattagaaaataatattaggttggagcaaaagtaattgcagtttttgccattgctttcaatggtaaaaggcacaattacttttgcagcaacttaatattataaatttgttcttaaagtgtatttttgataagaaagccgttttgtttttccttctgttaattttttgtttttttcttggtcgagacagagtcttgccatgctgcccaggctggagtgcagtggtgtgatctcggctcactgcagcctccacctcctgggctccagcagtcctcccacctcaacctccctaagagctgagactacaggtgtgagccaccatgcctggctaatttttagagacagggtttcaccctcttgcccaggctggtcccaaactcctgggctcaagcagtcctcctgcctcagcctcccagagtattgggattataggtgtgagccactgccagaaaaacgtttcctaagacaaggcaggtcttacattatatttaaattttttttaatgatgtcttttttggcagtgcacagccagaggacaacacatcacacacaagaaacagttgtgctcatgtgatgggggcctcagcactaggaaggagtggactgttggcgcacgcagcagcttgaataaatctgaaagtcactacgctgcgtaagagaagccaaataaagcgcatgctgtgtacagagggtgtcgagaatgcctcctacgtgacggaaagcagatccgtggttccctgcagactggcaggagcagattccaaaggcacaggaagaagcttgcaggcagctgctcccaaccccagaacctttgctgtcttgggacggatcaccactgcaagaggggaagttgctactgtgatgaattctgccatgtggcaccagactgccacccagaccacagtgtcctctgcaaccctggtaactcacatacaggcccgattccaccgacagcaaagctggatgctatggctggcagaggcaaaccctttgcctgcacttcaggccaaagccgggatgtggcctagatggttcctaaggtccctgacaatcctgagatcttgcatcttgtctatttcaggtcaaaggtgcctacatgctccttctagctttgtttccctgatgttccttgccacctgctactcctctctgagctacttttccaggttccacagggagaggttcagctgtccgtggtagacatgagggtagagagtgaggtggttgggttccacttacctttctatcatcttgcagtatggatgtctcttgactggtaccgtgtagacttttgagggcacacaggagtctgcagagagatactggggacattgagcagcagcagtggggttgggaggcagaaatgaggacaggaacatttaccttgtgtttctctcagcttctcagatgaccaagatggtgctgcagatggtgctgaggatggagaacccaccaagccccgctaggagccacctagactggatgcagagcatggttcagcgagttctccaaaccagcctcccaggaatgccattcaccatggctgtgaggagaataaagaagagagcctgactcctctcctgaggccccttccccaccctgagccagcaggatccacggagcagaggtcatctgtccccagcttggcccactgaggccagcatggctgggcccaggatgcttgtctctcagctcccatcctgtgtacttccacattggtttaaccagaggaaaaccgaaatctacaattgtcataaacacatttaaatgtgcgtagaatcagccatacaaattgtgaaacataaaacatttggctcatggtattattcactgttttgtggtggttacagtgactatagcaaacatttcttgaaagtagaaaataagaacccagcaccccttgagctaagtaatgtgccctctgtcctcaatattccttcctgggctccacattactgcccttaagtctggaaatattctggtctgagccccgtagtccaggcctcatgttcaggctttctgtccccagtgatgagaggagagacggcagacctttctccggtgagctcagatgggcctcccggagtctcctggggtgcacaggatttcaaagatccaggaggcgctgccaggggctgtgaggtctgatgaacctctcaccttccctcccacacctgcccttttcctgtttctgtggatgcttttgctgtccttggcttcctggactccagacctcagggtcatcttttgcttctctctgcaaggtgccaagtctctctaggtttttgtttgtttgttttgttattga

SEQ ID NO: 33981 - DNA, 930 bp, Homo sapiens
ctgctccgcccctctctggtgcagtgaagggcgttcggcctccccggctctctgcaggtgcccaccagagtttaagccaaacaacccaggttccgcagctgccaagggctcctttgccaacctgggaatgctcggatccttgtagtaaattcctttgctgggagctctgcttcctcctacagcccctcggaagccgccctcaagaacttcaccccttcagagacaccgaccatggacatcgcaaccaaggggcccttccccaccagcagggaccctcttccttctgtccctccgactacaaccaacagcagccgagggacgaacagcaccttagccaagatcacaacctcagcgaagaccacgatgaagcccccaacagccacgcccacgactgcccggacgaggccgaccacagacgtgagtgcaggtgaaaatggaggtttcctcctcctgcggctgagtgtggcttccccggaagacctcactgaccccagagtggcagaaaggctgatgcagcagctccaccgggaactccacgcccacgcgcctcacttccaggtctccttactgcgtgtcaggagaggctaacggacatcagctgcagccaggcatgtcccgtatgccaaaagagggtgctgcccctagcctgggcccccaccgacagactgcagctgcgttactgtgctgagaggtacccagaaggttcccatgaagggcagcatgtccaagcccctgaccccagatgtggcaacaggaccctcgctcacatccaccggagtgtatgtgtggggaggggcttcacctgttcccagaggtgtccttggactcaccttggcacatgttctgtgtttcagtaaagagagacctgatcacccatctgtgtgcttccatcctgcattaaaattcactcagtgtggcccagaaaaaaaa

SEQ ID NO: 33982 - DNA, 2712 bp, Homo sapiens
gtgttgcctaggctggtctcaaactgctgggcttaagtgatcgttcctccttggcctcccgaagtgctggaattataggtgtgaaccaccatgtctggccttgtagtttatttctaagttcaaattaatgttggtgcttttcctccttttttcttagcagatggtttgctaggtgagtgtgtcctcgattctttaaatcaggggtccccaatccccaggccacagattgttccagtccatggcctgttaggaaccaggccacacagtaggaggtgagcagccagccagtgagcattactgtgtgagctccgccccctgccagagcattactgtgtgagctccgccccctgtcagagcattactgtgtgagctccgccccctgccagagattactgtgtgagctccgccccctgccagagcattactgtgtgagctccgccccctgtcattactgtgtgagctccgccccctgtcatatcattactgtgtgagctccgccccctgtcatatcattattgtgagctccgcccctgtcatatcattgctgtgtgagctccgcctcctgtcagatcagtggtggcattagattctcataggagtggaatcctgttgtgaactgcgcatgagaaggatctaggttatgccccgcttatgagaatctaatactgatgatctgagatggaaccgtttcatctccaaaccatccccacacttgtcagtggaaaaagtgtcttccgtgaaaccagtccctggtgccaaaaaggttagggactgccggtttaaataaccaaatgctaaaagaactggcatagaagtaaatgggctgctgctttatttttaggctgttctttttagagagcaatgacagttatttccaagtttgtcattagaaaataatattaggttggagcaaaagtaattgcagtttttgccattgctttcaatggtaaaaggcacaattacttttgcagcaacttaatattataaatttgttcttaaagtgtatttttgataagaaagccgttttgtttttccttctgttaattttttgtttttttcttggtcgagacagagtcttgccatgctgcccaggctggagtgcagtggtgtgatctcggctcactgcagcctccacctcctgggctccagcagtcctcccacctcaacctccctaagagctgagactacaggtgtgagccaccatgcctggctaatttttagagacagggtttcaccctcttgcccaggctggtcccaaactcctgggctcaagcagtcctcctgcctcagcctcccagagtattgggattataggtgtgagccactgccagaaaaacgtttcctaagacaaggcaggtcttacattatatttaaattttttttaatgatgtcttttttggcagtgcacagccagaggacaacacatcacacacaagaaacagttgtgctcatgtgatgggggcctcagcactaggaaggagtggactgttggcgcacgcagcagcttgaataaatctgaaagtcactacgctgcgtaagagaagccaaataaagcgcatgctgtgtacagagggtgtcgagaatgcctcctacgtgacggaaagcagatccgtggttccctgcagactggcaggagcagattccaaaggcacaggaagaagcttgcaggcagctgctcccaaccccagaacctttgctgtcttgggacggatcaccactgcaagaggggaagttgctactgtgatgaattctgccatgtggcaccagactgccacccagaccacagtgtcctctgcaaccctgcttctcagatgaccaagatggtgctgcagatggtgctgaggatggagaacccaccaagccccgctaggagccacctagactggatgcagagcatggttcagcgagttctccaaaccagcctcccaggaatgccattcaccatggctgtgaggagaataaagaagagagcctgactcctctcctgaggccccttccccaccctgagccagcaggatccacggagcagaggtcatctgtccccagcttggcccactgaggccagcatggctgggcccaggatgcttgtctctcagctcccatcctgtgtacttccacattggtttaaccagaggaaaaccgaaatctacaattgtcataaacacatttaaatgtgcgtagaatcagccatacaaattgtgaaacataaaacatttggctcatggtattattcactgttttgtggtggttacagtgactatagcaaacatttcttgaaagtagaaaataagaacccagcaccccttgagctaagtaatgtgccctctgtcctcaatattccttcctgggctccacattactgcccttaagtctggaaatattctggtctgagccccgtagtccaggcctcatgttcaggctttctgtccccagtgatgagaggagagacggcagacctttctccggtgagctcagatgggcctcccggagtctcctggggtgcacaggatttcaaagatccaggaggcgctgccaggggctgtgaggtctgatgaacctctcaccttccctcccacacctgcccttttcctgtttctgtggatgcttttgctgtccttggcttcctggactccagacctcagggtcatcttttgcttctctctgcaaggtgccaagtctctctaggtttttgtttgtttgttttgttattga

SEQ ID NO: 33983 - DNA, 2009 bp, Homo sapiens
gtgttgcctaggctggtctcaaactgctgggcttaagtgatcgttcctccttggcctcccgaagtgctggaattataggtgtgaaccaccatgtctggccttgtagtttatttctaagttcaaattaatgttggtgcttttcctccttttttcttagcagatggtttgctaggtgagtgtgtcctcgattctttaaatcaggggtccccaatccccaggccacagattgttccagtccatggcctgttaggaaccaggccacacagtaggaggtgagcagccagccagtgagcattactgtgtgagctccgccccctgccagagcattactgtgtgagctccgccccctgtcagagcattactgtgtgagctccgccccctgccagagattactgtgtgagctccgccccctgccagagcattactgtgtgagctccgccccctgtcattactgtgtgagctccgccccctgtcatatcattactgtgtgagctccgccccctgtcatatcattattgtgagctccgcccctgtcatatcattgctgtgtgagctccgcctcctgtcagatcagtggtggcattagattctcataggagtggaatcctgttgtgaactgcgcatgagaaggatctaggttatgccccgcttatgagaatctaatactgatgatctgagatggaaccgtttcatctccaaaccatccccacacttgtcagtggaaaaagtgtcttccgtgaaaccagtccctggtgccaaaaaggttagggactgccggtttaaataaccaaatgctaaaagaactggcatagaagtaaatgggctgctgctttatttttaggctgttctttttagagagcaatgacagttatttccaagtttgtcattagaaaataatattaggttggagcaaaagtaattgcagtttttgccattgctttcaatggtaaaaggcacaattacttttgcagcaacttaatattataaatttgttcttaaagtgtatttttgataagaaagccgttttgtttttccttctgttaattttttgtttttttcttggtcgagacagagtcttgccatgctgcccaggctggagtgcagtggtgtgatctcggctcactgcagcctccacctcctgggctccagcagtcctcccacctcaacctccctaagagctgagactacaggtgtgagccaccatgcctggctaatttttagagacagggtttcaccctcttgcccaggctggtcccaaactcctgggctcaagcagtcctcctgcctcagcctcccagagtattgggattataggtgtgagccactgccagaaaaacgtttcctaagacaaggcaggtcttacattatatttaaattttttttaatgatgtcttttttggcagtgcacagccagaggacaacacatcacacacaagaaacagttgtgctcatgtgatgggggcctcagcactaggaaggagtggactgttggcgcacgcagcagcttgaataaatctgaaagtcactacgctgcgtaagagaagccaaataaagcgcatgctgtgtacagagggtgtcgagaatgcctcctacgtgacggaaagcagatccgtggttccctgcagactggcaggagcagattccaaaggcacaggaagaagcttgcaggtagaatgtgttcattaccttctgcgcattataccacaaaaaagctgggaataaaaatgctaaccaaaaaaaaaggtgaaagtagataaaatttctcaactgtgtgatgggtaaacgtgcaggtttgctgtcatgctttgtttatgaagctgtggggtacaaggactctcatacgtcactgtggaatgcagaacgttgcagcctcatggaagaggatttggcagcatctaacaaaacgacatggcatttgcccttagactcagcaattctagaatctgcctcaaaaaaaactctggcaaagaaatgaaaggactttatccacagagttcttttcacagcct

SEQ ID NO: 33984 - DNA, 1194 bp, Homo sapiens
catatcttcaaatcaaatttcagtggagtgtttaccgggcaaggaaggcaggggggtcagcttgctgacagcctcaacctgccagccctcagcctgcacatttgtgatcacctggtcacacacctgggcaggaggctgcccctccctggtttgaggaagcaggaaaaggtacccgcgagagacagccagcagttctgtggagcagcggtggccggctaggatgggctgtctctggggtctggctctgccccttttcttcttctgctgggaggttggggtctctgggagctctgcaggccccagcacccgcagagcagacactgcgatgacaacggacgacacagaagtgcccgctatgactctagcaccgggccacgccgctctggaaactcaaacgctgagcgctgagacctcttctagggcctcaaccccagccggccccattccagaagcagagaccaggggagccaagagaatttcccctgcaagagagaccaggagtttcacaaaaacatctcccaacttcatggtgctgatcgccacctccgtggagacatcagccgccagtggcagccccgagggagctggaatgaccacagttcagaccatcacaggcagtgatcccgaggaagccatctttgacaccctttgcaccgatgacagctctgaagaggcaaagacactcacaatggacatattgacattggctcacacctccacagaagctaagggcctgtcctcagagagcagtgcctcttccgacggcccccatccagtcatcaccccgtcacgggcctcagagagcagcgcctcttccgacggcccccatccagtcatcaccccgtcacgggcctcagagagcagcgcctcttccgacggcccccatccagtcatcaccccgtcatggtccccgggatctgatgtcactctcctcgctgaagccctggtgactgtcacaaacatcgaggttattaattgcagcatcacagaaatagaaacaacaacttccagcatccctggggcctcagacatagatctcatccccacggaaggggtgaaggcctcgtccacctccgatccaccagctctgcctgaggccccagggatgctggaagttgtcggtcctatctcggtgatgctgcaattaataacctcgaggttggtgacagtcaccagggcttcaagggaggagag

SEQ ID NO: 33985 - DNA, 2875 bp, Homo sapiens
gtgttgcctaggctggtctcaaactgctgggcttaagtgatcgttcctccttggcctcccgaagtgctggaattataggtgtgaaccaccatgtctggccttgtagtttatttctaagttcaaattaatgttggtgcttttcctccttttttcttagcagatggtttgctaggtgagtgtgtcctcgattctttaaatcaggggtccccaatccccaggccacagattgttccagtccatggcctgttaggaaccaggccacacagtaggaggtgagcagccagccagtgagcattactgtgtgagctccgccccctgccagagcattactgtgtgagctccgccccctgtcagagcattactgtgtgagctccgccccctgccagagattactgtgtgagctccgccccctgccagagcattactgtgtgagctccgccccctgtcattactgtgtgagctccgccccctgtcatatcattactgtgtgagctccgccccctgtcatatcattattgtgagctccgcccctgtcatatcattgctgtgtgagctccgcctcctgtcagatcagtggtggcattagattctcataggagtggaatcctgttgtgaactgcgcatgagaaggatctaggttatgccccgcttatgagaatctaatactgatgatctgagatggaaccgtttcatctccaaaccatccccacacttgtcagtggaaaaagtgtcttccgtgaaaccagtccctggtgccaaaaaggttagggactgccggtttaaataaccaaatgctaaaagaactggcatagaagtaaatgggctgctgctttatttttaggctgttctttttagagagcaatgacagttatttccaagtttgtcattagaaaataatattaggttggagcaaaagtaattgcagtttttgccattgctttcaatggtaaaaggcacaattacttttgcagcaacttaatattataaatttgttcttaaagtgtatttttgataagaaagccgttttgtttttccttctgttaattttttgtttttttcttggtcgagacagagtcttgccatgctgcccaggctggagtgcagtggtgtgatctcggctcactgcagcctccacctcctgggctccagcagtcctcccacctcaacctccctaagagctgagactacaggtgtgagccaccatgcctggctaatttttagagacagggtttcaccctcttgcccaggctggtcccaaactcctgggctcaagcagtcctcctgcctcagcctcccagagtattgggattataggtgtgagccactgccagaaaaacgtttcctaagacaaggcaggtcttacattatatttaaattttttttaatgatgtcttttttggcagtgcacagccagaggacaacacatcacacacaagaaacagttgtgctcatgtgatgggggcctcagcactaggaaggagtggactgttggcgcacgcagcagcttgaataaatctgaaagtcactacgctgcgtaagagaagccaaataaagcgcatgctgtgtacagagggtgtcgagaatgcctcctacgtgacggaaagcagatccgtggttccctgcagactggcaggagcagattccaaaggcacaggaagaagcttgcaggcagctgctcccaaccccagaacctttgctgtcttgggacggatcaccactgcaagaggggaagttgctactgtgatgaattctgccatgtggcaccagactgccacccagaccacagtgtcctctgcaaccctggtaactcacatacaggcccgattccaccgacagcaaagctggatgctatggctggcagaggcaaaccctttgcctgcacttcaggccaaagccgggatgtggcctagatggttcctaaggtccctgacaatcctgagatcttgcatcttgtctatttcaggtccttctcagatgaccaagatggtgctgcagatggtgctgaggatggagaacccaccaagccccgctaggagccacctagactggatgcagagcatggttcagcgagttctccaaaccagcctcccaggaatgccattcaccatggctgtgaggagaataaagaagagagcctgactcctctcctgaggccccttccccaccctgagccagcaggatccacggagcagaggtcatctgtccccagcttggcccactgaggccagcatggctgggcccaggatgcttgtctctcagctcccatcctgtgtacttccacattggtttaaccagaggaaaaccgaaatctacaattgtcataaacacatttaaatgtgcgtagaatcagccatacaaattgtgaaacataaaacatttggctcatggtattattcactgttttgtggtggttacagtgactatagcaaacatttcttgaaagtagaaaataagaacccagcaccccttgagctaagtaatgtgccctctgtcctcaatattccttcctgggctccacattactgcccttaagtctggaaatattctggtctgagccccgtagtccaggcctcatgttcaggctttctgtccccagtgatgagaggagagacggcagacctttctccggtgagctcagatgggcctcccggagtctcctggggtgcacaggatttcaaagatccaggaggcgctgccaggggctgtgaggtctgatgaacctctcaccttccctcccacacctgcccttttcctgtttctgtggatgcttttgctgtccttggcttcctggactccagacctcagggtcatcttttgcttctctctgcaaggtgccaagtctctctaggtttttgtttgtttgttttgttattga

SEQ ID NO: 33986 - DNA, 3201 bp, Homo sapiens
gtgttgcctaggctggtctcaaactgctgggcttaagtgatcgttcctccttggcctcccgaagtgctggaattataggtgtgaaccaccatgtctggccttgtagtttatttctaagttcaaattaatgttggtgcttttcctccttttttcttagcagatggtttgctaggtgagtgtgtcctcgattctttaaatcaggggtccccaatccccaggccacagattgttccagtccatggcctgttaggaaccaggccacacagtaggaggtgagcagccagccagtgagcattactgtgtgagctccgccccctgccagagcattactgtgtgagctccgccccctgtcagagcattactgtgtgagctccgccccctgccagagattactgtgtgagctccgccccctgccagagcattactgtgtgagctccgccccctgtcattactgtgtgagctccgccccctgtcatatcattactgtgtgagctccgccccctgtcatatcattattgtgagctccgcccctgtcatatcattgctgtgtgagctccgcctcctgtcagatcagtggtggcattagattctcataggagtggaatcctgttgtgaactgcgcatgagaaggatctaggttatgccccgcttatgagaatctaatactgatgatctgagatggaaccgtttcatctccaaaccatccccacacttgtcagtggaaaaagtgtcttccgtgaaaccagtccctggtgccaaaaaggttagggactgccggtttaaataaccaaatgctaaaagaactggcatagaagtaaatgggctgctgctttatttttaggctgttctttttagagagcaatgacagttatttccaagtttgtcattagaaaataatattaggttggagcaaaagtaattgcagtttttgccattgctttcaatggtaaaaggcacaattacttttgcagcaacttaatattataaatttgttcttaaagtgtatttttgataagaaagccgttttgtttttccttctgttaattttttgtttttttcttggtcgagacagagtcttgccatgctgcccaggctggagtgcagtggtgtgatctcggctcactgcagcctccacctcctgggctccagcagtcctcccacctcaacctccctaagagctgagactacaggtgtgagccaccatgcctggctaatttttagagacagggtttcaccctcttgcccaggctggtcccaaactcctgggctcaagcagtcctcctgcctcagcctcccagagtattgggattataggtgtgagccactgccagaaaaacgtttcctaagacaaggcaggtcttacattatatttaaattttttttaatgatgtcttttttggcagtgcacagccagaggacaacacatcacacacaagaaacagttgtgctcatgtgatgggggcctcagcactaggaaggagtggactgttggcgcacgcagcagcttgaataaatctgaaagtcactacgctgcgtaagagaagccaaataaagcgcatgctgtgtacagagggtgtcgagaatgcctcctacgtgacggaaagcagatccgtggttccctgcagactggcaggagcagattccaaaggcacaggaagaagcttgcaggcagctgctcccaaccccagaacctttgctgtcttgggacggatcaccactgcaagaggggaagttgctactgtgatgaattctgccatgtggcaccagactgccacccagaccacagtgtcctctgcaaccctggtaactcacatacaggcccgattccaccgacagcaaagctggatgctatggctggcagaggcaaaccctttgcctgcacttcaggccaaagccgggatgtggcctagatggttcctaaggtccctgacaatcctgagatcttgcatcttgtctatttcaggtcaaaggtgcctacatgctccttctagctttgtttccctgatgttccttgccacctgctactcctctctgagctacttttccaggttccacagggagaggttcagctgtccgtggtagacatgagggtagagagtgaggtggttgggttccacttacctttctatcatcttgcagtatggatgtctcttgactggtaccgtgtagacttttgagggcacacaggagtctgcagagagatactggggacattgagcagcagcagtggggttgggaggcagaaatgaggacaggaacatttaccttgtgtttctctcagcttctcagatgaccaagatggtgctgcagatggtgctgaggatggagaacccaccaagccccgctaggagccacctagactggatgcagagcatggtgagctccctgcaggttctctgagaaggggtggatggcagcctgctccttgcctttgtgccctccaggccccaaagtcagggaaccaaaagaagaaaggggccgtagctagggcagagctccactgcaatgattgttttaggggtaggagccaggattgccgtctgtggacactgaaatttgaatctcatatacttttgtgacaaaacattcttcctcttttgttcttctcctaccatctaaaaatgtagaaaacattcttagcctatgagttgcacaaaaacaggcagtggccagatttggcccatagaccatagtttgctgacttctgccctaaatcatcctccatttctttccttctgtgtccttgttactgacaaagccactttccctaaaatggggtctttccctgtggaaaagctcaagttagaatgagcaatagaaaaccagacagccctgtatctatgggaatgttgcttgcatcagagccaccacaccttgctgtgaggttgatcggtttctcgcagctggaaatagttgcttcccgccccccatcttcctcactcttttaaactctcaaaaatcccccagcctcccaaatttgttttaatttttaagagaattcttttctacaaaagagggaaaccttctttcaaatggcccttcataaatttccctaaagaggtttttatctctgatagaaatatgaaaaacagataaccagataattgccctctatctaggctttaaacacttattcatacattgaatttctgcaagttacagatgattgttgctgtgtgattactggccctgtgaaaagta

SEQ ID NO: 33987 - DNA, 2894 bp, Homo sapiens
gtgttgcctaggctggtctcaaactgctgggcttaagtgatcgttcctccttggcctcccgaagtgctggaattataggtgtgaaccaccatgtctggccttgtagtttatttctaagttcaaattaatgttggtgcttttcctccttttttcttagcagatggtttgctaggtgagtgtgtcctcgattctttaaatcaggggtccccaatccccaggccacagattgttccagtccatggcctgttaggaaccaggccacacagtaggaggtgagcagccagccagtgagcattactgtgtgagctccgccccctgccagagcattactgtgtgagctccgccccctgtcagagcattactgtgtgagctccgccccctgccagagattactgtgtgagctccgccccctgccagagcattactgtgtgagctccgccccctgtcattactgtgtgagctccgccccctgtcatatcattactgtgtgagctccgccccctgtcatatcattattgtgagctccgcccctgtcatatcattgctgtgtgagctccgcctcctgtcagatcagtggtggcattagattctcataggagtggaatcctgttgtgaactgcgcatgagaaggatctaggttatgccccgcttatgagaatctaatactgatgatctgagatggaaccgtttcatctccaaaccatccccacacttgtcagtggaaaaagtgtcttccgtgaaaccagtccctggtgccaaaaaggttagggactgccggtttaaataaccaaatgctaaaagaactggcatagaagtaaatgggctgctgctttatttttaggctgttctttttagagagcaatgacagttatttccaagtttgtcattagaaaataatattaggttggagcaaaagtaattgcagtttttgccattgctttcaatggtaaaaggcacaattacttttgcagcaacttaatattataaatttgttcttaaagtgtatttttgataagaaagccgttttgtttttccttctgttaattttttgtttttttcttggtcgagacagagtcttgccatgctgcccaggctggagtgcagtggtgtgatctcggctcactgcagcctccacctcctgggctccagcagtcctcccacctcaacctccctaagagctgagactacaggtgtgagccaccatgcctggctaatttttagagacagggtttcaccctcttgcccaggctggtcccaaactcctgggctcaagcagtcctcctgcctcagcctcccagagtattgggattataggtgtgagccactgccagaaaaacgtttcctaagacaaggcaggtcttacattatatttaaattttttttaatgatgtcttttttggcagtgcacagccagaggacaacacatcacacacaagaaacagttgtgctcatgtgatgggggcctcagcactaggaaggagtggactgttggcgcacgcagcagcttgaataaatctgaaagtcactacgctgcgtaagagaagccaaataaagcgcatgctgtgtacagagggtgtcgagaatgcctcctacgtgacggaaagcagatccgtggttccctgcagactggcaggagcagattccaaaggcacaggaagaagcttgcagtacaaagataaaaatctaaagtggttgctgtggaggacaggggtcagtggtggaagtgagaccgaaatagactctgaagtaatatctggactttgaaattgcagctgctcccaaccccagaacctttgctgtcttgggacggatcaccactgcaagaggggaagttgctactgtgatgaattctgccatgtggcaccagactgccacccagaccacagtgtcctctgcaaccctgaaaggtgcctacatgctccttctagctttgtttccctgatgttccttgccacctgctactcctctctgagctacttttccagcttctcagatgaccaagatggtgctgcagatggtgctgaggatggagaacccaccaagccccgctaggagccacctagactggatgcagagcatggttcagcgagttctccaaaccagcctcccaggaatgccattcaccatggctgtgaggagaataaagaagagagcctgactcctctcctgaggccccttccccaccctgagccagcaggatccacggagcagaggtcatctgtccccagcttggcccactgaggccagcatggctgggcccaggatgcttgtctctcagctcccatcctgtgtacttccacattggtttaaccagaggaaaaccgaaatctacaattgtcataaacacatttaaatgtgcgtagaatcagccatacaaattgtgaaacataaaacatttggctcatggtattattcactgttttgtggtggttacagtgactatagcaaacatttcttgaaagtagaaaataagaacccagcaccccttgagctaagtaatgtgccctctgtcctcaatattccttcctgggctccacattactgcccttaagtctggaaatattctggtctgagccccgtagtccaggcctcatgttcaggctttctgtccccagtgatgagaggagagacggcagacctttctccggtgagctcagatgggcctcccggagtctcctggggtgcacaggatttcaaagatccaggaggcgctgccaggggctgtgaggtctgatgaacctctcaccttccctcccacacctgcccttttcctgtttctgtggatgcttttgctgtccttggcttcctggactccagacctcagggtcatcttttgcttctctctgcaaggtgccaagtctctctaggtttttgtttgtttgttttgttattga

SEQ ID NO: 33988 - DNA, 1853 bp, Homo sapiens
  misc_feature (1841)..(1841): n is a, c, g, or t
  misc_feature (1843)..(1843): n is a, c, g, or t
  misc_feature (1847)..(1847): n is a, c, g, or t
  misc_feature (1850)..(1850): n is a, c, g, or t
gtgttgcctaggctggtctcaaactgctgggcttaagtgatcgttcctccttggcctcccgaagtgctggaattataggtgtgaaccaccatgtctggccttgtagtttatttctaagttcaaattaatgttggtgcttttcctccttttttcttagcagatggtttgctaggtgagtgtgtcctcgattctttaaatcaggggtccccaatccccaggccacagattgttccagtccatggcctgttaggaaccaggccacacagtaggaggtgagcagccagccagtgagcattactgtgtgagctccgccccctgccagagcattactgtgtgagctccgccccctgtcagagcattactgtgtgagctccgccccctgccagagattactgtgtgagctccgccccctgccagagcattactgtgtgagctccgccccctgtcattactgtgtgagctccgccccctgtcatatcattactgtgtgagctccgccccctgtcatatcattattgtgagctccgcccctgtcatatcattgctgtgtgagctccgcctcctgtcagatcagtggtggcattagattctcataggagtggaatcctgttgtgaactgcgcatgagaaggatctaggttatgccccgcttatgagaatctaatactgatgatctgagatggaaccgtttcatctccaaaccatccccacacttgtcagtggaaaaagtgtcttccgtgaaaccagtccctggtgccaaaaaggttagggactgccggtttaaataaccaaatgctaaaagaactggcatagaagtaaatgggctgctgctttatttttaggctgttctttttagagagcaatgacagttatttccaagtttgtcattagaaaataatattaggttggagcaaaagtaattgcagtttttgccattgctttcaatggtaaaaggcacaattacttttgcagcaacttaatattataaatttgttcttaaagtgtatttttgataagaaagccgttttgtttttccttctgttaattttttgtttttttcttggtcgagacagagtcttgccatgctgcccaggctggagtgcagtggtgtgatctcggctcactgcagcctccacctcctgggctccagcagtcctcccacctcaacctccctaagagctgagactacaggtgtgagccaccatgcctggctaatttttagagacagggtttcaccctcttgcccaggctggtcccaaactcctgggctcaagcagtcctcctgcctcagcctcccagagtattgggattataggtgtgagccactgccagaaaaacgtttcctaagacaaggcaggtcttacattatatttaaattttttttaatgatgtcttttttggcagtgcacagccagaggacaacacatcacacacaagaaacagttgtgctcatgtgatgggggcctcagcactaggaaggagtggactgttggcgcacgcagcagcttgaataaatctgaaagtcactacgctgcgtaagagaagccaaataaagcgcatgctgtgtacagagggtgtcgagaatgcctcctacgtgacggaaagcagatccgtggttccctgcagactggcaggagcagattccaaaggcacaggaagaagcttgcagtacaaagataaaaatctaaagtggttgctgtggaggacaggggtcagtggtggaagtgagaccgaaatagactctgaagtaatatctggactttgaaatttgcacagccagagaacaacacatcacacacaagaaacagttgtgctcatgtgatggggacctcagcactaggngngaanggnctg

SEQ ID NO: 33989 - DNA, 2192 bp, Homo sapiens
gtgttgcctaggctggtctcaaactgctgggcttaagtgatcgttcctccttggcctcccgaagtgctggaattataggtgtgaaccaccatgtctggccttgtagtttatttctaagttcaaattaatgttggtgcttttcctccttttttcttagcagatggtttgctaggtgagtgtgtcctcgattctttaaatcaggggtccccaatccccaggccacagattgttccagtccatggcctgttaggaaccaggccacacagtaggaggtgagcagccagccagtgagcattactgtgtgagctccgccccctgccagagcattactgtgtgagctccgccccctgtcagagcattactgtgtgagctccgccccctgccagagattactgtgtgagctccgccccctgccagagcattactgtgtgagctccgccccctgtcattactgtgtgagctccgccccctgtcatatcattactgtgtgagctccgccccctgtcatatcattattgtgagctccgcccctgtcatatcattgctgtgtgagctccgcctcctgtcagatcagtggtggcattagattctcataggagtggaatcctgttgtgaactgcgcatgagaaggatctaggttatgccccgcttatgagaatctaatactgatgatctgagatggaaccgtttcatctccaaaccatccccacacttgtcagtggaaaaagtgtcttccgtgaaaccagtccctggtgccaaaaaggttagggactgccggtttaaataaccaaatgctaaaagaactggcatagaagtaaatgggctgctgctttatttttaggctgttctttttagagagcaatgacagttatttccaagtttgtcattagaaaataatattaggttggagcaaaagtaattgcagtttttgccattgctttcaatggtaaaaggcacaattacttttgcagcaacttaatattataaatttgttcttaaagtgtatttttgataagaaagccgttttgtttttccttctgttaattttttgtttttttcttggtcgagacagagtcttgccatgctgcccaggctggagtgcagtggtgtgatctcggctcactgcagcctccacctcctgggctccagcagtcctcccacctcaacctccctaagagctgagactacaggtgtgagccaccatgcctggctaatttttagagacagggtttcaccctcttgcccaggctggtcccaaactcctgggctcaagcagtcctcctgcctcagcctcccagagtattgggattataggtgtgagccactgccagaaaaacgtttcctaagacaaggcaggtcttacattatatttaaattttttttaatgatgtcttttttggcagtgcacagccagaggacaacacatcacacacaagaaacagttgtgctcatgtgatgggggcctcagcactaggaaggagtggactgttggcgcacgcagcagcttgaataaatctgaaagtcactacgctgcgtaagagaagccaaataaagcgcatgctgtgtacagagggtgtcgagaatgcctcctacgtgacggaaagcagatccgtggttccctgcagactggcaggagcagattccaaaggcacaggaagaagcttgcagtacaaagataaaaatctaaagtggttgctgtggaggacaggggtcagtggtggaagtgagaccgaaatagactctgaagtaatatctggactttgaaattgtaagtgttttacatattaccaaactaagtttttaagatagtccctaaaattgaaagaatggtatctgaaatgaatgaatctaaattccttggattgcattctacaggcgccaaccctgagaccaaaatttggaaggtggccctgagcagcagctgaagggaagtgggaggtgaagatcaggacaagaggcggcagcatggggcgtccgggagccgggtctcatgtggacagctgggcccgtgttcactgtgggagctggtgcgttccttcaccagcccacgctgcacaggttcaggatggtcaattccgggcacccctggcctgctccaggacatgctgctgccaccagagaaagcccctaggcagcgtcccgggtgctggtggtgtcagaatcgagtttgagtctgaggagtgacctggggc

SEQ ID NO: 33990 - DNA, 1603 bp, Homo sapiens
gaaaatgtaaaaaggatcaagtggatgcagcctctacctaaataattaaaatatatttcagtatatttctgaattaacaccaggtcttcattatttagaacttactaaattgttttcattttcttagttttacctgtgtatctccatgtttgcaaaaattactataagtcaaattttgccagtgaatttaactatttttctttccttgcaattaaggggaaaaaagcatttatcttatcttctcataccccttgcatctaagtacttagcaaagtcaatattttcccattttccaaatgcgtccatctctaacataaatattaattgaacatagagctatgtttggagtgagtggactggcaggacagttggaagtccatcacagtctattgacagtttcatcaaagctgtatagtccaactagtggggcagcttggctactatggtggaagtctcagcaaactgcctggttttgtttgtttgttttgttttaaggtacaggaaataagaggaataatagtggccaaagcaattagaacatcttcattccagaactgtgttcagcaatccaggcagattgatacatttttctttaaaaataaattgctattacagctagacgtcaattgggataaataaagggatgaagatccactaagtttgtgactttcatacacacccagtacatctcaaaggatgctaagggacattttctgccagtagagttctccccctttttggtgacagcaatattattatgttcacatctaactccagagcttacttcctgtggtgccaatgtatttgttgcaatttactacatttttatatgagcctatttataggtgccattaaactcaggtctttcaaatgaaagagtttctagcccacttagggaaaaagataattgtttagaaaaccataaaatcaatggtaggaaaagttggaactggttacctggatgccatggttctctgttaaataaagtaagagaccaggtgtattctgagtgtcatcagtgttattttcagcatgctaataaatgtctttccggttatatatctatctaaattaacctttaaaatattggtttccttgataaaagcaccacttttgcttttgttagctgtaatattttttgtcatttagataagacctggtttggctctcaataaaagatgaagacagtagctctgtacagggatatatctatattagtcttcatctgatgaatgaagaaattttctcatattatgttcaagaaagtatttacttcctaaaaatagaattcccgattctgtctattttggttgaataccagaacaaatctttccgttgcaatcccagtaaaacgaaagaaaaggaatatcttacagactgttcatattagatgtatgtagactgttaatttgcagtttccccatatttcctgcctatcttacccagataactttctttgaaggtaaaagctgtgcaaaaggcatgagactcaggcctactctttgtttaaatgatggaaaaatataaattattttctaagtaataaaagtataaaaattatcattataaataaagtctaaagtttgaaattaataaaaaaaaa

SEQ ID NO: 33991 - DNA, 1001 bp, Homo sapiens
gaaaatgtaaaaaggatcaagtggatgcagcctctacctaaataattaaaatatatttcagtatatttctgaattaacaccaggtcttcattatttagaacttactaaattgttttcattttcttagttttacctgtgtatctccatgtttgcaaaaattactataagtcaaattttgccagtgaatttaactatttttctttccttgcaattaaggggaaaaaagcatttatcttatcttctcataccccttgcatctaagtacttagcaaagtcaatattttcccattttccaaatgcgtccatctctaacataaatattaattgaacatagagctatgtttggagtgagtggactggcaggacagttggaagtccatcacagtctattgacagtttcatcaaagctgtatagtccaactagtggggcagcttggctactatggtggaagtctcagcaaactgcctggttttgtttgtttgttttgttttaaggtacaggaaataagaggaataatagtggccaaagcaattagaacatcttcattccagaactgtgttcagcaatccaggcagattgatacatttttctttaaaaataaattgctattacagctagacgtcaattgggataaataaagggatgaagatccactaagtttgtgactttcatacacacccagtacatctcaaaggatgctaagggacattttctgccagtagagttctccccctttttggtgacagcaatattattatgttcacatctaactccagagcttacttcctgtggtgccaatgtatttgttgcaatttactacatttttatatgagcctatttataggtgccattaaactcaggtctttcaaatgaaagagtttctagcccacttagggaaaaagataattgtttagaaaaccataaaatcaatggtaggaaaagttggaactggttacctggatgccatggttctctgttaaataaagtaagagaccaggtg

SEQ ID NO: 33992 - DNA, 653 bp, Homo sapiens
gaaaatgtaaaaaggatcaagtggatgcagcctctacctaaataattaaaatatatttcagtatatttctgaattaacaccaggtcttcattatttagaacttactaaattgttttcattttcttagttttacctgtgtatctccatgtttgcaaaaattactataagtcaaattttgccagtgaatttaactatttttctttccttgcaattaaggggaaaaaagcatttatcttatcttctcataccccttgcatctaagtacttagcaaagtcaatattttcccattttccaaatgcgtccatctctaacataaatattaattgaacatagagctatgtttggagtgagtggactggcaggacagttggaagtccatcacagtctattgacagtttcatcaaagctgtatagtccaactagtggggcagcttggctactatggtggaagtctcagcaaactgcctggttttgtttgtttgttttgttttaaggtacaggaaataagaggaataatagtggccaaagcaattagaacatcttcattccagaactgtgttcagcaatccaggcagattgatacatttttctttaaaaataaattgctattacagctagacgtcaattgggataaataaagggatgaagatcc

SEQ ID NO: 33993 - DNA, 2652 bp, Homo sapiens
  misc_feature (4)..(5): n is a, c, g, or t
ggcnngagggcgcgctctgctcggctgcaggctcaggaagcggcgcggcggcagctgctgggccagagccccgcgccctgcgtccagccgccgggtgtgtgcgcccgcgtagcccagcgtcgcgcctcggcgcccccacgcgcccacgcagcggcgcggggacccgggcgggggcagagggagggcccggcccagggaggagaaggggccggtcctcccggcgcaggcagcagccgcggcagcccaggaggcggaggcagcggcaacggcagagacagcaacgtgcccgccgcagtcagcccggcctcgtcggacccgcaccggcccgcccgcccgcccgcaccgcgtcggggcgccctctccactgcgcgcggtacaaggaaatggtagaactagtgatctcacccagcctcactgtaaacagcgattgtctggataaactgaagtttaaccgtgctgacgctgctgtgtggactctgagtgacagacaaggcatcaccaaatcggcccccctgagagtgtcccagctcttctccagatcttgcccacgtgtcctcccccgccagccttccacagccatggcagcctacggccagacgcagtacagtgcggggatccagcaggctaccccctatacagcttacccacctccagcacaagcctatggaatcccttcctacacttcagcacctcacccactggacagagcccatacacctaccagatgcacggcacaacagggttctatcaaggaggaaatggactgggcaacgcagccggtttcgggagtgtgcaccaggactatccttcctaccccggcttcccccagagccagtacccccagtattacggctcatcctacaaccctccctacgtcccggccagcagcatctgcccttcgcccctctccacgtccacctacgtcctccaggaggcatctcacaacgtccccaaccagagttccgagtcacttgctggtgaatacaacacacacaatggaccttccacaccagcgaaagagggagacacagacaggccgcaccgggcctccgacgggaagctccgaggccggtctaagaggagcagtgacccgtccccggcaggggacaatgagattgagcgtgtgttcgtgtgggacttggatgagacaataattatttttcactccttactcacggggacatttgcatccagatacgggaaggacaccacgacgtccgtgcgcattggccttatgatggaagagatgatcttcaaccttgcagatacacatctgttcttcaatgacctggaggattgtgaccagatccacgttgatgacgtctcatcagatgacaatggccaagatttaagcacatacaacttctccgctgacggcttccacagttcggccccaggagccaacctgtgcctgggctctggcgtgcacggcggcgtggactggatgaggaagctggccttccgctaccggcgggtgaaggagatgtacaatacctacaagaacaacgttggtgggttgataggcactcccaaaagggagacctggctacagctccgagctgagctggaagctctcacagacctctggctgacccactccctgaaggcactaaacctcatcaactcccggcccaactgtgtcaatgtgctggtcaccaccactcaactaattcctgccctggccaaagtcctgctatatggcctggggtctgtgtttcctattgagaacatctacagtgcaaccaagacagggaaggagagctgcttcgagaggataatgcagagattcggcagaaaagctgtctacgtggtgatcggtgatggtgtggaagaggagcaaggagcgaaaaagcacaacatgcctttctggcggatatcctgccacgcagacctggaggcactgaggcacgccctggagctggagtatttatagcaggatcagcagcatctccacctgccatctcaccctcagaccccctcgccttccccacctccccaccgagaactccagagacccagatgttggacaccaggaaggggccccacagccgagacgacgtgtccagtgaccatctcagaagccgtccatcagtccaaatgggggttctgagaaggaaagtacccaacattggcttcggagtatttgactttggggaaaagggctggctcggagtctagactcttctgtaagactcacagaacaaaagcaaggaattgctgatttggggggtgcctggtgatgaggaggggatgggtttgtcttgtcttctttttaatttatggactagtctcattactccggaattatgctcttgtacctgtgtggctgggtttcttagtcgttggtttggtttggttttttgaactggtatgtggggtggttcacagttctaatgtaagcactctattctccaagttgtgctttgtggggacaatcattctttgaacattagagaggaaggcagttcaagctgttgaaaagactattgcttatttttgtttttaaagacctacttgacgtcatgtggacagtgcacgtgccttacgctacatcttgttttctaggaagagggggatgctgggaaggaatgggtgctttgtgatggataaaaggcattaaataaaaccacgtttacattttgaaaaaaaaaa

SEQ ID NO: 33994 - DNA, 2482 bp, Homo sapiens
  misc_feature (4)..(5): n is a, c, g, or t
ggcnngagggcgcgctctgctcggctgcaggctcaggaagcggcgcggcggcagctgctgggccagagccccgcgccctgcgtccagccgccgggtgtgtgcgcccgcgtagcccagcgtcgcgcctcggcgcccccacgcgcccacgcagcggcgcggggacccgggcgggggcagagggagggcccggcccagggaggagaaggggccggtcctcccggcgcaggcagcagccgcggcagcccaggaggcggaggcagcggcaacggcagagacagcaacgtgcccgccgcagtcagcccggcctcgtcggacccgcaccggcccgcccgcccgcccgcaccgcgtcggggcgccctctccactgcgcgcggtacaaggaaatggtagaactagtgatctcacccagcctcactgtaaacagcgattgtctggataaactgaagtttaaccgtgctgacgctgctgtgtggactctgagtgacagacaaggcatcaccaaatcggcccccctgagagtgtcccagctcttctccagatcttgcccacgtgtcctcccccgccagccttccacagccatggcagcctacggccagacgcagtacagtgcggggatccagcaggctaccccctatacagcttacccacctccagcacaagcctatggaatcccttcctacagcatcaagacagaagacagcttgaaccattcccctggccagagtggattcctcagctatggctccagcttcagcacctcacccactggacagagcccatacacctaccagatgcacggcacaacagggttctatcaaggaggaaatggactgggcaacgcagccggtttcgggagtgtgcaccaggactatccttcctaccccggcttcccccagagccagtacccccagtattacggctcatcctacaaccctccctacgtcccggccagcagcatctgcccttcgcccctctccacgtccacctacgtcctccaggaggcatctcacaacgtccccaaccagagttccgagtcacttgctggtgaatacaacacacacaatggaccttccacaccagcgaaagagggagacacagacaggccgcaccgggcctccgacgggaagctccgaggccggtctaagaggagcagtgacccgtccccggcaggggacaatgagattgagcgtgtgttcgtgtgggacttggatgagacaataattatttttcactccttactcacggggacatttgcatccagatacgggaaggacaccacgacgtccgtgcgcattggccttatgatggaagagatgatcttcaaccttgcagatacacatctgttcttcaatgacctggaggattgtgaccagatccacgttgatgacgtctcatcagatgacaatggccaagatttaagcacatacaacttctccgctgacggcttccacagttcggccccaggagccaacctgtgcctgggctctggcgtgcacggcggcgtggactggatgaggaagctggccttccgctaccggcgggtgaaggagatgtacaatacctacaagaacaacgttggtgggaaggagagctgcttcgagaggataatgcagagattcggcagaaaagctgtctacgtggtgatcggtgatggtgtggaagaggagcaaggagcgaaaaagcacaacatgcctttctggcggatatcctgccacgcagacctggaggcactgaggcacgccctggagctggagtatttatagcaggatcagcagcatctccacctgccatctcaccctcagaccccctcgccttccccacctccccaccgagaactccagagacccagatgttggacaccaggaaggggccccacagccgagacgacgtgtccagtgaccatctcagaagccgtccatcagtccaaatgggggttctgagaaggaaagtacccaacattggcttcggagtatttgactttggggaaaagggctggctcggagtctagactcttctgtaagactcacagaacaaaagcaaggaattgctgatttggggggtgcctggtgatgaggaggggatgggtttgtcttgtcttctttttaatttatggactagtctcattactccggaattatgctcttgtacctgtgtggctgggtttcttagtcgttggtttggtttggttttttgaactggtatgtggggtggttcacagttctaatgtaagcactctattctccaagttgtgctttgtggggacaatcattctttgaacattagagaggaaggcagttcaagctgttgaaaagactattgcttatttttgtttttaaagacctacttgacgtcatgtggacagtgcacgtgccttacgctacatcttgttttctaggaagagggggatgctgggaaggaatgggtgctttgtgatggataaaaggcattaaataaaaccacgtttacattttgaaaaaaaaaa

SEQ ID NO: 33995 - DNA, 652 bp, Homo sapiens
  misc_feature (69)..(69): n is a, c, g, or t
tcagtcccagccaagccacgtggactgagagtcatggggagacctagggaaattaaataactcacaaanacctgtaaaaactgttacagtgactggtgtgtgtgatagagggccatgggcctgtgaaagctgcaggagggaaatcgcttactcagggagagcctggggaaatcctgccggaactgaggcctctgcagggtgagcaggagggactggagttccaggcagagggaacagcatgtacaaaggccctgtggcaagagggagtgtggagcgagagaaaggccagcgtgctggaatcagatattggacaaggagaagccagatcaaggctgtgttcggaactctttgctttatcttaagagcaatggaaagccgtcagaggttataagcaaggatgaggtggcagaggttcctggaaacaccaaaaaaaaaaaaaaaaagtggaggatgacaccagaagttataaagcgttgagctcaacgcttaatacttcatgtttaaacatgaagtagaaatggggttgtgcgttctccccagattgtacatacttggaagagccatgcagcaggcagaggagaggaacagaggagctgtgtggtttgaccctcctcggaatctgcagtgtggctggctctgtgtgctccctgta

SEQ ID NO: 33996 - DNA, 2719 bp, Homo sapiens
  misc_feature (4)..(5): n is a, c, g, or t
ggcnngagggcgcgctctgctcggctgcaggctcaggaagcggcgcggcggcagctgctgggccagagccccgcgccctgcgtccagccgccgggtgtgtgcgcccgcgtagcccagcgtcgcgcctcggcgcccccacgcgcccacgcagcggcgcggggacccgggcgggggcagagggagggcccggcccagggaggagaaggggccggtcctcccggcgcaggcagcagccgcggcagcccaggaggcggaggcagcggcaacggcagagacagcaacgtgcccgccgcagtcagcccggcctcgtcggacccgcaccggcccgcccgcccgcccgcaccgcgtcggggcgccctctccactgcgcgcggtacaaggaaatggtagaactagtgatctcacccagcctcactgtaaacagcgattgtctggataaactgaagtttaaccgtgctgacgctgctgtgtggactctgagtgacagacaaggcatcaccaaatcggcccccctgagagtgtcccagctcttctccagatcttgcccacgtgtcctcccccgccagccttccacagccatggcagcctacggccagacgcagtacagtgcggggatccagcaggctaccccctatacagcttacccacctccagcacaagcctatggaatcccttcctacagcatcaagacagaagacagcttgaaccattcccctggccagagtggattcctcagctatggctccagcttcagcacctcacccactggacagagcccatacacctaccagatgcacggcacaacagggttctatcaaggaggaaatggactgggcaacgcagccggtttcgggagtgtgcaccaggactatccttcctaccccggcttcccccagagccagtacccccagtattacggctcatcctacaaccctccctacgtcccggccagcagcatctgcccttcgcccctctccacgtccacctacgtcctccaggaggcatctcacaacgtccccaaccagagttccgagtcacttgctggtgaatacaacacacacaatggaccttccacaccagcgaaagagggagacacagacaggccgcaccgggcctccgacgggaagctccgaggccggtctaagaggagcagtgacccgtccccggcaggggacaatgagattgagcgtgtgttcgtgtgggacttggatgagacaataattatttttcactccttactcacggggacatttgcatccagatacgggaaggacaccacgacgtccgtgcgcattggccttatgatggaagagatgatcttcaaccttgcagatacacatctgttcttcaatgacctggaggattgtgaccagatccacgttgatgacgtctcatcagatgacaatggccaagatttaagcacatacaacttctccgctgacggcttccacagttcggccccaggagccaacctgtgcctgggctctggcgtgcacggcggcgtggactggatgaggaagctggccttccgctaccggcgggtgaaggagatgtacaatacctacaagaacaacgttggtgggttgataggcactcccaaaagggagacctggctacagctccgagctgagctggaagctctcacagacctctggctgacccactccctgaaggcactaaacctcatcaactcccggcccaactgtgtcaatgtgctggtcaccaccactcaactaattcctgccctggccaaagtcctgctatatggcctggggtctgtgtttcctattgagaacatctacagtgcaaccaagacagggaaggagagctgcttcgagaggataatgcagagattcggcagaaaagctgtctacgtggtgatcggtgatggtgtggaagaggagcaaggagcgaaaaagcacaacatgcctttctggcggatatcctgccacgcagacctggaggcactgaggcacgccctggagctggagtatttatagcaggatcagcagcatctccacctgccatctcaccctcagaccccctcgccttccccacctccccaccgagaactccagagacccagatgttggacaccaggaaggggccccacagccgagacgacgtgtccagtgaccatctcagaagccgtccatcagtccaaatgggggttctgagaaggaaagtacccaacattggcttcggagtatttgactttggggaaaagggctggctcggagtctagactcttctgtaagactcacagaacaaaagcaaggaattgctgatttggggggtgcctggtgatgaggaggggatgggtttgtcttgtcttctttttaatttatggactagtctcattactccggaattatgctcttgtacctgtgtggctgggtttcttagtcgttggtttggtttggttttttgaactggtatgtggggtggttcacagttctaatgtaagcactctattctccaagttgtgctttgtggggacaatcattctttgaacattagagaggaaggcagttcaagctgttgaaaagactattgcttatttttgtttttaaagacctacttgacgtcatgtggacagtgcacgtgccttacgctacatcttgttttctaggaagagggggatgctgggaaggaatgggtgctttgtgatggataaaaggcattaaataaaaccacgtttacattttgaaaaaaaaaa

SEQ ID NO: 33997 - DNA, 2751 bp, Homo sapiens
  misc_feature (69)..(69): n is a, c, g, or t
tcagtcccagccaagccacgtggactgagagtcatggggagacctagggaaattaaataactcacaaanacctgtaaaaactgttacagtgactggtgtgtgtgatagagggccatgggcctgtgaaagctgcaggagggaaatcgcttactcagggagagcctggggaaatcctgccggaactgaggcctctgcagggtgagcaggagggactggagttccaggcagagggaacagcatgtacaaaggccctgtggcaagagggagtgtggagcgagagaaaggccagcgtgctggaatcagatattggacaaggagaagccagatcaaggctgtgttcggaactctttgctttatcttaagagcaatggaaagccgtcagaggttataagcaaggatgaggtggtacaaggaaatggtagaactagtgatctcacccagcctcactgtaaacagcgattgtctggataaactgaagtttaaccgtgctgacgctgctgtgtggactctgagtgacagacaaggcatcaccaaatcggcccccctgagagtgtcccagctcttctccagatcttgcccacgtgtcctcccccgccagccttccacagccatggcagcctacggccagacgcagtacagtgcggggatccagcaggctaccccctatacagcttacccacctccagcacaagcctatggaatcccttcctacagcatcaagacagaagacagcttgaaccattcccctggccagagtggattcctcagctatggctccagcttcagcacctcacccactggacagagcccatacacctaccagatgcacggcacaacagggttctatcaaggaggaaatggactgggcaacgcagccggtttcgggagtgtgcaccaggactatccttcctaccccggcttcccccagagccagtacccccagtattacggctcatcctacaaccctccctacgtcccggccagcagcatctgcccttcgcccctctccacgtccacctacgtcctccaggaggcatctcacaacgtccccaaccagagttccgagtcacttgctggtgaatacaacacacacaatggaccttccacaccagcgaaagagggagacacagacaggccgcaccgggcctccgacgggaagctccgaggccggtctaagaggagcagtgacccgtccccggcaggggacaatgagattgagcgtgtgttcgtgtgggacttggatgagacaataattatttttcactccttactcacggggacatttgcatccagatacgggaaggacaccacgacgtccgtgcgcattggccttatgatggaagagatgatcttcaaccttgcagatacacatctgttcttcaatgacctggaggattgtgaccagatccacgttgatgacgtctcatcagatgacaatggccaagatttaagcacatacaacttctccgctgacggcttccacagttcggccccaggagccaacctgtgcctgggctctggcgtgcacggcggcgtggactggatgaggaagctggccttccgctaccggcgggtgaaggagatgtacaatacctacaagaacaacgttggtgggttgataggcactcccaaaagggagacctggctacagctccgagctgagctggaagctctcacagacctctggctgacccactccctgaaggcactaaacctcatcaactcccggcccaactgtgtcaatgtgctggtcaccaccactcaactaattcctgccctggccaaagtcctgctatatggcctggggtctgtgtttcctattgagaacatctacagtgcaaccaagacagggaaggagagctgcttcgagaggataatgcagagattcggcagaaaagctgtctacgtggtgatcggtgatggtgtggaagaggagcaaggagcgaaaaagcacaacatgcctttctggcggatatcctgccacgcagacctggaggcactgaggcacgccctggagctggagtatttatagcaggatcagcagcatctccacctgccatctcaccctcagaccccctcgccttccccacctccccaccgagaactccagagacccagatgttggacaccaggaaggggccccacagccgagacgacgtgtccagtgaccatctcagaagccgtccatcagtccaaatgggggttctgagaaggaaagtacccaacattggcttcggagtatttgactttggggaaaagggctggctcggagtctagactcttctgtaagactcacagaacaaaagcaaggaattgctgatttggggggtgcctggtgatgaggaggggatgggtttgtcttgtcttctttttaatttatggactagtctcattactccggaattatgctcttgtacctgtgtggctgggtttcttagtcgttggtttggtttggttttttgaactggtatgtggggtggttcacagttctaatgtaagcactctattctccaagttgtgctttgtggggacaatcattctttgaacattagagaggaaggcagttcaagctgttgaaaagactattgcttatttttgtttttaaagacctacttgacgtcatgtggacagtgcacgtgccttacgctacatcttgttttctaggaagagggggatgctgggaaggaatgggtgctttgtgatggataaaaggcattaaataaaaccacgtttacattttgaaaaaaaaaa

SEQ ID NO: 33998 - DNA, 1992 bp, Homo sapiens
actgtgcaagacaagcccatcaagccacatcatgagtaactagggaagcccatacacctaccagatgcacggcacaacagggttctatcaaggaggaaatggactgggcaacgcagccggtttcgggagtgtgcaccaggactatccttcctaccccggcttcccccagagccagtacccccagtattacggctcatcctacaaccctccctacgtcccggccagcagcatctgcccttcgcccctctccacgtccacctacgtcctccaggaggcatctcacaacgtccccaaccagagttccgagtcacttgctggtgaatacaacacacacaatggaccttccacaccagcgaaagagggagacacagacaggccgcaccgggcctccgacgggaagctccgaggccggtctaagaggagcagtgacccgtccccggcaggggacaatgagattgagcgtgtgttcgtgtgggacttggatgagacaataattatttttcactccttactcacggggacatttgcatccagatacgggaaggacaccacgacgtccgtgcgcattggccttatgatggaagagatgatcttcaaccttgcagatacacatctgttcttcaatgacctggaggattgtgaccagatccacgttgatgacgtctcatcagatgacaatggccaagatttaagcacatacaacttctccgctgacggcttccacagttcggccccaggagccaacctgtgcctgggctctggcgtgcacggcggcgtggactggatgaggaagctggccttccgctaccggcgggtgaaggagatgtacaatacctacaagaacaacgttggtgggttgataggcactcccaaaagggagacctggctacagctccgagctgagctggaagctctcacagacctctggctgacccactccctgaaggcactaaacctcatcaactcccggcccaactgtgtcaatgtgctggtcaccaccactcaactaattcctgccctggccaaagtcctgctatatggcctggggtctgtgtttcctattgagaacatctacagtgcaaccaagacagggaaggagagctgcttcgagaggataatgcagagattcggcagaaaagctgtctacgtggtgatcggtgatggtgtggaagaggagcaaggagcgaaaaagcacaacatgcctttctggcggatatcctgccacgcagacctggaggcactgaggcacgccctggagctggagtatttatagcaggatcagcagcatctccacctgccatctcaccctcagaccccctcgccttccccacctccccaccgagaactccagagacccagatgttggacaccaggaaggggccccacagccgagacgacgtgtccagtgaccatctcagaagccgtccatcagtccaaatgggggttctgagaaggaaagtacccaacattggcttcggagtatttgactttggggaaaagggctggctcggagtctagactcttctgtaagactcacagaacaaaagcaaggaattgctgatttggggggtgcctggtgatgaggaggggatgggtttgtcttgtcttctttttaatttatggactagtctcattactccggaattatgctcttgtacctgtgtggctgggtttcttagtcgttggtttggtttggttttttgaactggtatgtggggtggttcacagttctaatgtaagcactctattctccaagttgtgctttgtggggacaatcattctttgaacattagagaggaaggcagttcaagctgttgaaaagactattgcttatttttgtttttaaagacctacttgacgtcatgtggacagtgcacgtgccttacgctacatcttgttttctaggaagagggggatgctgggaaggaatgggtgctttgtgatggataaaaggcattaaataaaaccacgtttacattttgaaaaaaaaaa

SEQ ID NO: 33999 - DNA, 1958 bp, Homo sapiens
ggcacgaggcagctcttctccagatcttgcccacgtgtcctcccccgccagccttccacagccatggcagcctacggccagacgcagtacagtgcggggatccagcaggctaccccctatacagcttacccacctccagcacaagcctatggaatcccttcctacagcatcaagacagaagacagcttgaaccattcccctggccagagtggattcctcagctatggctccagcttcagcacctcacccactggacagagcccatacacctaccagatgcacggtgaatacaacacacacaatggaccttccacaccagcgaaagagggagacacagacaggccgcaccgggcctccgacgggaagctccgaggccggtctaagaggagcagtgacccgtccccggcaggggacaatgagattgagcgtgtgttcgtgtgggacttggatgagacaataattatttttcactccttactcacggggacatttgcatccagatacgggaaggacaccacgacgtccgtgcgcattggccttatgatggaagagatgatcttcaaccttgcagatacacatctgttcttcaatgacctggaggattgtgaccagatccacgttgatgacgtctcatcagatgacaatggccaagatttaagcacatacaacttctccgctgacggcttccacagttcggccccaggagccaacctgtgcctgggctctggcgtgcacggcggcgtggactggatgaggaagctggccttccgctaccggcgggtgaaggagatgtacaatacctacaagaacaacgttggtgggttgataggcactcccaaaagggagacctggctacagctccgagctgagctggaagctctcacagacctctggctgacccactccctgaaggcactaaacctcatcaactcccggcccaactgtgtcaatgtgctggtcaccaccactcaactaattcctgccctggccaaagtcctgctatatggcctggggtctgtgtttcctattgagaacatctacagtgcaaccaagacagggaaggagagctgcttcgagaggataatgcagagattcggcagaaaagctgtctacgtggtgatcggtgatggtgtggaagaggagcaaggagcgaaaaagcacaacatgcctttctggcggatatcctgccacgcagacctggaggcactgaggcacgccctggagctggagtatttatagcaggatcagcagcatctccacctgccatctcaccctcagaccccctcgccttccccacctccccaccgagaactccagagacccagatgttggacaccaggaaggggccccacagccgagacgacgtgtccagtgaccatctcagaagccgtccatcagtccaaatgggggttctgagaaggaaagtacccaacattggcttcggagtatttgactttggggaaaagggctggctcggagtctagactcttctgtaagactcacagaacaaaagcaaggaattgctgatttggggggtgcctggtgatgaggaggggatgggtttgtcttgtcttctttttaatttatggactagtctcattactccggaattatgctcttgtacctgtgtggctgggtttcttagtcgttggtttggtttggttttttgaactggtatgtggggtggttcacagttctaatgtaagcactctattctccaagttgtgctttgtggggacaatcattctttgaacattagagaggaaggcagttcaagctgttgaaaagactattgcttatttttgtttttaaagacctacttgacgtcatgtggacagtgcacgtgccttacgctacatcttgttttctaggaagagggggatgctgggaaggaatgggtgctttgtgatggataaaaggcattaaataaaaccacgtttacattttgaaaaaaaaaa

SEQ ID NO: 34000 - DNA, 1233 bp, Homo sapiens
ttcaatttctacacaattaaaacaaagcatcgcgaaggcccgcggcgggtgttgacgcgatgctttgtttgttcaatttctacacaacgttggtgggttgataggcactcccaaaagggagacctggctacagctccgagctgagctggaagctctcacagacctctggctgacccactccctgaaggcactaaacctcatcaactcccggcccaactgtgtcaatgtgctggtcaccaccactcaactaattcctgccctggccaaagtcctgctatatggcctggggtctgtgtttcctattgagaacatctacagtgcaaccaagacagggaaggagagctgcttcgagaggataatgcagagattcggcagaaaagctgtctacgtggtgatcggtgatggtgtggaagaggagcaaggagcgaaaaagcacaacatgcctttctggcggatatcctgccacgcagacctggaggcactgaggcacgccctggagctggagtatttatagcaggatcagcagcatctccacctgccatctcaccctcagaccccctcgccttccccacctccccaccgagaactccagagacccagatgttggacaccaggaaggggccccacagccgagacgacgtgtccagtgaccatctcagaagccgtccatcagtccaaatgggggttctgagaaggaaagtacccaacattggcttcggagtatttgactttggggaaaagggctggctcggagtctagactcttctgtaagactcacagaacaaaagcaaggaattgctgatttggggggtgcctggtgatgaggaggggatgggtttgtcttgtcttctttttaatttatggactagtctcattactccggaattatgctcttgtacctgtgtggctgggtttcttagtcgttggtttggtttggttttttgaactggtatgtggggtggttcacagttctaatgtaagcactctattctccaagttgtgctttgtggggacaatcattctttgaacattagagaggaaggcagttcaagctgttgaaaagactattgcttatttttgtttttaaagacctacttgacgtcatgtggacagtgcacgtgccttacgctacatcttgttttctaggaagagggggatgctgggaaggaatgggtgctttgtgatggataaaaggcattaaataaaaccacgtttacattttgaaaaaaaaaa

SEQ ID NO: 34001 - DNA, 2224 bp, Homo sapiens
  misc_feature (4)..(5): n is a, c, g, or t
ggcnngagggcgcgctctgctcggctgcaggctcaggaagcggcgcggcggcagctgctgggccagagccccgcgccctgcgtccagccgccgggtgtgtgcgcccgcgtagcccagcgtcgcgcctcggcgcccccacgcgcccacgcagcggcgcggggacccgggcgggggcagagggagggcccggcccagggaggagaaggggccggtcctcccggcgcaggcagcagccgcggcagcccaggaggcggaggcagcggcaacggcagagacagcaacgtgcccgccgcagtcagcccggcctcgtcggacccgcaccggcccgcccgcccgcccgcaccgcgtcggggcgccctctccactgcgcgcggtacaaggaaatggtagaactagtgatctcacccagcctcactgtaaacagcgattgtctggataaactgaagtttaaccgtgctgacgctgctgtgtggactctgagtgacagacaaggcatcaccaaatcggcccccctgagagtgtcccagctcttctccagatcttgcccacgtgtcctcccccgccagccttccacagccatggcagcctacggccagacgcagtacagtgcggggatccagcaggctaccccctatacagcttacccacctccagcacaagcctatggaatcccttcctacagcatcaagacagaagacagcttgaaccattcccctggccagagtggattcctcagctatggctccagcttcagcacctcacccactggacagagcccatacacctaccagatgcacggcacaacagggttctatcaaggaggaaatggactgggcaacgcagccggtttcgggagtgtgcaccaggactatccttcctaccccggcttcccccagagccagtacccccagtattacggctcatcctacaaccctccctacgtcccggccagcagcatctgcccttcgcccctctccacgtccacctacgtcctccaggaggcatctcacaacgtccccaaccagagttccgagtcacttgctggtgaatacaacacacacaatggaccttccacaccagcgaaagagggagacacagacaggccgcaccgggcctccgacgggaagctccgaggccggtctaagaggagcagtgacccgtccccggcaggggacaatgagattgagcgtgtgttcgtgtgggacttggatgagacaataattatttttcactccttactcacggggacatttgcatccagatacgggaaggacaccacgacgtccgtgcgcattggccttatgatggaagagatgatcttcaaccttgcagatacacatctgttcttcaatgacctggaggattgtgaccagatccacgttgatgacgtctcatcagatgacaatggccaagatttaagcacatacaacttctccgctgacggcttccacagttcggccccaggagccaacctgtgcctgggctctggcgtgcacggcggcgtggactggatgaggaagctggccttccgctaccggcgggtgaaggagatgtacaatacctacaagaacaacgttggtgggttgataggcactcccaaaagggagacctggctacagctccgagctgagctggaagctctcacagacctctggctgacccactccctgaaggcactaaacctcatcaactcccggcccaactgtgtcaatgtgctggtcaccaccactcaactaattcctgccctggccaaagtcctgctatatggcctggggtctgtgtttcctattgagaacatctacagtgcaaccaagacagctgccatctcaccctcagaccccctcgccttccccacctccccaccgagaatccggaattatgctcttgtacctgtgtggctgggtttcttagtcgttggtttggtttggttttttgaactggtatgtggggtggttcacagttctaatgtaagcactctattctccaagttgtgctttgtggggacaatcattctttgaacattagagaggaaggcagttcaagctgttgaaaagactattgcttatttttgtttttaaagacctacttgacgtcatgtggacagtgcacgtgccttacgctacatcttgttttctaggaagagggggatgctgggaaggaatgggtgctttgtgatggataaaaggcattaaataaaaccacgtttacattttgaaaaaaaaaa

SEQ ID NO: 34002 - DNA, 1998 bp, Homo sapiens
  misc_feature (4)..(5): n is a, c, g, or t
  misc_feature (1934)..(1934): n is a, c, g, or t
  misc_feature (1937)..(1937): n is a, c, g, or t
  misc_feature (1939)..(1940): n is a, c, g, or t
ggcnngagggcgcgctctgctcggctgcaggctcaggaagcggcgcggcggcagctgctgggccagagccccgcgccctgcgtccagccgccgggtgtgtgcgcccgcgtagcccagcgtcgcgcctcggcgcccccacgcgcccacgcagcggcgcggggacccgggcgggggcagagggagggcccggcccagggaggagaaggggccggtcctcccggcgcaggcagcagccgcggcagcccaggaggcggaggcagcggcaacggcagagacagcaacgtgcccgccgcagtcagcccggcctcgtcggacccgcaccggcccgcccgcccgcccgcaccgcgtcggggcgccctctccactgcgcgcggtacaaggaaatggtagaactagtgatctcacccagcctcactgtaaacagcgattgtctggataaactgaagtttaaccgtgctgacgctgctgtgtggactctgagtgacagacaaggcatcaccaaatcggcccccctgagagtgtcccagctcttctccagatcttgcccacgtgtcctcccccgccagccttccacagccatggcagcctacggccagacgcagtacagtgcggggatccagcaggctaccccctatacagcttacccacctccagcacaagcctatggaatcccttcctacagcatcaagacagaagacagcttgaaccattcccctggccagagtggattcctcagctatggctccagcttcagcacctcacccactggacagagcccatacacctaccagatgcacggcacaacagggttctatcaaggaggaaatggactgggcaacgcagccggtttcgggagtgtgcaccaggactatccttcctaccccggcttcccccagagccagtacccccagtattacggctcatcctacaaccctccctacgtcccggccagcagcatctgcccttcgcccctctccacgtccacctacgtcctccaggaggcatctcacaacgtccccaaccagagttccgagtcacttgctggtgaatacaacacacacaatggaccttccacaccagcgaaagagggagacacagacaggccgcaccgggcctccgacgggaagctccgaggccggtctaagaggagcagtgacccgtccccggcaggggacaatgagattgagcgtgtgttcgtgtgggacttggatgagacaataattatttttcactccttactcacggggacatttgcatccagatacgggaaggacaccacgacgtccgtgcgcattggccttatgatggaagagatgatcttcaaccttgcagatacacatctgttcttcaatgacctggaggattgtgaccagatccacgttgatgacgtctcatcagatgacaatggccaagatttaagcacatacaacttctccgctgacggcttccacagttcggccccaggagccaacctgtgcctgggctctggcgtgcacggcggcgtggactggatgaggaagctggccttccgctaccggcgggtgaaggagatgtacaatacctacaagaacaacgttggtgggttgataggcactcccaaaagggagacctggctacagctccgagctgagctggaagctctcacagacctctggctgacccactccctgaaggcactaaacctcatcaactcccggcccaactgtgtcaatgtgctggtcaccaccactcaactaattcctgccctggccaaagtcctgctatatggcctggggtctgtgtttcctattgagaacatctacagtgcaaccaagacagggaaggagagctgcttcgagaggataatgcagagattcggcagaaaagctgtctacgtggtgatcggtgatggtgtggaagaggagcaaggagcgaaaaagcacaacatgcctttnctngnntccgaattcggcacgagtttttttttttttttttttttttttttttttttctcgtgcc

SEQ ID NO: 34003 - DNA, 1817 bp, Homo sapiens
  misc_feature (4)..(5): n is a, c, g, or t
ggcnngagggcgcgctctgctcggctgcaggctcaggaagcggcgcggcggcagctgctgggccagagccccgcgccctgcgtccagccgccgggtgtgtgcgcccgcgtagcccagcgtcgcgcctcggcgcccccacgcgcccacgcagcggcgcggggacccgggcgggggcagagggagggcccggcccagggaggagaaggggccggtcctcccggcgcaggcagcagccgcggcagcccaggaggcggaggcagcggcaacggcagagacagcaacgtgcccgccgcagtcagcccggcctcgtcggacccgcaccggcccgcccgcccgcccgcaccgcgtcggggcgccctctccactgcgcgcggtacaaggaaatggtagaactagtgatctcacccagcctcactgtaaacagcgattgtctggataaactgaagtttaaccgtgctgacgctgctgtgtggactctgagtgacagacaaggcatcaccaaatcggcccccctgagagtgtcccagctcttctccagatcttgcccacgtgtcctcccccgccagccttccacagccatggcagcctacggccagacgcagtacagtgcggggatccagcaggctaccccctatacagcttacccacctccagcacaagcctatggaatcccttcctacagcatcaagacagaagacagcttgaaccattcccctggccagagtggattcctcagctatggctccagcttcagcacctcacccactggacagagcccatacacctaccagatgcacggcacaacagggttctatcaaggaggaaatggactgggcaacgcagccggtttcgggagtgtgcaccaggactatccttcctaccccggcttcccccagagccagtacccccagtattacggctcatcctacaaccctccctacgtcccggccagcagcatctgcccttcgcccctctccacgtccacctacgtcctccaggaggcatctcacaacgtccccaaccagagttccgagtcacttgctggtgaatacaacacacacaatggaccttccacaccagcgaaagagggagacacagacaggccgcaccgggcctccgacgggaagctccgaggccggtctaagaggagcagtgacccgtccccggcaggggacaatgagattgagcgtgtgttcgtgtgggacttggatgagacaataattatttttcactccttactcacggggacatttgcatccagatacgggaaggacaccacgacgtccgtgcgcattggccttatgatggaagagatgatcttcaaccttgcagatacacatctgttcttcaatgacctggaggattgtgaccagatccacgttgatgacgtctcatcagatgacaatggccaagatttaagcacatacaacttctccgctgacggcttccacagttcggccccaggagccaacctgtgcctgggctctggcgtgcacggcggcgtggactggatgaggaagctggccttccgctaccggcgggtgaaggagatgtacaatacctacaagaacaacgttggtggtgagtactgtgagccttgggcctccgaggaagggaaactcattgggatggatgctgtcagtgcgccaggcagagaggttcacaagttcagtaccagcccacttaatgcaaccctgacgacacccttcggaatagagcactgggattttgtcaccttcactttgggggtgggaaagctgagggacggaggctgcatctggtccaagatccttcaggccacaaatggcgcggggtgg

SEQ ID NO: 34004 - DNA, 1458 bp, Homo sapiens
  misc_feature (4)..(5): n is a, c, g, or t
ggcnngagggcgcgctctgctcggctgcaggctcaggaagcggcgcggcggcagctgctgggccagagccccgcgccctgcgtccagccgccgggtgtgtgcgcccgcgtagcccagcgtcgcgcctcggcgcccccacgcgcccacgcagcggcgcggggacccgggcgggggcagagggagggcccggcccagggaggagaaggggccggtcctcccggcgcaggcagcagccgcggcagcccaggaggcggaggcagcggcaacggcagagacagcaacgtgcccgccgcagtcagcccggcctcgtcggacccgcaccggcccgcccgcccgcccgcaccgcgtcggggcgccctctccactgcgcgcggtacaaggaaatggtagaactagtgatctcacccagcctcactgtaaacagcgattgtctggataaactgaagtttaaccgtgctgacgctgctgtgtggactctgagtgacagacaaggcatcaccaaatcggcccccctgagagtgtcccagctcttctccagatcttgcccacgtgtcctcccccgccagccttccacagccatggcagcctacggccagacgcagtacagtgcggggatccagcaggctaccccctatacagcttacccacctccagcacaagcctatggaatcccttcctacagcatcaagacagaagacagcttgaaccattcccctggccagagtggattcctcagctatggctccagcttcagcacctcacccactggacagagcccatacacctaccagatgcacggcacaacagggttctatcaaggaggaaatggactgggcaacgcagccggtttcgggagtgtgcaccaggactatccttcctaccccggcttcccccagagccagtacccccagtattacggctcatcctacaaccctccctacgtcccggccagcagcatctgcccttcgcccctctccacgtccacctacgtcctccaggaggcatctcacaacgtccccaaccagagttccgagtcacttgctggtgaatacaacacacacaatggaccttccacaccagcgaaagagggagacacagacaggccgcaccgggcctccgacgggaagctccgaggccggtctaagaggagcagtgacccgtccccggcaggggacaatgagattgaggaaaagcaacttaaggatgtattcaagcaaaacaaggaagaaaaccaaggaagagagacttgggatccagaaaacagtggatccaacccagaaatacaatgaagggaagtctgcagcaagcctaaaaatgatccagtccacattggaggtttctatcactgaggatagatatctccaatacagagtgtgtggctgaatttgacattttaatgaaggtacattgttgcaaacaagaaaaaattaataaattctgacaaaaccaaaaaagtta

SEQ ID NO: 34005 - DNA, 1342 bp, Homo sapiens
gagagagttctggcgagggctgcgggaaggaaagggggcggcgtccttcacagggagggtgcagctgacctccctccccttgtgcagactggaaaagaatggcccagatcctctggactcctcagatgagcggattcagagagaagcttttgagagcgtgctggcggagacatttttcacaaaagagcccttgcggtgctggtgtccgtggcgtgcctgggaaggcccaccaacgctggccggcctccaagcacccgggcctctgctcatgtacagctcctgaactgccctgcctctgagttactgtggaaaatgagcttatatatgaagaagtcagcgagtggacaaagccaggcgcaatggatagcaaagatgtggaagtctcctcgattcaagttagaagaaaaccgcagcatggagtctgctctcagctgttggggaattaccgatgcctttgactaagtcaagactgacttttccagaatatcacccaagagatagagccgtccctgtccaagtttgtgcgctagcccttcatggaggtcagagaggaagaaacaaaggcagctgtggcctcggcggtcacagtgtcagaacgcacaagccccataaagaggtttcacgcaggccacccatcccttttcattctccagcagaacaggacagagagcgttctgttctgcggaaggtcttccactctacaaggcaatccctccagctgctttgctgtattgtgctgtctcctgtcacactatgaatgcagtgacctcagccagcaacagggagaacccccctgcctcccgaacaaaggacctcacgtgaaatcctgagctcagagcttacagatatgtgtgcgctttcactttacatcggccgtgacttccaaacaacttcaggaaactttaggatctctgaggtatactggagatgacagcagcgtagaatgttcatttggatttagaacagaaatgcttattttatatttggctgctcccaaactgtccccagacttcctctccagtggttaccctccactgccctggatgtcccacgtttacactccacactcacacctccaccttaacaaagtcctccactgggtcaaaccatacatcgcttcgtctctgtagtgatgacttcctgtcctctgctctgtggataaagaccccagataaagatgcctgtgttgctcaactcttgtaaatactcttgagacattttgaaagcagaaggaaaggagacagacggggaaaataaaagggatggtctgcttgtgcggaaacgttttgagaatgcccttccctaagagagaacagtaaaagtgagcaatacttcctgagct

SEQ ID NO: 34006 - DNA, 1257 bp, Homo sapiens
gagagagttctggcgagggctgcgggaaggaaagggggcggcgtccttcacagggagggtgcagctgacctccctccccttgtgcagactggaaaagaatggcccagatcctctggactcctcagatgagcggattcagagagaagcttttgagagcgtgctggcggagacatttttcacaaaagagcccttgcggtgctggtgtccgtggcgtgcctgggtggaaaatgagcttatatatgaagaagtcagcgagtggacaaagccaggcgcaatggatagcaaagatgtggaagtctcctcgattcaagttagaagaaaaccgcagcatggagtctgctctcagctgttggggaattaccgatgcctttgactaagtcaagactgacttttccagaatatcacccaagagatagagccgtccctgtccaagtttgtgcgctagcccttcatggaggtcagagaggaagaaacaaaggcagctgtggcctcggcggtcacagtgtcagaacgcacaagccccataaagaggtttcacgcaggccacccatcccttttcattctccagcagaacaggacagagagcgttctgttctgcggaaggtcttccactctacaaggcaatccctccagctgctttgctgtattgtgctgtctcctgtcacactatgaatgcagtgacctcagccagcaacagggagaacccccctgcctcccgaacaaaggacctcacgtgaaatcctgagctcagagcttacagatatgtgtgcgctttcactttacatcggccgtgacttccaaacaacttcaggaaactttaggatctctgaggtatactggagatgacagcagcgtagaatgttcatttggatttagaacagaaatgcttattttatatttggctgctcccaaactgtccccagacttcctctccagtggttaccctccactgccctggatgtcccacgtttacactccacactcacacctccaccttaacaaagtcctccactgggtcaaaccatacatcgcttcgtctctgtagtgatgacttcctgtcctctgctctgtggataaagaccccagataaagatgcctgtgttgctcaactcttgtaaatactcttgagacattttgaaagcagaaggaaaggagacagacggggaaaataaaagggatggtctgcttgtgcggaaacgttttgagaatgcccttccctaagagagaacagtaaaagtgagcaatacttcctgagct

SEQ ID NO: 34007 - DNA, 1395 bp, Homo sapiens
gagagggggaggcaggaagagaagcaaagatagcaattcttaaggcctgttatctattagttacccttgccttggcggcagacacagctgagtcctaacgcagacttttccatatcccctctcccgcctcaacagtgatctctcctcccacttcgagagttaattcagtgctgctttagctttacgcccccatgaaaacaggaaaacggtttgcagctttatcataaccttgcttatgtctgttgttgtatgtctcaaataccctgtcctcaggaaggcccaccaacgctggccggcctccaagcacccgggcctctgctcatgtacagctcctgaactgccctgcctctgagttactgtggaaaatgagcttatatatgaagaagtcagcgagtggacaaagccaggcgcaatggatagcaaagatgtggaagtctcctcgattcaagttagaagaaaaccgcagcatggagtctgctctcagctgttggggaattaccgatgcctttgactaagtcaagactgacttttccagaatatcacccaagagatagagccgtccctgtccaagtttgtgcgctagcccttcatggaggtcagagaggaagaaacaaaggcagctgtggcctcggcggtcacagtgtcagaacgcacaagccccataaagaggtttcacgcaggccacccatcccttttcattctccagcagaacaggacagagagcgttctgttctgcggaaggtcttccactctacaaggcaatccctccagctgctttgctgtattgtgctgtctcctgtcacactatgaatgcagtgacctcagccagcaacagggagaacccccctgcctcccgaacaaaggacctcacgtgaaatcctgagctcagagcttacagatatgtgtgcgctttcactttacatcggccgtgacttccaaacaacttcaggaaactttaggatctctgaggtatactggagatgacagcagcgtagaatgttcatttggatttagaacagaaatgcttattttatatttggctgctcccaaactgtccccagacttcctctccagtggttaccctccactgccctggatgtcccacgtttacactccacactcacacctccaccttaacaaagtcctccactgggtcaaaccatacatcgcttcgtctctgtagtgatgacttcctgtcctctgctctgtggataaagaccccagataaagatgcctgtgttgctcaactcttgtaaatactcttgagacattttgaaagcagaaggaaaggagacagacggggaaaataaaagggatggtctgcttgtgcggaaacgttttgagaatgcccttccctaagagagaacagtaaaagtgagcaatacttcctgagct

SEQ ID NO: 34008 - DNA, 1241 bp, Homo sapiens
gagagggggaggcaggaagagaagcaaagatagcaattcttaaggcctgttatctattagttacccttgccttggcggcagacacagctgagtcctaacgcagacttttccatatcccctctcccgcctcaacagtgatctctcctcccacttcgagagttaattcagtgctgctttagctttacgcccccatgaaaacaggaaaacggtttgcagctttatcataaccttgcttatgtctgttgttgtatgtctcaaataccctgtcctcaggaaggcccaccaacgctggccggcctccaagcacccgggcctctgctcatgtacagctcctgaactgccctgcctctgagttactgtggaaaatgagcttatatatgaagaagtcagcgagtggacaaagccaggcgcaatggatagcaaagatgtggaagtctcctcgattcaagttagaagaaaaccgcagcatggagtctgctctcagctgttggggaattaccgatgcctttgactaagtcaagactgacttttccagaatatcacccaagagatagagccgtccctgtccaagtttgtgcgctagcccttcatggaggtcagagaggaagaaacaaaggcagctgtggcctcggcggtcacagtgtcagaacgcacaagccccataaagaggtttcacgcaggccacccatcccttttcattctccagcagaacaggacagagagcgttctgttctgcggaaggtcttccactctacaaggcaatccctccagctgctttgctgtattgtgctgtctcctgtcacactatgaatgcagtgacctcagccagcaacagggagaacccccctgcctcccgaacaaaggacctcacgtgaaatcctgagctcagagcttacagatatgtgtgcgctttcactttacatcggccgtgacttccaaacaacttcaggaaactttaggatctctgaggtatactggagatgacaccgagtgcctgcgtcccagatgcaaatcagtaagaaccacccgagacagtgacagacaggtgacagcgagtgcctgcgtcccaggtgcaaatcagtaagaaccacccgagacagtgacagacaggtgacacggagtgcctgcgtcccaggtgcaaatcagtatagaacacccgagacagtgacagacaggtgacagcaagtgcctgcgtcccgggtgcaaatcagtaagaaccacccgagactgcctcgccaaat

SEQ ID NO: 34009 - DNA, 331 bp, Homo sapiens
gatcacttgttaaatacaaaattttaaaacataccacaatatttggcacttcattttctttattaaacaaggagactcagaaaatcatagtggcctgggcccatgtgaacctctgtgaaagcctcccacagggagagaggactgggatgccatggtcctaggtgggaatggggggagcagtgtaggcctcggtgcggacccaatgctggggccctaaggctctctcctcttttcttccaggtggaaaatgagcttatatatgaagaagtcagcgagtggacaaagccaggcgcaatggatagcaaagatgtggaagtctcctcgattcaag

SEQ ID NO: 34010 - DNA, 105 bp, Homo sapiens
gttttttgcaatttgatataaatggaatgataaaatccttttaatctgactcttttcacttaatatgatgtttttcagattcttccatattgttgcttgtatcag

SEQ ID NO: 34011 - DNA, 776 bp, Homo sapiens
atatttccgaggaggaaacttcatgcgcagggatctttcttagtggatttaatggctaaaaggtctgtctgaatccaggacgctggctttagccttcctcggcagctgccgtaaccccggtgtctaaacctgaagcatcccaggagcacccactccaggagttttctcggccgcggaactcattagttagagcgccctcttgtgttctcatgtggtaatcggtcactgaaggacttaaaatggtccttagccaacacacagtaaaacttttccctcttctgaccccaagaggtcagccacccatttcatgagcatatactggtcgccccatcagcgttctctgattggctaactgaacccactccccgacctagactcaagacaggcgaagtgacgcttaggtcaacattcactcactaaagcaacgactgtcgggcgattttgtctcccgctggttttggaatggtgtctggagacatttttggttgtcacagctgggtgggtgtgctcccggcatctggtgggtagaaaccaagcatgctcctaaacatcctacaggcacagaaccgtctcccacgaccaagcatgatcaagtcccaaatgccaataatggccaggttgagaaactctgcacagaagcatccagttatttgtctgtttgctcaacaagcttgtgctcatcatgctctgtgttcctgacgctgtgctgggtgttggcggtgggaagattacaagagtcacatggcagctgtcctcctggaaggtacaacccagta

SEQ ID NO: 34012 - DNA, 503 bp, Homo sapiens
agctgctctaggctgaggcaggagaatctcttgaacctgggaggcggaagttgcagtgaagtatgattgtgccactgcactcctacctgggctacagagtgagactctgtctccaaaaaaaaaaaaagaacaatgattccttgatacccagtccatatagtatgatcccacttgtctcaaaaatatcttttgaaagttaatttgttgtctctctcaagtgtctaatctagagcagtctcctcttcctctcacctccttttttatccttgcaattgaattgttggagtcaattgctcttaaaagaatgtacagcatttcggagttgtcttttgcttcctagaggtgtcttttaaccagttcttccactatattttttgtaaaaggaatcagctgtaaagatgtaaccagaggttcagcaaaccaccatggcacacgtatacctatgtaacaaacctgcacgttctgcacatgtacccctccagaacttaaagtgtaaaaaaaaa

SEQ ID NO: 34013 - DNA, 386 bp, Homo sapiens
gccctggtccgcgcctgccccgttgctttcctcaggctctaaggcccgcggtgtggagcgcggcgtctgttgagattgtctattttttcttgagtcagccgtctgaaaagaacacgaggtggacagggcagagcggtcaaggaaagccataggaggagggcacttatttgagcaaagaccggcgggacgtgggcgtcgaggacatcctgaggttcccaccaagtggacattggcttattctacaagcaacaggatgaggcccctggactcctcactagcaaaatagtgcagtgacagcaacacccccccccacacacacacacacaaagatgtccacatcttaattcctggaacctgtgaatgtgtgaccttacctggtgtcttag

SEQ ID NO: 34014 - DNA, 1561 bp, Homo sapiens
ggaacgccgtgagagtttgcattccgaggatttggtctgagaacctcaccagcgaaatagagaactgcccccgggagagccggcccacgtgccgcccaccggcgccttgacggcagggagaggtcgagcttccagggagcgggcgcccggcgcggggctcccagcctgtctgtacctggtcgagacaccccgtgccagaggcggaacatgtatgaaatgccaggtgcccagaggacccaggcagtccgtcattcacataccaacccacgtgcaggcttcaattcaaccttgaagccatttgggcctgggcttttttgatgacttatttgattcatagttttttggttactaattgagtctcttcacttgttataggtctgttgagattgtctattttttcttgagtcagccgtctgaaaagaacacgaggtggacagggcagagcggtcaaggaaagccataggaggagggcacttatttgagcaaagaccggcgggacgtgggcgtcgagggtaaggatatctgcagaagtactgtcttgagcaaggagcacggcagacagagcctctgagacacgagagcctggagtgtaagaaacacagtagaggccactaagtcgagaacgcaggagctggaaggactggtaggaaatgggaggtggggacatggagggatgcagacaggtcctgcacagtcagaactgtggccccttctctgcaggaaatgggcagccttcggaagactgagcacacggaaggatatgactaaccctttaaaagggtcattctgactcctgggtgaagaacagactaggaagggctgaggaggaggcaggaggccatctactgttatatgggatgtggagtgtgacccggaaaggtcaagtgtgactctaagggctttttgtgtactgatcttttatcctgcaaccttgctaaacccatttattagttcttcttgtcttttagtggcatttattagttgttctagtgttttagtggattccttgggattttatacaaaagcgtgtcatttgtgaatagagatcagtttatctcttcctttctaatctggatgccttttatttcttctccttgcctagctgccctatctagaagctccagtacaatattgactagaagcagcaagagtggacatccttgtcttgctcctgatttcagggaggaggcatccagtctttcacctttgggcattaaaagcattatctgaatctcaaagaaaagtccaagacctgatggtttcctggtgaattctaccaaacgtgtaaagaagaactaatacgagcccttcataaacatttccaaaaaactgaagagaagggaacacttcttaacgcattctatgaggccagcattaccctggtaccaaagccagacatacacatgacaagaaaagaaaactacagaccaatattccttatgaacactgatgcaaaaaacctcaacaaagtactggcaaacttcagcggcatattgaaaggattatacactatgaccaaggagatttattcctggaattcaaggatggcttagtatacaaa

SEQ ID NO: 34015 - DNA, 1612 bp, Homo sapiens
ggaacgccgtgagagtttgcattccgaggatttggtctgagaacctcaccagcgaaatagagaactgcccccgggagagccggcccacgtgccgcccaccggcgccttgacggcagggagaggtcgagcttccagggagcgggcgcccggcgcggggctcccagcctgtctgtacctggtcgagacaccccgtgccagaggcggaacatgtatgaaatgccaggtgcccagaggacccaggcagtccgtcattcacataccaacccacgtgcaggcttcaattcaaccttgaagccatttgggcctgggcttttttgatgacttatttgattcatagttttttggttactaattgagtctcttcacttgttataggtctgttgagattgtctattttttcttgagtcagccgtctgaaaagaacacgaggtggacagggcagagcggtcaaggaaagccataggaggagggcacttatttgagcaaagaccggcgggacgtgggcgtcgagggtaaggatatctgcagaagtactgtcttgagcaaggagcacggcagacagagcctctgagacacgagagcctggagtgtaagaaacacagtagaggccactaagtcgagaacgcaggagctggaaggactggtaggaaatgggaggtggggacatggagggatgcagacaggtcctgcacagtcagaactgtggccccttctctgcaggaaatgggcagccttcggaagactgagcacacggaaggatatgactaaccctttaaaagggtcattctgactcctgggtgaagaacagactaggaagggctgaggaggaggcaggaggccatctactgttatatgggatgtggagtgtgacccggaaaggtcaagtgtgactctaagggctttttgtgtactgatcttttatcctgcaaccttgctaaacccatttattagttcttcttgtcttttagtggcatttattagttgttctagtgttttagtggattccttgggattttatacaaaagcgtgtcatttgtgaatagagatcagtttatctcttcctttctaatctggatgccttttatttcttctccttgcctagctgccctatctagaagctccagtacaatattgactagaagcagcaagagtggacatccttgtcttgctcctgatttcagggaggaggcatccagtctttcacctttgggtatgatgatagctgtgggtgcttaaaaaataggttttatcaggcgtgagctaccacgcccagccgaggaagtatcttctatttctagtttgttgagtgtgtttatcatgaaaacgtgtcagatttggttaaatgatttttccacatccattgagatgatgatcatgggtttttttccttgttctagtaatgtggtgtgttacattaattgactttcagatattgaaaagacacttatcccctgcgttcagataaattccagttggtcatggagtatctgtcttcctggattcagtttaatacaattttgttgagtgattttttttatccatattcatcatagatactggtctgaagttttcttgtggtgtctgtgtctggttttggtatcggtatcagtgt

SEQ ID NO: 34016 - DNA, 1483 bp, Homo sapiens
ggaacgccgtgagagtttgcattccgaggatttggtctgagaacctcaccagcgaaatagagaactgcccccgggagagccggcccacgtgccgcccaccggcgccttgacggcagggagaggtcgagcttccagggagcgggcgcccggcgcggggctcccagcctgtctgtacctggtcgagacaccccgtgccagaggcggaacatgtatgaaatgccaggtgcccagaggacccaggcagtccgtcattcacataccaacccacgtgcaggcttcaattcaaccttgaagccatttgggcctgggcttttttgatgacttatttgattcatagttttttggttactaattgagtctcttcacttgttataggtctgttgagattgtctattttttcttgagtcagccgtctgaaaagaacacgaggtggacagggcagagcggtcaaggaaagccataggaggagggcacttatttgagcaaagaccggcgggacgtgggcgtcgagggtaaggatatctgcagaagtactgtcttgagcaaggagcacggcagacagagcctctgagacacgagagcctggagtgtaagaaacacagtagaggccactaagtcgagaacgcaggagctggaaggactggtaggaaatgggaggtggggacatggagggatgcagacaggtcctgcacagtcagaactgtggccccttctctgcaggaaatgggcagccttcggaagactgagcacacggaaggatatgactaaccctttaaaagggtcattctgactcctgggtgaagaacagactaggaagggctgaggaggaggcaggaggccatctactgttatatgggatgtggagtgtgacccggaaaggtcaagtgtgactctaagggctttttgtgtactgatcttttatcctgcaaccttgctaaacccatttattagttcttcttgtcttttagtggcatttattagttgttctagtgttttagtggattccttgggattttatacaaaagcgtgtcatttgtgaatagagatcagtttatctcttcctttctaatctggatgccttttatttcttctccttgcctagctgccctatctagaagctccagtacaatattgactagaagcagcaagagtggacatccttgtcttgctcctgatttcagggaggaggcatccagtctttcacctttgggtatgatgatagctgtgggtgcttaaaaaataggttttatcaggcgtgagctaccacgcccagccgaggaagtatcttctatttctagtttgttgagtgtgtttatcatgaaaacgtgtcagatttggttaaatgatttttccacatccattgagatgatgatcatgggtttttttccttgttctagtaatgtggtgtgttacattaattgactttcagatattgaaaagacacttatcccctgcgttcagataaattccagttggtcatgga

SEQ ID NO: 34017 - DNA, 1625 bp, Homo sapiens
ggaacgccgtgagagtttgcattccgaggatttggtctgagaacctcaccagcgaaatagagaactgcccccgggagagccggcccacgtgccgcccaccggcgccttgacggcagggagaggtcgagcttccagggagcgggcgcccggcgcggggctcccagcctgtctgtacctggtcgagacaccccgtgccagaggcggaacatgtatgaaatgccaggtgcccagaggacccaggcagtccgtcattcacataccaacccacgtgcaggcttcaattcaaccttgaagccatttgggcctgggcttttttgatgacttatttgattcatagttttttggttactaattgagtctcttcacttgttataggtctgttgagattgtctattttttcttgagtcagccgtctgaaaagaacacgaggtggacagggcagagcggtcaaggaaagccataggaggagggcacttatttgagcaaagaccggcgggacgtgggcgtcgagggtaaggatatctgcagaagtactgtcttgagcaaggagcacggcagacagagcctctgagacacgagagcctggagtgtaagaaacacagtagaggccactaagtcgagaacgcaggagctggaaggactggtaggaaatgggaggtggggacatggagggatgcagacaggtcctgcacagtcagaactgtggccccttctctgcaggaaatgggcagccttcggaagactgagcacacggaaggatatgactaaccctttaaaagggtcattctgactcctgggtgaagaacagactaggaagggctgaggaggaggcaggaggccatctactgttatatgggatgtggagtgtgacccggaaaggtcaagtgtgactctaagggctttttgtgtactgatcttttatcctgcaaccttgctaaacccatttattagttcttcttgtcttttagtggcatttattagttgttctagtgttttagtggattccttgggattttatacaaaagcgtgtcatttgtgaatagagatcagtttatctcttcctttctaatctggatgccttttatttcttctccttgcctagctgccctatctagaagctccagtacaatattgactagaagcagcaagagtggacatccttgtcttgctcctgatttcagggaggaggcatccagtctttcacctttgggtatgatgatagctgtgggtgcttaaaaaataggttttatcaggctgggcacagtggctcacgcctgtaatcccaaccctttgggaggtcgaggcgggcggatcacgtggggtccagagctggtcttgaactcctgacctccagtaatccacccccctgggcctcccaaaatgctgggattataggcgtgagctaccacgcccagccgaggaagtatcttctatttctagtttgttgagtgtgtttatcatgaaaacgtgtcagatttggttaaatgatttttccacatccattgagatgatgatcatgggtttttttccttgttctagtaatgtggtgtgttacattaattgactttcagatattgaaaagacacttatcccctgcgttcagataaattccagttggtcatgga

SEQ ID NO: 34018 - DNA, 1820 bp, Homo sapiens
ggaacgccgtgagagtttgcattccgaggatttggtctgagaacctcaccagcgaaatagagaactgcccccgggagagccggcccacgtgccgcccaccggcgccttgacggcagggagaggtcgagcttccagggagcgggcgcccggcgcggggctcccagcctgtctgtacctggtcgagacaccccgtgccagaggcggaacatgtatgaaatgccaggtgcccagaggacccaggcagtccgtcattcacataccaacccacgtgcaggcttcaattcaaccttgaagccatttgggcctgggcttttttgatgacttatttgattcatagttttttggttactaattgagtctcttcacttgttataggtctgttgagattgtctattttttcttgagtcagccgtctgaaaagaacacgaggtggacagggcagagcggtcaaggaaagccataggaggagggcacttatttgagcaaagaccggcgggacgtgggcgtcgagggtaaggatatctgcagaagtactgtcttgagcaaggagcacggcagacagagcctctgagacacgagagcctggagtgtaagaaacacagtagaggccactaagtcgagaacgcaggagctggaaggactggtaggaaatgggaggtggggacatggagggatgcagacaggtcctgcacagtcagaactgtggccccttctctgcaggaaatgggcagccttcggaagactgagcacacggaaggatatgactaaccctttaaaagggtcattctgactcctgggtgaagaacagactaggaagggctgaggaggaggcaggaggccatctactgttatatgggatgtggagtgtgacccggaaaggtcaagtgtgactctaagggctttttgtgtactgatcttttatcctgcaaccttgctaaacccatttattagttcttcttgtcttttagtggcatttattagttgttctagtgttttagtggattccttgggattttatacaaaagcgtgtcatttgtgaatagagatcagtttatctcttcctttctaatctggatgccttttatttcttctccttgcctagctgccctatctagaagctccagtacaatattgactagaagcagcaagagtggacatccttgtcttgctcctgatttcagggaggaggcatccagtctttcacctttgggcaaccaactgctgcagcagcatcagcagtgtccgggactccacctcctacagaagtcgtggatgtctcacatcacatcaccattgctgcagatgccacagaataccattctgctcatcattgctccaaaattaccataactcctggaccagctgcttgattacattatttaatgcattcataaagaggcacatgcagtactgtaccaccgtttaaaatttgtgatgaaagtactttaatttcatttttaattttgtaggcattaaaagcattatctgaatctcaaagaaaagtccaagacctgatggtttcctggtgaattctaccaaacgtgtaaagaagaactaatacgagcccttcataaacatttccaaaaaactgaagagaagggaacacttcttaacgcattctatgaggccagcattaccctggtaccaaagccagacatacacatgacaagaaaagaaaactacagaccaatattccttatgaacactgatgcaaaaaacctcaacaaagtactggcaaacttcagcggcatattgaaaggattatacactatgaccaaggagatttattcctggaattcaaggatggcttagtatacaaa

SEQ ID NO: 34019 - DNA, 1039 bp, Homo sapiens
ggaacgccgtgagagtttgcattccgaggatttggtctgagaacctcaccagcgaaatagagaactgcccccgggagagccggcccacgtgccgcccaccggcgccttgacggcagggagaggtcgagcttccagggagcgggcgcccggcgcggggctcccagcctgtctgtacctggtcgagacaccccgtgccagaggcggaacatgtatgaaatgccaggtgcccagaggacccaggcagtccgtcattcacataccaacccacgtgcaggcttcaattcaaccttgaagccatttgggcctgggcttttttgatgacttatttgattcatagttttttggttactaattgagtctcttcacttgttataggtctgttgagattgtctattttttcttgagtcagccgtctgaaaagaacacgaggtggacagggcagagcggtcaaggaaagccataggaggagggcacttatttgagcaaagaccggcgggacgtgggcgtcgagggtaaggatatctgcagaagtactgtcttgagcaaggagcacggcagacagagcctctgagacacgagagcctggagtgtaagaaacacagtagaggccactaagtcgagaacgcaggagctggaaggactggtaggaaatgggaggtggggacatggagggatgcagacaggtcctgcacagtcagaactgtggccccttctctgcaggaaatgggcagccttcggaagactgagcacacggaaggatatgactaaccctttaaaagggtcattctgactcctgggtgaagaacagactaggaagggctgaggaggaggcaggaggccatctactgttatatgggatgtggagtgtgacccggaaaggtcaagtgtgactcaggtggtgtgactcaggtggtgtgactcaggtggtgtgactcaggtggtgtgactcaggtggtgtgactcaggtggtgtgactcaggtggtgtgactcaggtggtgtgactcaggtggtgtgactcaggtggtggggtgcccagct

SEQ ID NO: 34020 - DNA, 654 bp, Homo sapiens
ggcctttaaccaaaatttaacattttcctgaattatgaatctaggcaaccaactgctgcagcagcatcagcagtgtccgggactccacctcctacagaagtcgtggatgtctcacatcacatcaccattgctgcagatgccacagaataccattctgctcatcattgctccaaaattaccataactcctggaccagctgcttgattacattatttaatgcattcataaagaggcacatgcagtactgtaccaccgtttaaaatttgtgatgaaagtactttaatttcatttttaattttgtaggcattaaaagcattatctgaatctcaaagaaaagtccaagacctgatggtttcctggtgaattctaccaaacgtgtaaagaagaactaatacgagcccttcataaacatttccaaaaaactgaagagaagggaacacttcttaacgcattctatgaggccagcattaccctggtaccaaagccagacatacacatgacaagaaaagaaaactacagaccaatattccttatgaacactgatgcaaaaaacctcaacaaagtactggcaaacttcagcggcatattgaaaggattatacactatgaccaaggagatttattcctggaattcaaggatggcttagtatacaaa

SEQ ID NO: 34021 - DNA, 739 bp, Homo sapiens
ccctttaaaagggtcattctgactcctgggtgaagaacagactaggaagggctgaggaggaggcaggaggccatctactgttatatgggatgtggagtgtgacccggaaaggtcaagtgtgactctaagggctttttgtgtactgatcttttatcctgcaaccttgctaaacccatttattagttcttcttgtcttttagtggcatttattagttgttctagtgttttagtggattccttgggattttatacaaaagcgtgtcatttgtgaatagagatcagtttatctcttcctttctaatctggatgccttttatttcttctccttgcctagctgccctatctagaagctccagtacaatattgactagaagcagcaagagtggacatccttgtcttgctcctgatttcagggaggaggcatccagtctttcacctttgggtatgatgatagctgtgggtgcttaaaaaataggttttatcaggctgggcacagtggctcacgcctgtaatcccaaccctttgggaggtcgaggcgggcggatcacgtggggtccagagtttgagaccagcctggccaacatggagaaatcccatctctactaaaaatacaaaaagttagctgaggttggtggccggtgcctgtaatcccagctaaaaaagggaaactgtctaaaaatcattaaaaaaaagggtacttcctcaacctgataaaacctattttttgtttgtttgagat

SEQ ID NO: 34022 - DNA, 350 bp, Homo sapiens
aggtccaaaatgaccaagggagcaggcagtgcagtgaggagaggactcaaactcagatgggcaaggcaccagtgcccacatctgggcccacctggccctcagtggctccagctctttaagcaacagcatgtggctgagatttgagacaggcagatgatacagtgtgggacctctcgtcactgcccaacgatgttacctcaggagaagcactgactctctgggctttggttctctacctcctacccatggccaagaggcatagcgggttcagtgggtatttggaaaacagcacaagctaagcttgccccactttgcccagtttccagtcaggaatgaccaagatgcgaacc

SEQ ID NO: 34023 - DNA, 605 bp, Homo sapiens
gctcgaccttgggaaaaaagggaccggaagcatgttttatttacctcatagaaaacacatctggagccgggcacagtagctcgcacctgtaatcccaaggagtgtctgcccatcttgctcgggctgactcaccgtcatccttcagaccacattgataccatgtccttctggaaagcattccaatccccccaacccccacccccaggtgggttcatggcccattccaagtgctcccgtaccaggcagtgatgattgcattcttttgccattgccctttcaccagactcagagtgccagtgggcagtgagcacacagcttttgcaccattgcattttcagcatgtagcatgtggcaggctctgggggaggggaggatcagagtgagtgagaagcagagtatcatggtcaaggtagaaacccccagggccagtcagacctaggctcagataacagcactgtgttatcgtctaactttggacaaatttaacctttctgtgcctcagctgctgcttctggatattgaggatgacagtagtatttacatgaggggttgtgatgataagttcacatgtgtaaagctctgagcgcccacaacgtaatgttgtc

SEQ ID NO: 34024 - DNA, 447 bp, Homo sapiens
gaatgaataatcaagctttggcatttttattcaatgaaatatgcagcaataaaaagaaccaactactgacatgcagcaatatgaataaatctcgaaaacattatattgagcaaaggaagctagtcataaaattgtacataatttactacagtattttagttttatgaagttctaaaacagacaaagccaatcaatgatggagaaaaatttgaacagtagttttcttggggtgtggtcaggattggtgattgagaagggacacaaaagattttgctagggtgatagtaatgttgtataatgatgggctttgagttataaaagtatatacatttttcagaactaagtaaaatgtgtgtgtaaattaattgtgtattaattgtacatcaaaaggaaaaaattgaacattgaactctaattaatggcagagcatgtggaaagatctaggag

SEQ ID NO: 34025 - DNA, 674 bp, Homo sapiens
aatgggctaagtgaatacttataacaactaaaatactaaatcttattttgcttgactttcatcaatttttttaagacatagttgacaacatctaattactcatttccttctaacttgcacatcttgtgaatatgataggaaggcaaactaagagtctgagaaaatagaaattgtattaatagctcttagaaattgatcttcattcattcatttaaaaaacattagtaagtgtctactatatgctcagcactgtgctggaccctgggacacaaagatgaatgacaagtctctgctttcaagggactcaatattcagtgagtcatatagaccagcaaacatgctcgtaattataatttgttgtcacagttgccagggtagaaagtgtataggggctctgacctggaagactcgggcatgctgacatgtgggggagaccccttaagagagctatgaaagtgtggctggctaaggctagcttgaggaccatgaaagtgaccagggaatctttagattacagtaaaaagtaaagatggggtgatttaggcagatggtatgaaccttcaagaaataagtgcttttacacaagtgcagagggttagtgatttggaagttacgttgaaaatcccgtgaataccaaccctaccctgaccacaataagttaacagaaaaaaaaa

SEQ ID NO: 34026 - DNA, 498 bp, Homo sapiens
tgggtcttgcattgtggattcaacaaaccttcagttgaaaatatctgggaaaagaagttgatgtttgcatctgtactgaacttgtacaggctttttttcttgtcattatgccctaaaaaatagaatataacaactatgtacatagtatttacatggttattaggtgttataagtaatctagagagggtttaaagaatatgggaggatttccatagattatatgcaaataccgtgttcattttatataagggacttgagcatctgtgtatgttggtggggaggggtcctggagggacactgagggatgactatgtgaaagtggtttgcgaatatgctcaagtctctggatgaattgtatgacagtgaaggggtatgtgattagactgttgtggctttgaggttgatgtgtatgttttaaaggattatgattgagttggagatcatgtgagatttggtgtgtttaaatgtgacatgaattaaaatccgaatgaaagattg

SEQ ID NO: 34027 - DNA, 350 bp, Homo sapiens
acaaagagcatccaggaatattttactggatactgtgagaattgaaggagactttcaagataaatgaaattcaagaggccaacatggggaggaatgcattccaggtaggggaactggctacttgtgagttctttgagaatcccaaaattactatctttgaagttttccaagtctttcacattttgtacttttccacaaagttaacagttgccaaataccaaataattttatattttactatataatgtgggagattaatgttgttcaactgtaggagaggttctttttaattctgggttatataagagtaataataagtacttacatagttcctactatgttccaggcac

SEQ ID NO: 34028 - DNA, 310 bp, Homo sapiens
tttttttacaaatggtagcagttctgttcggcctactgccactggactgccatgtatgtaagtcccctcgataaactctgtgttttggttgccggctctgggtcccttctttggcctctcaaacatggtgccatccctattgaagtcaataggttctggcatgacactcattaacatggataactctaatgatacactatctttggtcaacattcacagaaaaatttaaatcttacactaattcaactattacattctctacttctgggttgctaagttttgttggataaaattatgctttctcccactg

SEQ ID NO: 34029 - DNA, 580 bp, Homo sapiens
ggctgatagatggtggagctgggcagttggcactaccattcagtctgccttataccaataacgaagttgtttttgcaactgaaaactgacctgagcatgtatgattgggtttactcactaaaaagggaggtctaggagataaaggggacagttagacctttggagtaccaggatcaccttgagatgacaaagccaacctggctcatgataattcatttcagcacattattgacgcaaactagagagcagagaggcaggcaaaccttgctaaccaaacaaatatgctgccacccccaggacatcataagtcacctggggacaggatgtgctcctgaatcccttcagagactggatgtcctcaaaacagcccagttagaaggattgatgggtcgagctagtcacacaaatgaaaatatccatgtggacctcaaccggctgctgttgcttcctaagtcccttagtaattcataaacccaaatccaatgaatgctaaaatgacttgcagctgaagtctcgatcacactgtgctgaaacaacttggatgcataagtaaataaatcctctttcaaagctcaaaaaa

SEQ ID NO: 34030 - DNA, 1158 bp, Homo sapiens
ctcctgacctcagatgatccacccgcctcagcctcccaaagtgctgggattacaggcgtgagccaccgcgcctggcctgtttattctcttaagagagaaaatgaggggattaatggactgtagttctggacaaggtggaaaactcttaaagtggaagtattggggcgaatgctctgacaggctaggatggtgcagtcagtcccttcacccagaaatcagtagaatgttagcagttcagactcaaaccttgtgaaaaacaggtggtggaaaggaaatccctcacagcaactggcaccataatcaagacaatgtttgcagaataaatggagttacctgctttcagccccaggtcatagctattgtctgccctgctgatatgtgataataatttgtgatcatgttgtcttaaaatggggtcactcatctccagtagaattaagtccacagtgaagttgtccccccatccccaaagagataaacatatatgaatgaactcacgtgataacaactactgctgcctgggatcatgagagacctgaactgaactgataggaagtgaaaggtggctgagataatgagaatagacccatctgcagaggatcataaaaccagcaaagacaagatcttgtctaagatgccttcacaaactttgtccatgagaactcttaaggatttcaccagacctgttggctgctgctgtgatctctgcccaagaggagcctctgaccaacatccaaagggcttctggacccactggactcctctggaggtaccttagtctcccgatccatggctgtgtttttttactccctttatcgctgcctgtgtgtagaatgataattgcacaattgatagtgtgaagacctcttgataaatggtaaatctgagcatatgtatttggctgacatgtcattgtgaaacctcacagcttcagtcagtgtcaacgcagctagggagcatgtacctaatgcacatatcactgggcatagtctacaggcacctaataactcaggtaccttaacagtcactaatgagtgtctctccaaggactaaacaatggaagactgtagaagatgctattcattaagatatctcaagaatatggaagactattattcgcttctcatgggacaggactttatagggcacctgaaaaaa

SEQ ID NO: 34031 - DNA, 463 bp, Homo sapiens
tcaccttcagctgtacttaagatgttttcctggaaaaattcattctgctttctgaccaggatttccagaaactctgacccttctaagaggtctgggtggaattgtgatggtgattctgctagtagacagtgtaacttctgcgtctacaaaaagaggataggccgtcactgctcacatggctttgcgtgaaagcccaatggtactgtctctatggcagagatgaggaaggaacaccagcgtcctccaactttcctgttcttcctttgggttaatggccactgtaaggaaacagttttctgccacgtgtggggtgatttgaatgtaaaatgcccaactctcatagcaggctgaacagaaacattttttatactcattgttaatttgttctaatctaaattacttttagactattaaatattattctattttaaagttaagggactaatgcctctgataacctgat

SEQ ID NO: 34032 - DNA, 197 bp, Homo sapiens
cctacaggaggtcgttgcatccttaaccctcttcctggctgggaggcaaccacagcctgtgctggtacctgacatcattcctccagcctgtcagtccactcagcttctcctaaggggatatgtgttttctgtcctgggtacggatctagggttggaagcctgaataaactgctctgccttgagtttgtggactcaag

SEQ ID NO: 34033 - DNA, 311 bp, Homo sapiens
gaggaagcccccctggggatttggtttggtcttgtgatcaggtggtctatggggctatccctacaaagaagaatccagaaataggggcacattgaggaatgatactgagcccaaagagcattcaatcattgttttatttgccttattttcacaccattggtgagggagggattaccaccctggggttatgaagatggttgaacaccccacacatagcaccggagatatgagatcaacagtttcttagccatagagattcacagcccagagcaggaggacgctgcacaccatgcaggatgacatgggggatg

SEQ ID NO: 34034 - DNA, 469 bp, Homo sapiens
gatacaaacttcaacatgtgtaggatatttgtgctgaaaattacaaaactgatgaaacaaatcagaggacccaaatgttgccacaaaccatattgacatactggaatattcaacacggtaaatgtgtcagttctccctgaattatcgtagcttttatgcagttcctatataaaatcccagcaaagatttttggtagatacataaaaaggttattgaaaaacctgtatggaaaggcataggccccagaataactaaaacgatctagtaaaagaataaagcagttggaatcactctactgatattaaagctttcccttatagtgatagtaatcaagatacacagatcaatgcggtggaacagagaactaaaaaaatacataaatatgccaaattaatttttgacaaaggtgaaaaagcaattcactgatagattattcttctcaacaaatggtgttggagcagaaattgga

SEQ ID NO: 34035 - DNA, 1098 bp, Homo sapiens
gtgtgtgtgtgtgtgtgtgtgtgtgtgtgtgtgtgcctgcgcgtgctaagaaactgcatgttaagattccacctactgaatcatgagcggaggaagtcgtgggacactggctggtggagaagccatctagcatattattcaagatgacaccagctccaagtctggaatgagtctgtgggaaaccaaggtacttcttggacattcacctataactcacgtgtttcgtggactggtcacagtggttcggataaattgaacagaactttatgaacacctcccagcaccaggtgttgttatagaaactaagaacagagcaatgagaaggacccaactcctgctctcaaatggatgcagtggaaaataagcagactttgaaccattggttagtcagaagagacttgggagactgaaaacttgtttcaacttgggccagaacaaaaaattaggaagcaacacttgctgccaacatgatttacaagtgccagcaccttcacctctgttacttccttctcactacacacacacacacacacacacacatatcctatagcttttacagaactttaaccatgagataaatacaaattcactggcttgcaaacaaaaaacctattggatccaaactgtgatttttttttatcataatagaaaaataacagcagatttaaagcaggcagaaaataaaatagagaaaaaggggaacttaggaactctatagtttgcaggtctactttagggctctttttctttaacgtaaatgtgcacgaagacgatattacttccattttacattaactctggcaagtagaggtgccataaaacctacagagtgctcgcaagagggtcattcttcttgttttctcctcattcttaggttatttgtttcacactttttttttcttaagagaaggaactgagctgtagcctagggtttttgtgtggtggattgatgtgtgctgcttgtagacaggactccacagtgtgtcaccagtgagttgtttccgccctgttatgtatctcagtttctctctctagaggtctatgacctctgagagggctccaaacaccaggtgatcagcccttatatgcatttcctag

SEQ ID NO: 34036 - DNA, 2857 bp, Homo sapiens
gtgtgtgtgtgtgtgtgtgtgtgtgtgtgtgtgtgcctgcgcgtgctaagaaactgcatgttaagattccacctactgaatcatgagcggaggaagtcgtgggacactggctggtggagaagccatctagcatattattcaagatgacaccagctccaagtctggaatgagtctgtgggaaaccaaggtacttcttggacattcacctataactcacgtgtttcgtggactggtcacagtggttcggataaattgaacagaactttatgaacacctcccagcaccaggtgttgttatagaaactaagaacagagcaatgagaaggacccaactcctgctctcaaatggatgcagtggaaaataagcagactttgaaccattggttagtcagaagagacttgggagactgaaaacttgtttcaacttgggccagaacaaaaaattaggaagcaacacttgctgccaacatgatttacaagtgccagcaccttcacctctgttacttccttctcactacacactgaaagcagttgctcttgttttacatggacaggctcagagaagttaagcaacttgtccaaggtcacacagtagtggaattgagattgaatcagttccaactgacttgcaatcttgtgcttttcagacgatcccactaattgtccatatctgttccaaagccaaatcaagaggaacaagagcaaaatctgtcctctcatattattcatggtcctgcgtggatcataaatggcatgctgactgtctgatggagacttacttttcccttccccctggacacctgccatggcaatgacagaggctgtattttactgaagtggagggaagaggtgaatgcaaatgcctagggcctaagtatacaggaaggtgtagggagaggtaagcagtgtgtatgtggaggagatagcagacgtaagcagagagaaatcagagagcttagttcttcctctggggcgcactttgtggttaattaggacatgcaaatgagctagaagctcatttaatatcctccctgacatgtagccccaccccaccctgccccacttccctggcaggtacaagggccacctgattggcccaggtatctgtggaaggttccacctgcttctttgtggcccagggaacagaaaagagtccctgctgggcatggctagtggggccggcctggtctccctcctccctttctcttcccaacctttcagacttgggacctctcttttccctctccctcagacacttcccttgtgccccgcccctcagggtgatctctgaacccaaacttgccccaaagaaggttgctcttgtcctctccacatccccatctcctccctagggccttgttggggagaggctcctccatctttcccaagtcacaccatcgtttcctacgtggtctggacaagagcaagagcacaccttgtccccaccttctccagagcagccagaacccacctcaggtgccttccccatccggtgcagttaaggcacttctgccagcaccatggtatgagcactagacttggagttaagatttgagagccccctctgtcactgtggaagcttgagcatgttgcttgatctctctgaaccttgtgtttctcatctgtgaaaggtgataatgtggggctgctgtgagatttaaaggacataatgcacctacggtccaagcactgcctggaatacagcagaagctcagcagatactggacaacccatccccttagtagaggcactaaccatgtgacccaaggcaaaagtgcttaagaaaaagtgctttctctgagcgttggtctcttcttctgtcgaaacatttatattgatttaatatctcacaggattgtagcaagggtcagagaagacaataggtgacatgtttttgtacactgtatactagccacccagatgggctgttatttgctaaatggcaaatttacactgttccccaaaggatgacatgcactggggaggcggggggtgtggaggtggagaaaggctgagcttggagaaaaggtgcttgaggaccccactgcctaaggacctgctctaggaaacattcccactccctacaccctagctgcccctcacagtcaacccttaaggacctcaaattcttggcaaggggtaaagagttgaaagtgccaagtcctagtggttttgagaagcctctggtctgctctttctgctctgtaaagtcttagttgccagagtcccctatagcccccacatcgctcccttcctcctgccctccggccaccctggaaactaatggcctaaaggtgctgtggctgtcctcctaaaatccattccctcctgatggggtggagggaatctgtgaagcccaccttcaggagaggtctcggggctcgggctggtgctgccagagaaagggtgactgaaccagaaaggcctaggggaaagcagctcaaactgcagccatccccttagtacgattactaggatgtcccttgccttccttttgcctcctccacccaacccctaaaataaacagtatgatgaaaaaaacaaaaaacaaaaaacaaacaaaaaatgtgtggggagcccgcatgaggccacctggaagcaaaaggtttataagaaacaccatcggtgggggggacgagggcgcccccagaggagggtgcaggcagcacacggggcaacacacaggcgtccccacagagaagacccagggggcaggaaacaagggtggtggagttctccacccataaaaaaaacgcgccggggagacacaccaggcggtctgggacacatcgcagagggagtccggaggcaatcggacctataacacgggagcccacgccaggcgaattaattaccga

SEQ ID NO: 34037 - DNA, 2009 bp, Homo sapiens
ttttaaataaaagtcagtttgtacaagttccctcacttctgtatggcatcatgtacttgagctgcagggaatcatgcatttcatacagttatctgcataagggtgtgtgagagagagagagagagagtgtgtgtgtgtgtgtgtgtgagagggtgtgagtgtgtgagagagtgtgtgtgtgtgtgaatgtgtgtgtggacacatacattttcaaagggagactggtaatgactgtgaatatgccctctgctcatgcatccccagtttcaggaagcaggacctgggtgaacacacttgcagagagcctcactggggttctttcctggctgctgtcttgtctgctgatggaaaggtgtctggcttcgggccctgaccttgatgagagctcttggcacatgctggaggcctggaatgtcatcccacagttccactgtcatcagttctcagccaaccccactgttgccttttcagccaatttcatggtgtttattctggtgtcagtctcctcaccggagcgtgggcactcaagggcatcgagcgagtctgtcttgtttgctgctgcagccccagcacagagtccgatgccttgctctgcccctgctcttggaaggcctggctgaggcagtttccctgtctcttcccatttcaagggcacccactcatcaggttcctcgaggaagaaacttcacgcatctcaggcctgccttccctccatctgtccccaaacctcccattccttgacccctgtgcctaagtactcatcacttccacttagaacccacggctgcacatcagcaaactgagtacatgcttttgttgatccaaatgtgctgacagtgcagtggcactgcttactgaagtctgctgtctgcaggctgtcacacaggattgtctgtaaatttatcagaacacttccaggaaggcattactgtccccattctacagacaagaaaactggtgcttggagaggtagggaacttgcccaggatcatgcagtgagcagagtctttctggccccagagctgattctgtctcagcttctgaaagcagctcacatagccaggcacatgctgtggcagggttctccctgccctactgttttactgcttctcaggaggccctgtggggcgggtgtctacaacgtgtacatttgtaggagtgtcccaggaggagcattttgttccacttttgctctactgctggctcgctctgtgtgtcttaggacacatctcttaacctctctgggctcaaccactgcacagtgaaggctctggattgataatctgtgaatgctgtgttctaattaaatagtgggtttcttggccttgggtattctgtgtctcatttttgtctttacttgttggctccacaaagcaaaacctattgtcagtaattcttactaactttatattgatgttgactgtgtagaccaattctagctacgttagccttttgttcatataaaatgaacaactgacacgtaattgttactgttttccatagtgcactgtgtcatcctgactccacgtatagagtgttcactgtgtgccagggctgctctcggataaaacctattctgttgaagtcctggctggccctaactttttaagtttaacaaggttgagaacacaagtgactttgattagcattgtcctaatctggtttatcagtagcaggggaatttataagcagttaccaaaatgcatccaaaataagatggcttaatggctaggcagaggggagagatgtgatgaagtcagtacagcagaatggtaacaagtgagcatctccctaatgggaatgggacattcctggtagagctgggagaaaaaatgaccaaagctactgggaaattctgcagagataattgtcccattactttttaattaattaaaactaattaattaactattttttttttgagacggtgtctcgctctgtcacccaggctgaaattgcaccaatgcactcatctgggcaatggaacaagactctgtttaaaaaaaaaa

SEQ ID NO: 34038 - DNA, 1954 bp, Homo sapiens
ttttaaataaaagtcagtttgtacaagttccctcacttctgtatggcatcatgtacttgagctgcagggaatcatgcatttcatacagttatctgcataagggtgtgtgagagagagagagagagagtgtgtgtgtgtgtgtgtgtgagagggtgtgagtgtgtgagagagtgtgtgtgtgtgtgaatgtgtgtgtggacacatacattttcaaagggagactggtaatgactgtgaatatgccctctgctcatgcatccccagtttcaggaagcaggacctgggtgaacacacttgcagagagcctcactggggttctttcctggctgctgtcttgtctgctgatggaaaggtgtctggcttcgggccctgaccttgatgagagctcttggcacatgctggaggcctggaatgtcatcccacagttccactgtcatcagttctcagccaaccccactgttgccttttcagccaatttcatggtgtttattctggtgtcagtctcctcaccggagcgtgggcactcaagggcatcgagcgagtctgtcttgtttgctgctgcagccccagcacagagtccgatgccttgctctgcccctgctcttggaaggcctggctgaggcagtttccctgtctcttcccatttcaagggcacccactcatcaggttcctcgaggaagaaacttcacgcatctcaggcctgccttccctccatctgtccccaaacctcccattccttgacccctgtgcctaagtactcatcacttccacttagaacccacggctgcacatcagcaaactgagtacatgcttttgttgatccaaatgtgctgacagtgcagtggcactgcttactgaagtctgctgtctgcaggctgtcacacaggattgtctgtaaatttatcagaacacttccaggaaggcattactgtccccattctacagacaagaaaactggtgcttggagaggtagggaacttgcccaggatcatgcagtgagcagagtctttctggccccagagctgattctgtctcagcttctgaaagcagctcacatagccaggcacatgctgtggcagggttctccctgccctactgttttactgcttctcaggaggccctgtggggcgggtgtctacaacgtgtacatttgtaggagtgtcccaggaggagcattttgttccacttttgctctactgctggctcgctctgtgtgtcttaggacacatctcttaacctctctgggctcaaccactgcacagtgaaggctctggattgataatctgtgaatgctgtgttctaattaaatagtgggtttcttggccttgggtattctgtgtctcatttttgtctttacttgttggctccacaaagcaaaacctattgtcagtaattcttactaactttatattgatgttgactgtgtagaccaattctagctacgttagccttttgttcatataaaatgaacaactgacacgtaattgttactgttttccatagtgcactgtgtcatcctgactccacgtatagagtgttcactgtgtgccagggctgctctcggataaaacctattctgttgaagtcctggctggccctaactttttaagtttaacaaggttgagaacacaagtgactttgattagcattgtcctaatctggtttatcagtagcaggggaatttataagcagttaccaaaatgcatccaaaataagatggcttaatggctaggcagaggggagagatgtgatgaagtcagtacagcagaatggtaacaagtgagcatctccctaatgggaatgggacattcctggtagagctgggagaaaaaatgaccaaagctactgggaaattctgcagagataattgtcccattactttttaattaattaaaactaattaattaactattttttttttgagacgccgtctcaaacagaaaacaaaaaaacc

SEQ ID NO: 34039 - DNA, 2126 bp, Homo sapiens
taaatgtgatgtatgtggcaagatctttaatcagaagcaatacattgtatatcatcatagatgtcacactggtgagaaaacttacaagtgtaatgagtgtgggaagaccttcactcagatgtcatcccttgtatgccatcgtagacttcatactggagagaaaccttacaagtgtaatgagtgtggcaagaccttcagtgagaagtcatcccttagatgccatcgtagacttcatactggagagaaaccttacaagtgtaatgagtgtggcaagacttttggtcgaaattcagcccttgtaattcataaggcaattcatactggagagaaaccttacaagtgtaatgagtgtggcaagaccttcagtcagaaatcatcccttcaatgccatcatatacttcacactggagagaaaccttacaaatgtgaagaatgtgacaatgtttacattcgcagatcacaccttgaaagacataggaagattcatactggagagggatcatacaaatgtaaggtttgtgacaaggttttccggagtgattcataccttgcagaacatcagagagttcatactggagagaaaccatacaagtgtaataaatgtggcaggagtttcagtcggaagtcatcccttcaataccatcatacacttcacactggagagaaaccttacacatgtaatgaatgtggcaaggtttttagtcgaagagaaaaccttgcacgtcatcatagacttcatgctggagagaaaccttacaaatgtgaagaatgtgacaaagttttcagtcgcagatcacaccttgaaagacataggagaattcatactggggaaaaaccatacaaatgtaaggtttgtgacaaggctttccggagtgattcatgccttgcaaaccatacgagagttcatactggagagaaaccttacaagtgtaataaatgtgcgaaggtttttaatcaaaaaggaatccttgcacaacatcagagagttcatactggagagaaaccttacaagtgtaatgaatgtggcaaggtttttaatcaaaaagcaagccttgcaaaacatcagagagttcatactgcagagaaaccttacaagtgtaatgagtgtggcaaagcctttactggacagtcaacacttattcaccatcaagcaatccatgggtgtagggaaactttacaaatgtaatgattgtcacaaagtcttcagtaatgctacaaccattgcaaatcattacagaatccatattgaagagagatctacaagtgtaataaatgtggcaaatttttcagacgtcattcataacttgtagttcatcagtgaactcatactggagagaaaccttacaaatatcatgactgtgacaaggtcttcagtcaagcttcatcctatgcaaaacatagaattcatacaggagagaaacctcacaagtgtgatgattgtggcaaagcctttacttcatgttcacacctcattagacatcagagaattcatactggacagatgccttacaaatgtaagggtggcaaggtcttcactctgtggtcattccatgcagaacatcagaaaattcatttttgagataattgttccaaataaaatgaatataaaaaatcataaaactttaattgacattagagttgattcaacattgacttgagtttgagttgacttaacattgagttcacgcattaattgacataaaaagtgttaatgttaagaagaatgggtcaggtgcagtggctcatgcctgttttcccagtactttgggaggccaaggcaggtagatcacttgaggtcagcagtttgagaccagcctggccaacagacttgagccactttacccagcctgttttttatttttattttttgagatggagtcttgctcttgtcactcaggctatagtgcaatgacatgatctcagctcactggaaccttcacctcctgcattcaagcaattctcctgcctcagcctcctgagtagctgggattagtgatgcatgccaccacaccatgctaatttttgtatttttatttattttttattttattttattttttgttgagaagtgggggggggtgggccggggatgaagttggcgggctggagttgcctggtacaggcaa

SEQ ID NO: 34040 - DNA, 2379 bp, Homo sapiens
ggtggtgtttgtgtatgatgtgcagtgtgtgtgtgtgtggtgtgtctttcatgacactgacattattaaagagttcaggcaagtttgtggaatgtcccacaatctagacttttttactgattgtttcctcattacgagatacaggttacattttttttcccaagactgctacatgtgtgatgttgtttccttactactgcctcacctcaggaagcacataatgtctacttgtctcttttctgatattaggactgatcaggtgttgtctgcctgatccaatcattatcaagttccataattcattattaagctctgaaattcaggacacatacatttatagagtgtgaggctgtgcatacgtacattcatcccttaatgttctcaaggaggcccaggatccccaaaatattataagcattgcagtcagatgatatagcactagcaaagcattcatccctttccatataacaggagggaggggaagaaggaagtttccatgtgcaggcaatacgtgagagcatgggcaagtgaggatttgtatgctccctgtagccagaggtgaaatattcaacgcttttattttttctccccgtcttcaatgacctcccatttggacccatagtttatttatagagagcacacactccctaattgtcagatggtttttttgggaaaactcttagatagtacagtgagttgtgaccctccaaaggatcacaagtacataaacagatacaaagtatttatgtggtattaaaatttcatggtgatggtgcaagggagagatgattaggaagaaaatgtcttaaacggctgtaattgagaaatactgatctagagtcatttcctgcttcttaaattgttcgttttctcttccctgggtattttctcatttccaaagacccagagtctcagagccaggttaagtggaagaaactttgagaggtttcttaatcaattccttctatctctcaaaccatgccagtaacttccttggtgaaaaaatctatactcctctcacagttcttcgggcatggaaattctatagcattctttggtataaccaacccactgaaccctccacaacatcttgaattccattcaactcgagctgaagtattctttttgagtttcagtatatcttttctagtgtcccacttttagaaaggtccaaagatgatatataataagtgaaaatacaattaatcagagctttatttgcatatccattaaatatctgaaggctattaccagttgtgcttcagcctcctttcccttgcaattctcccagggtggcatcctctacggagtcttgttgctccattgttgaccactgatgtaactcaacgtgaaaccttcccaaagctctccacatcactctctgttatggctgtgaccagcagtgaacatgaaaagaacttatttcatgccttctccaaactatattgtttctttgctaagtccagacctgctttttctacatttataggttttctattttaatcgccatgcaaaattctttatcatactcaatcattttggtttatcttcctgacttcttacctttaacatccctgttaaagattacactgttgttgtttcaaaaaaaaaaaaaaaaaaaccttaattggcaaaacattaagggacttgaatagaattacacttatctttttgtgctgatttatgtcaatccatcattctggttattgatggaagcaaattgcttcctatgttctctaaaccttatgtcccttccatactccatgagtaccacactgggagaaaacaaaagcaaaaagattgtgggaaaagtatagccattatctttgaggaaatgtgtaccaaggcacaatcattaaaaggagttggaggcatcatttggttgacactgttgtcattcttgttctgatcattttggaccttgaagaaattggtgattctctcctagaattagacaaacaaagtgtgtttggaaataatgattgttttcctgccttaaaaaatatattaacagaaagcttttataacaggctgtttccctctggacaggtattaattctgagtaagaattttcagtgactacataaggatttgtgtaacttatgaaggaagagtccatttctaatcaaataattcacctgttttactagcttatagtgatctgatttcagaattttcctgtatcttttttacatacatcagaaaaagaaatgtttactatatttttggttccatttatgattgtattaagcatttgactataaggaaaactaacaattaaatcaattagaaaagcaacataaaattaaatgatatttaggaaatcagttatatgtgagcttgggtattcaaatgtcacaaataaaaagcatataacca

SEQ ID NO: 34041 - DNA, 2697 bp, Homo sapiens
ggtggtgtttgtgtatgatgtgcagtgtgtgtgtgtgtggtgtgtctttcatgacactgacattattaaagagttcaggcaagtttgtggaatgtcccacaatctagacttttttactgattgtttcctcattacgagatacaggttacattttttttcccaagactgctacatgtgtgatgttgtttccttactactgcctcacctcaggaagcacataatgtctacttgtctcttttctgatattaggactgatcaggtgttgtctgcctgatccaatcattatcaagttccataattcattattaagctctgaaattcaggacacatacatttatagagtgtgaggctgtgcatacgtacattcatcccttaatgttctcaaggaggcccaggatccccaaaatattataagcattgcagtcagatgatatagcactagcaaagcattcatccctttccatataacaggagggaggggaagaaggaagtttccatgtgcaggcaatacgtgagagcatgggcaagtgaggatttgtatgctccctgtagccagaggtgaaatattcaacgcttttattttttctccccgtcttcaatgacctcccatttggacccatagtttatttatagagagcacacactccctaattgtcagatggtttttttgggaaaactcttagatagtacagtgagttgtgaccctccaaaggatcacaagtacataaacagatacaaagtatttatgtggtattaaaatttcatggtgatggtgcaagggagagatgattaggaagaaaatgtcttaaacggctgtaattgagaaatactgatctagagtcatttcctgcttcttaaattgttcgttttctcttccctgggtattttctcatttccaaagacccagagtctcagagccaggttaagtggaagaaactttgagaggtttcttaatcaattccttctatctctcaaaccatgccagtaacttccttggtgaaaaaatctatactcctctcacagttcttcgggcatggaaattctatagcattctttggtataaccaacccactgaaccctccacaacatcttgaattccattcaactcgagctgaagtattctttttgagtttcagtatatcttttctagtgtcccacttttagaaaggtccaaagatgatatataataagtgaaaatacaattaatcagagctttatttgcatatccattaaatatctgaaggctattaccagttgtgcttcagcctcctttcccttgcaattctcccagggtggcatcctctacggagtcttgttgctccattgttgaccactgatgtaactcaacgtgaaaccttcccaaagctctccacatcactctctgttatggctgtgaccagcagtgaacatgaaaagaacttatttcatgccttctccaaactatattgtttctttgctaagtccagacctgctttttctacatttataggttttctattttaatcgccatgcaaaattctttatcatactcaatcattttggtttatcttcctgacttcttacctttaacatccctgttaaagattacactgttgttgtttcaaaaaaaaaaaaaaaaaaaccttaattggcaaaacattaagggacttgaatagaattacacttatctttttgtgctgatttatgtcaatccatcattctggttattgatggaagcaaattgcttcctatgttctctaaaccttatgtcccttccatactccatgagtaccacactgggagaaaacaaaagcaaaaagattgtgggaaaagtatagccattatctttgaggaaatgtgtaccaaggcacaatcattaaaaggagttggaggcatcatttggttgacactgttgtcattcttgttctgatcattttggaccttgaagaaattggtgattctctcctagaattagacaaacaaagtgtgtttggaaataatgattgttttcctgccttaaaaaatatattaacagaaagcttttataacaggctgtttccctctggacaggtattaattctgagtaagaattttcagtgactacataaggatttgtgtaacttatgaaggaagagtccatttctaatcaaataattcacctgttttactagcttatagtgatctgatttcagaattttcctgtatcttttttacatacatcagaaaaagaaatgtttactatatttttggttccatttatgattgtattaagcatttgactataaggaaaactaacaattaaatcaattagaaaagcaacataaaattaaatgatatttaggaaatcagttatatgtgagcttgggtattcaaatgtcacaaataaaaagcatataaccaaaaaaaaaaagaaaacaagaaaacaaaaaaactgtgtcgcgcgcgctcctgggcgccctctgcaaaaaaacctttctaaaaacaatctgcgctggggggacgcgcggccccagtgaggtgacgtgacacatgggcgcatgagtcgtctcgaggaaaaccggccagcgaacaacagcggtcggggcttctccaccccaataaaaaaacgcgccggtcgacacacgaaggcttgcgaaacacactcaccatgacagtcgctggagcactcaacactggtacccacaagagggactcccaggcacctcgatatcaattaca

SEQ ID NO: 34042 - DNA, 353 bp, Homo sapiens
tttttttttagacagggtcttgctctgttacccaggctgggtgcatgccacgattacagtttactgcagcctcagcgtcctgggttcaaaatcttcctgcctcaggctcccaagtagctgggactacaggtgtgcactaccatgcttggctaattattttactttttggaggaatcagggtcccactacattgcccaggctggtctcgaactcctgggcataaggaatcctccggcctcagcatgccaaagtactgggattataggtgtgagccaccgcagcaggacacccagctaatttttaaactttcttgtagaggtagagtctcatttatgttgtgtagggtagtttag

SEQ ID NO: 34043 - DNA, 999 bp, Homo sapiens
tctcccatcctttttaactgttccctggcttcgagaaagatcaaattagcgcagtattatcctttatcaataatcagctttttaaaatgacattcttttttaaattctagaacacagcatacccagccccaaacataccaaatttaacaggctttctctttgcctacaacaatatacaaatatatattcacctctctatgggtttgggttttattttaatggcattatgttgtagagttagcagcttccttttttcacgtagctgtctaccatgcacgtggctgtaggtcgatcacacagggccaagacatgtttctccaatatctctcgttctcgtaaatcgtagttcattcagctgtcacttatcaccagacatttcagttgttttcagtttttccctctgataaacattgctgcaataaacattttgtgaccctactgttagtagtggtgcatttatttttgtgggttagtttcaaagatgggctaaaggttgtgcccatttattaaatactacctaatgacctacccaaaatgttgtagcaattcacatattcatcagcaacttagagtgtccaatttcccctattcttgcccatactagttgtcaccagtctttttaatttttgccaatttgatgggcaaaaaaaaatggtgactactaatgaggctgacatcttgttttatgtgtattgaacatttatatttcctttcctgtgaattgctggtttacctctttgcctatttttcttttgtattgtttaactttaaatcaacatgtaggaatcttaatccctaatattaggaatattaaccctttctcataaatgttgcttagatattcccttagtctgcttctttatttattgtaccttttcccatataaaaaaatattagttttatgtagtcaaggtataagtctttttctttatgacttctggatttgctatattccttaagaagtcaggttgggaatttttctcttccagtaaaaaaaaa

SEQ ID NO: 34044 - DNA, 438 bp, Homo sapiens
tctcccatcctttttaactgttccctggcttcgagaaagatcaaattagcgcagtattatcctttatcaataatcagctttttaaaatgacattcttttttaaattctagaacacagcatacccagccccaaacataccaaatttaacaggctttctctttgcctacaacaatatacaaatatatattcacctctctatgggtttgggttttattttaatggcattatgttgtagagttagcagcttccttttttcacgtagctgtctaccatgcacgtggctgtaggtcgatcacacagggccaagacatgtttctccaatatctctcgttctcgtaaatcgtagttcattcagctgtcacttatcaccagacatttcagttgttttcagtttttccctctgataaacattgctgcaataaacattttgtgacccta

SEQ ID NO: 34045 - DNA, 355 bp, Homo sapiens
gccacaaattgcctctagggcagacccccactctcaggatggattggaattttaactaaaaggaattttggatatgatggtcttatttggatcccgatttgaacaagctaatcagaaaaagacatcttgcgataattggaaaaaatctgaacataaactgagtattagagaaaattaaagatttatttttgttttcattaggagtgataatgacatagtggttttataaaagataaaaggccttatcggttaaagatgacagtaaaatgacccaattttggccaggcgtggtggcttatgcttgtaatcctagcactttgggaggccgaggcaggcagatcatgaggtcagtagt

SEQ ID NO: 34046 - DNA, 575 bp, Homo sapiens
tcagggtcacattccttcctggaggcactagaggagaatccttttccttgcttttctagcttctagaggcctaccacattcctccaccatcaaaatccgcaactgcattttagatgagtcttttcgcaatggcatcaccctaactttctctcctgcctgcctcttacaggaagacttttaaggacccctgtgactgcatcattgggaccaccagtataattcagaatactgtccctattttaactcagctgattagtgtgactaatccatctgccaccttaattcctctttgtcatgtaacctaacatattcaaaggttctggggttagaaaatagagatctttgggaggccattattatgcttaccacacagagcaattaatttttgtggaactttcattagggaaaaaacgaggagtaatagaatatagaaaatgagctcagtggtagataaggatttattacttatttgcctttgttgtgatagttacaatatattacccacaactcaaaaataattaagtttgcaaaatttatcaagcatgctgctatggtctgaatgtgttcattcccca

SEQ ID NO: 34047 - DNA, 685 bp, Homo sapiens
tgacctcaggtgatccacccaccttggcctcccaaagtgctgggattacaggcgtgggcctggcctactattttgaggtataatggaaggatgtttgcattttaatggagggaacacctctcatgcactgatgtgttgcagcatcagggcaacaaagtggctgtctgcttccaggtccacactgacttctagacacagaatgtcaccaaggaaatgtaccctgtcttaaaagaaaagatgaagggaattcaaatttggagagtgccgggagccacacgctttttatgtgtgcttggtcatgcagtcattttacacacttgttagcattgtcaggtgaaatgaggattcatctttccattttatatagagggggcagttagaggttaagtagctgtctgagtccctttgggctgctcttacaaaatgccatagactgggtggcttaagcaacaaacatttgtctcacagttctggagtctggtaagtctaaaatcaagatgccagcagatctggtgttcagtgagggcccagttcctgacttgcagatggccatcttctcattgtatcctcacattgcttaacagtggccccagagagcaggagtagtgatgctggtgattcggatatgccaaagagaagccacaaagtgcttccttttaaatgaaaaggtgaaagttctcaaatc

SEQ ID NO: 34048 - DNA, 490 bp, Homo sapiens
ccatgttcggcatcactgattagctctagaggtccatgcatacttaatattatacttgaattccatatgccgggagccacacgctttttatgtgtgcttggtcatgcagtcattttacacacttgttagcattgtcaggtgaaatgaggattcatctttccattttatatagagggggcagttagaggttaagtagctgtctgagtccctttgggctgctcttacaaaatgccatagactgggtggcttaagcaacaaacatttgtctcacagttctggagtctggtaagtctaaaatcaagatgccagcagatctggtgttcagtgagggcccagttcctgacttgcagatggccatcttctcattgtatcctcacattgcttaacagtggccccagagagcaggagtagtgatgctggtgattcggatatgccaaagagaagccacaaagtgcttccttttaaatgaaaaggtgaaagttctcaaatc

SEQ ID NO: 34049 - DNA, 2174 bp, Homo sapiens
gctgcaatgagccaggattgtgcctctgcactctagcctgggtgacagggcaagactccatctcaaaaaataaaaataaaaatagtttatctgggtgggcattccaaaatttccgcatagatgatcacgtgaaacaatcactgtgctaaatgtggaggaaaattcatcacgataatcacaaaatttgtatcagaaaaaaattacaaatgtactttgtttcatgtaattttatgagttggaagtattttcttaaattggaacactataagataatatctttaggaaatggatatgccacaataggaagtatagtggggcaagtcttgtttttctcaagggaaaagccaccagcctgctttcataggcattgataaaaccaggaagaaaataaagtcacaaccaaatagtatacactgtctctactgaattcttctaattccttcccaacagaagtctaaatcctgcttagcctaaacatatctatagccagcgatgggcaaattatatttgctgtcagcatgatagaataagaatcagaaaccccccagcagtggggtaagatcgtgcacttcatcccctcaaaatgctgtcaaccccattccctctccatgccctcaaacaactgcacagtcacttgttagtgaatttctcgttcagcgttttgtttttttctctccatacttaaagaccaaatcatttgtttgctctgaagaaaaagaaaaaacaaaacaaaacaaaacaaaaaaccacccaccaaatcatttgaaatcactacccgttaaaaaaaatcaccagtggaactaaacagttgagtggtttgggatgtgttccccatttctgtgtttgacctacatggcctctaattctttggaccattgtaactgtgaaactatggcttaatactgttaaagaccccaaggctccactctgtagccagggtgtacctcaggctgcacaaatatcacaccagaatgtcacaatcattcattgctccagctactgagtgaacagggtgcaagacagcactggcttgggttgtatttttgcagccagttaactttgcatcaggtctacacagtccttgcagcctttgatttctccagttgtagagatttgaaatggggtgcccgggttcctctcgtttttccttcaacctacctagcatgcattttacacacattggaggagtcttatgcactgtttttctctgttgctgatggaggcaagaaggccttctaattagtctaacttaaacggacgggattcacctaacaaaagcaagaagaaaagcacaagaacaggtgtcttaatgcatttggataatttatttggggtgtgtgcgtgtgtgtgtgtgtcttggtggaggtgggggccgtgttctcaccaagccttttcataatcaagtttgctttgcaaactttatggccttacacccagcagaacagtccttgctaataaaaggaggatgccctgtcacagtctctgtaaattatcatgtgttgggaagttctgttgatgcttagtttgatcttccatggtggacacatctgttctgtatgtacaaggcattacatgtgtgttttagcggatgggaattgaagcctttccacagtccttgtgctctgagatggctgttgagctctgctcagctgtcgtagctgaattctttttttgtgctgaacactgggcagcctcaccatgttgtcaatgtgcttctggggcccctgtgactgctgccagatgccatgcacacaagcagagtgcctttgcaggtttgtgcaccccttggcgagctggaactgggagccctgtggggtgatctcgccttctcatggggggtcggggaggggagtgcctatttttaatcttgtctgtttgttgcaccatggaaatcactgtgatttgtatatatgccctaggaaatttttactgctgtctaatttatgtaataatgttgattccaggtttgtttaataaagctttgtatcttttaagaaaaaaaaaactgtagcatgtagaggaaagtgcactgggataatccaaggccaggctttgaggttccaccgctacattatgtgactcttagtctaaaccttttggtgtaatttctttggtctgattatttataagtagcagataataaatgaattttatactacaaacacaagtgacaa

SEQ ID NO: 34050 - DNA, 697 bp, Homo sapiens
tgagacagagtttcaaaataattttgaaatgagcaattcacctatttgactacacagacttccagtatgcttgcataaaaggaaaagtcatgtgagaacatctgaatttagaagtacttgaaagtacaagactgaagacataaaggaaatgtaagcaggatgataaatgtcagttgatttaaactgacaggagctctgttctgctttatagcatattcttgtagggagagctgatcctagctgatggctagctctggagcaggcttgttgaagctgttcataaatgtatttatgtttttagagacagtatctcacactgtcacccagactggagtatggtggcatgattatggttcactgaagccttgaacccctgggcctcaagtgaccctcctactttaggctcccaaatagctggcattacagcagtgtgccacctgttcataaatttagaacaatatttagtgtcaagttagtgatttttctaagggtggaacagggattactacaaggtgaacatgcttctgtaatcgccacacaggtcaggaaataaaacgttatttttattctatatttctttatgtgatgtctagacactatcttcatattccccagaggtaactactgtcctgatttaaaacaccatagattttatgtgatttaaaaatatatggacacagtattatttagcctaaaa

SEQ ID NO: 34051 - DNA, 2189 bp, Homo sapiens
tgggatgcaatcagaaaagccgagtggggctgcctcctgtttctgagtgtgttggtttggtttaattcttttcaagggttggagttggaaagtgaaaaccctagacacttgctgtggaatgtttgcctggttgtattggtgtgtccctcttcttcactggcatgtcgctttcaagtgtaccaaaggacattttgttctgttgaaagccacaggaccaaaaggaaaatattgcaactatttgcaaacatacttccctacctatacaagcagccatatactaaaaagcactaaacaagcacaaatgaacactaaatagccttataccaaaaagcattcttgtaactgtcagggcatggtatgaattccttcctctttaagcagcaacttaccacaggcttggtggctttaagtaatatagcattaagcaaatggtcagttattttttaatgttgaaaacttccaagtgtgaataatacggacatagtttactaccttttgcttttaatatacctggttatctatttccatttgaaataaaatgaaaggagacctcaaactgatgctgagaagtagacaaaatcagctctcagacttaactctccccaattaaaatagtttttttttcccttcccatttttttgtttttaagagatagggtcttgctgtgttgcccaggctagagtgcagcagtgacatgatcatagctcactgcagcctggaactcctgggctcaggatccttctgcttcggcctcctgagtagctaagaccacaggtgtgtgccaccacacctggctaatttttttaaaattttttgtagagatggggacttgctatgttgcccagactggtctcgaactcctggcctcaagccaccaacctctcaaattgctagaattacaagcatgagccaccacacctggcctgttattccttctttatctaatgtgtgctaagcttgtgaaaaatatatgttgaggtaaatagggcaaaacattagttgataaattatgctaattaatgggaaaaatagacatgttcctctctgaacatttagaaggactctgccctacaactatcttctgtttttagaatttgtagtcactgttcttagtgccactggaaatatattcattctttgagcatgtacagggtgggctccctgttgtatttattacacttttcaaaatgccagcaagtttttgtttgtatagagttggaatgtattgttcgtgcatgcctgtgatattcatcatcaaaatatacctgtaaaaaataaactactgcttcctctccacagcttaggcctccctcttactaaaaacaatagtagtttctgtagaagtttcagtgagaaattatggttatataaataacagatatggcagaacaattttgttgtagtatttttttccgtagcatttcttaataatagctcagtttttaaaggaggggaacaataccccatgagttcaaattaattttctctactttgaggtataccttcctaattatattttacataggctgttttttttaagtttaaattctcactgttaagttgcattgagagacaattagaaatgttgtaattgtcatatctttacatgtggattatgaacaaatgaaagtttgctgtgtgattgcagttttaaattataacatttcataaatatgtcaattttagaaactcaaactctttcccatcttttgtatggataaagtttatggtttcatttctgagaatagagttggtctgctgtgctaacttcatgtttcttattccaaaggcttgattatatttttttctccagtgattaaaaatgcagcgaaaatccaatctacaagttcatatattggtatttctagacatagtctagttctaaaagaatgtacttggtgtgcatttttaagtgtttcatgtagacagattaatatatttttgtacaacattgtatttctacatttatttcaagactgtacttttcagtgactttttcaagtgcatgtgttaacagaagattgtttggaacgagagtgcagtggcttctttactagcaaagagaagtgtaatacaagtgatcatagaaggtgagaatgtgtttatactgtatatggaaacctaatgcctcttttctaaagctttgtacatttttttcgtgaaatagattaaatattttctctctaaaa

SEQ ID NO: 34052 - DNA, 2263 bp, Homo sapiens
ctggtcgtctctagcaggatccccttttatctgaaggctgccccaatcacagagcctgggtaaggtggaacaggaggcagccccactcggcttttctgattgcatcccacctgtttctgagtgtgttggtttggtttaattcttttcaagggttggagttggaaagtgaaaaccctagacacttgctgtggaatgtttgcctggttgtattggtgtgtccctcttcttcactggcatgtcgctttcaagtgtaccaaaggacattttgttctgttgaaagccacaggaccaaaaggaaaatattgcaactatttgcaaacatacttccctacctatacaagcagccatatactaaaaagcactaaacaagcacaaatgaacactaaatagccttataccaaaaagcattcttgtaactgtcagggcatggtatgaattccttcctctttaagcagcaacttaccacaggcttggtggctttaagtaatatagcattaagcaaatggtcagttattttttaatgttgaaaacttccaagtgtgaataatacggacatagtttactaccttttgcttttaatatacctggttatctatttccatttgaaataaaatgaaaggagacctcaaactgatgctgagaagtagacaaaatcagctctcagacttaactctccccaattaaaatagtttttttttcccttcccatttttttgtttttaagagatagggtcttgctgtgttgcccaggctagagtgcagcagtgacatgatcatagctcactgcagcctggaactcctgggctcaggatccttctgcttcggcctcctgagtagctaagaccacaggtgtgtgccaccacacctggctaatttttttaaaattttttgtagagatggggacttgctatgttgcccagactggtctcgaactcctggcctcaagccaccaacctctcaaattgctagaattacaagcatgagccaccacacctggcctgttattccttctttatctaatgtgtgctaagcttgtgaaaaatatatgttgaggtaaatagggcaaaacattagttgataaattatgctaattaatgggaaaaatagacatgttcctctctgaacatttagaaggactctgccctacaactatcttctgtttttagaatttgtagtcactgttcttagtgccactggaaatatattcattctttgagcatgtacagggtgggctccctgttgtatttattacacttttcaaaatgccagcaagtttttgtttgtatagagttggaatgtattgttcgtgcatgcctgtgatattcatcatcaaaatatacctgtaaaaaataaactactgcttcctctccacagcttaggcctccctcttactaaaaacaatagtagtttctgtagaagtttcagtgagaaattatggttatataaataacagatatggcagaacaattttgttgtagtatttttttccgtagcatttcttaataatagctcagtttttaaaggaggggaacaataccccatgagttcaaattaattttctctactttgaggtataccttcctaattatattttacataggctgttttttttaagtttaaattctcactgttaagttgcattgagagacaattagaaatgttgtaattgtcatatctttacatgtggattatgaacaaatgaaagtttgctgtgtgattgcagttttaaattataacatttcataaatatgtcaattttagaaactcaaactctttcccatcttttgtatggataaagtttatggtttcatttctgagaatagagttggtctgctgtgctaacttcatgtttcttattccaaaggcttgattatatttttttctccagtgattaaaaatgcagcgaaaatccaatctacaagttcatatattggtatttctagacatagtctagttctaaaagaatgtacttggtgtgcatttttaagtgtttcatgtagacagattaatatatttttgtacaacattgtatttctacatttatttcaagactgtacttttcagtgactttttcaagtgcatgtgttaacagaagattgtttggaacgagagtgcagtggcttctttactagcaaagagaagtgtaatacaagtgatcatagaaggtgagaatgtgtttatactgtatatggaaacctaatgcctcttttctaaagctttgtacatttttttcgtgaaatagattaaatattttctctctaaaa

SEQ ID NO: 34053 - DNA, 2538 bp, Homo sapiens
ctggtcgtctctagcaggatccccttttatctgaaggctgccccaatcacagagcctgggtaaggtggaacaggaggcagccccactcggcttttctgattgcatcccacctgtttctgagtgtgttggtttggtttaattcttttcaagggttggagttggaaagtgaaaaccctagacacttgctgtggaatgtttgcctggttgtattggtgtgtccctcttcttcactggcatgtcgctttcaagtgtaccaaaggacattttgttctgttgaaagccacaggaccaaaaggaaaatattgcaactatttgcaaacatacttccctacctatacaagcagccatatactaaaaagcactaaacaagcacaaatgaacactaaatagccttataccaaaaagcattcttgtaactgtcagggcatggtatgaattccttcctctttaagcagcaacttaccacaggcttggtggctttaagtaatatagcattaagcaaatggtcagttattttttaatgttgaaaacttccaagtgtgaataatacggacatagtttactaccttttgcttttaatatacctggttatctatttccatttgaaataaaatgaaaggagacctcaaactgatgctgagaagtagacaaaatcagctctcagacttaactctccccaattaaaatagtttttttttcccttcccatttttttgtttttaagagatagggtcttgctgtgttgcccaggctagagtgcagcagtgacatgatcatagctcactgcagcctggaactcctgggctcaggatccttctgcttcggcctcctgagtagctaagaccacaggtgtgtgccaccacacctggctaatttttttaaaattttttgtagagatggggacttgctatgttgcccagactggtctcgaactcctggcctcaagccaccaacctctcaaattgctagaattacaagcatgagccaccacacctggcctgttattccttctttatctaatgtgtgctaagcttgtgaaaaatatatgttgaggtaaatagggcaaaacattagttgataaattatgctaattaatgggaaaaatagacatgttcctctctgaacatttagaaggactctgccctacaactatcttctgtttttagaatttgtagtcactgttcttagtgccactggaaatatattcattctttgagcatgtacagggtgggctccctgttgtatttattacacttttcaaaatgccagcaagtttttgtttgtatagagttggaatgtattgttcgtgcatgcctgtgatattcatcatcaaaatatacctgtaaaaaataaactactgcttcctctccacagcttaggcctccctcttactaaaaacaatagtagtttctgtagaagtttcagtgagaaattatggttatataaataacagatatggcagaacaattttgttgtagtatttttttccgtagcatttcttaataatagctcagtttttaaaggaggggaacaataccccatgagttcaaattaattttctctactttgaggtataccttcctaattatattttacataggctgttttttttaagtttaaattctcactgttaagttgcattgagagacaattagaaatgttgtaattgtcatatctttacatgtggattatgaacaaatgaaagtttgctgtgtgattgcagttttaaattataacatttcataaatatgtcaattttagaaactcaaactctttcccatcttttgtatggataaagtttatggtttcatttctgagaatagagttggtctgctgtgctaacttcatgtttcttattccaaaggcttgattatatttttttctccagtgattaaaaatgcagcgaaaatccaatctacaagttcatatattggtatttctagacatagtctagttctaaaagaatgtacttggtgtgcatttttaagtgtttcatgtagacagattaatatatttttgtacaacattgtatttctacatttatttcaagactgtacttttcagtgactttttcaagtgcatgtgttaacagaagattgtttggaacgagagtgcagtggcttctttactagcaaagagaagtgtaatacaagtgatcatagaaggtgagaatgtgtttatactgtatatggaaacctaatgcctcttttctaaagctttgtacatttttttcgtgaaatagattaaatattttctctctaaaaaaaaaaaaaaaaaaaaaaaaaaaaaaaccaaacgaaacaattcagcagcaacaacaaacgaacattgatacacgagacgctacaaacacaaacacaagcaacaaacatagatagaataaaaaaagagggagagagaataaacaaagagagagccaaaacacaacgttaaatcggcccaaaaggattataagaagaggaaaataacaggaaaaagcagtaggagaactgtagtggtcaacacaagagaaaaataggatgccgcgagatctcgagca

SEQ ID NO: 34054 - DNA, 351 bp, Homo sapiens
cgtgaaatagattaaatattttctctctaaaaccatgtttctgttttaatgtgctttctaagtatatcatgaggtaactctactacttagaaacctgtaagctgtgatttacttgagcttttggggaaatggaaagcagaatacttagtttaaaaaaaatttttttttaactgcaagcagatacctcaagatcaaatcatgcaatcataattagagatttttaatatatatattgggaaagggtaatctattcaataaacgatactgggaacatttgaaaagaacaacaacagaaattagatctctatctaacactgcacactgaatttgaaaggaattaatgacataaca

SEQ ID NO: 34055 - DNA, 750 bp, Homo sapiens
aggcgtctgccaccacgcttagctgattttttgtatttttagtggagatggggtttcgccatgcttgccaggctggtctcgaactcctgacctcaggtgatctgcctgccttggccttccaaagtgctgggattacaggcgtgagccgctgcgcccagcgcactaaatactattaaaaggaattaagcaaaatgctacgtaccaatgattatgattcatgatcacctaaacacagaatgcagacttaacttttcattcttagtgtgctaattaagtagtagtatggtgcagtaaggaattttgttaattttgttataaactccctctcctgaaatccgtaaggaaatgtgataataagaaagtgataatagtgtcatattttaaaagtagaatccactgttaagcaccaagattaccttttcttccccctgtggcacagtttatttaaatgaagtattagcaataatcatgtcactattttgtcctgaataattaagagtttgcttttttcccatgtctttgcaataggataatataaagaatagtattaaaagtcagaggctttactaatctacctatatgtattccatggctaacaaaccctggcccctttacatatgagctctggaggttcgcctggctgcctcaggcttgcagaaggctgccccaatcacagagcctgggtaaggtggaacaggaggcagccccactcggcttttctgattgcatcccacctgtttctgagtgtgt

SEQ ID NO: 34056 - DNA, 2715 bp, Homo sapiens
ggtggcgatctagaggatcccttctcgtgacaatgattatgattcatgatcacctaaacacagaatgcagacttaacttttcattcttagtgtgctaattaagtagtagtatggtgcagtaaggaattttgttaattttgttataaactccctctcctgaaatccgtaaggaaatgtgataataagaaagtgataatagtgtcatattttaaaagtagaatccactgttaagcaccaagattaccttttcttccccctgtggcacagtttatttaaatgaagtattagcaataatcatgtcactattttgtcctgaataattaagagtttgcttttttcccatgtctttgcaataggataatataaagaatagtattaaaagtcagaggctttactaatctacctatatgtattccatggctaacaaaccctggcccctttacatatgagctctggaggttcgcctggctgcctcaggcttgcagaaggctgccccaatcacagagcctgggtaaggtggaacaggaggcagccccactcggcttttctgattgcatcccacctgtttctgagtgtgttggtttggtttaattcttttcaagggttggagttggaaagtgaaaaccctagacacttgctgtggaatgtttgcctggttgtattggtgtgtccctcttcttcactggcatgtcgctttcaagtgtaccaaaggacattttgttctgttgaaagccacaggaccaaaaggaaaatattgcaactatttgcaaacatacttccctacctatacaagcagccatatactaaaaagcactaaacaagcacaaatgaacactaaatagccttataccaaaaagcattcttgtaactgtcagggcatggtatgaattccttcctctttaagcagcaacttaccacaggcttggtggctttaagtaatatagcattaagcaaatggtcagttattttttaatgttgaaaacttccaagtgtgaataatacggacatagtttactaccttttgcttttaatatacctggttatctatttccatttgaaataaaatgaaaggagacctcaaactgatgctgagaagtagacaaaatcagctctcagacttaactctccccaattaaaatagtttttttttcccttcccatttttttgtttttaagagatagggtcttgctgtgttgcccaggctagagtgcagcagtgacatgatcatagctcactgcagcctggaactcctgggctcaggatccttctgcttcggcctcctgagtagctaagaccacaggtgtgtgccaccacacctggctaatttttttaaaattttttgtagagatggggacttgctatgttgcccagactggtctcgaactcctggcctcaagccaccaacctctcaaattgctagaattacaagcatgagccaccacacctggcctgttattccttctttatctaatgtgtgctaagcttgtgaaaaatatatgttgaggtaaatagggcaaaacattagttgataaattatgctaattaatgggaaaaatagacatgttcctctctgaacatttagaaggactctgccctacaactatcttctgtttttagaatttgtagtcactgttcttagtgccactggaaatatattcattctttgagcatgtacagggtgggctccctgttgtatttattacacttttcaaaatgccagcaagtttttgtttgtatagagttggaatgtattgttcgtgcatgcctgtgatattcatcatcaaaatatacctgtaaaaaataaactactgcttcctctccacagcttaggcctccctcttactaaaaacaatagtagtttctgtagaagtttcagtgagaaattatggttatataaataacagatatggcagaacaattttgttgtagtatttttttccgtagcatttcttaataatagctcagtttttaaaggaggggaacaataccccatgagttcaaattaattttctctactttgaggtataccttcctaattatattttacataggctgttttttttaagtttaaattctcactgttaagttgcattgagagacaattagaaatgttgtaattgtcatatctttacatgtggattatgaacaaatgaaagtttgctgtgtgattgcagttttaaattataacatttcataaatatgtcaattttagaaactcaaactctttcccatcttttgtatggataaagtttatggtttcatttctgagaatagagttggtctgctgtgctaacttcatgtttcttattccaaaggcttgattatatttttttctccagtgattaaaaatgcagcgaaaatccaatctacaagttcatatattggtatttctagacatagtctagttctaaaagaatgtacttggtgtgcatttttaagtgtttcatgtagacagattaatatatttttgtacaacattgtatttctacatttatttcaagactgtacttttcagtgactttttcaagtgcatgtgttaacagaagattgtttggaacgagagtgcagtggcttctttactagcaaagagaagtgtaatacaagtgatcatagaaggtgagaatgtgtttatactgtatatggaaacctaatgcctcttttctaaagctttgtacatttttttcgtgaaatagattaaatattttctctctaaaa

SEQ ID NO: 34057 - DNA, 245 bp, Homo sapiens
gtaaaagtcctaatttctctctcctccaggagacaaataccactttcagggaaaagatggaaatgttgaaaaggaaaaaagagagttctgcaatttcaattataaaaatattgatggtatgaccacacctcctcaacacatcttcaatgaatcagccattttaaaatatgtaaaactcactgcattcagagaattttctgatcaaaagcaattgctaataatatgataataaagatgcaagaatt

SEQ ID NO: 34058 - DNA, 391 bp, Homo sapiens
tttttttttttgcgacagagtctggctctgtcgcccaagctggagtgcagtggcgctatctcggctcactgcaagctccgcctcctgggttcacgccattctcctgcctcagcctcctgagtacctgagcctacaggcgcccgccaccatgccgggctaatttttttgtatttttagtagagacggggtttcacagtgttagccaggatggtctcgatctcctcacctccagatctgcccgcctccgcctcccaaagtgctgggatcacaggcgtgagccactgcacccggccccaattgcacatttttaaggtccacataattaacaaatcagcaagttctatttatgtttttatgcgaatctatacgtctacaaggttaagtgtagaca

SEQ ID NO: 34059 - DNA, 925 bp, Homo sapiens
agcgggccgggggcggggggcggcgggcgacggggcgggcgcaggatgagggcggccattgctggggctccgcttcggggaggaggacgctgaggaggcgccgagccgcgcagcgctgcgggggaggcgcccgcgccgacgcggggcccatggccaggaccaccagccagctgtatgacgccgtgcccatccagtccagcgtggtgttatgttcctgcccatccccatcaatggtgaggacccagactgagtccagcacgccccctggcattcctggtggcagcaggcagggccccgccatggacggcactgcagccgagcctcggcccggcgccggctccctgcagcatgcccagcctccgccgcagcctcggaagaagcggcctgaggacttcaagtttgggaaaatccttggggaaggctctttttccacggttgtcctggctcgagaactggcaacctccagagaatatgcgattaaaattctggagaagcgacatatcataaaagagaacaaggtcccctatgtaaccagagagcgggatgtcatgtcgcgcctggatcaccccttctttgttaagctttacttcacatttcaggacgacgagaagctgtatttcggccttagttatgccaaaaatggagaactacttaaatatattcgcaaaatcggttcattcgatgagacctgtacccgattttacacggctgagattgtgtctgctttagagtacttgcacggcaagggcatcattcacagggaccttaaaccggaaaacattttgttaaatgaagatatgcacatccagatcacagattttggaacagcaaaagtcttatccccagagagcaaacaagggttgttgaagcaacacgtccttggcctcgtggggcgtgtggacctggtcctctctctgggccttaa

SEQ ID NO: 34060 - DNA, 715 bp, Homo sapiens
agcgggccgggggcggggggcggcgggcgacggggcgggcgcaggatgagggcggccattgctggggctccgcttcggggaggaggacgctgaggaggcgccgagccgcgcagcgctgcgggggaggcgcccgcgccgacgcggggcccatggccaggaccaccagccagctgtatgacgccgtgcccatccagtccagcgtggtgttatgttcctgcccatccccatcaatggtgaggacccagactgagtccagcacgccccctggcattcctggtggcagcaggcagggccccgccatggacggcactgcagccgagcctcggcccggcgccggctccctgcagcatgcccagcctccgccgcagcctcggaagaagcggcctgaggacttcaagtttgggaaaatccttggggaaggctctttttccacggttgtcctggctcgagaactggcaacctccagagaatatgcgaccagggccaactcattcgtgggaacagcgcagtacgtttctccagagctgctcacggagaagtccgctgtaagagttcagacctttgggctcttggatgcataatataccagcttgtggcaggactcccaccattccgagctggaaacgagtatcttatatttcagaagatcattaagttggaatatgactttccagaaaaattcttccctaaggcaagagacctcgtggagaaactt

SEQ ID NO: 34061 - DNA, 1251 bp, Homo sapiens
agcgggccgggggcggggggcggcgggcgacggggcgggcgcaggatgagggcggccattgctggggctccgcttcggggaggaggacgctgaggaggcgccgagccgcgcagcgctgcgggggaggcgcccgcgccgacgcggggcccatggccaggaccaccagccagctgtatgacgccgtgcccatccagtccagcgtggtgttatgttcctgcccatccccatcaatggtgaggacccagactgagtccagcacgccccctggcattcctggtggcagcaggcagggccccgccatggacggcactgcagccgagcctcggcccggcgccggctccctgcagcatgcccagcctccgccgcagcctcggaagaagcggcctgaggacttcaagtttgggaaaatccttggggaaggctctttttccacggttgtcctggctcgagaactggcaacctccagagaatatgcgattaaaattctggagaagcgacatatcataaaagagaacaaggtcccctatgtaaccagagagcgggatgtcatgtcgcgcctggatcaccccttctttgttaagctttacttcacatttcaggacgacgagaagctgtatttcggccttagttatgccaaaaatggagaactacttaaatatattcgcaaaatcggttcattcgatgagacctgtacccgattttacacggctgagattgtgtctgctttagagtacttgcacggcaagggcatcattcacagggaccttaaaccggaaaacattttgttaaatgaagatatgcacatccagatcacagattttggaacagcaaaagtcttatccccagagagcaaacaagccagggccaactcattcgtgggaacagcgcagtacgtttctccagagctgctcacggagaagtccgctgtaagagttcagacctttgggctcttggatgcataatataccagcttgtggcaggactcccaccattccgagctggaaacgagtatctaaattcagaagactataaggggatatgcttccgaaaattttcttagggaggactgggggaactgggttgacgcccaccgggtgcgtagcagtcagaagaactctagaaccggtgacgcgtgggataggcgagataagaagtctcgtttttaacacacgcctgtacctgacagagaagtagaccacaaacacaggaaaaagagaagcagcgaggacacctactaaccatgcgcgtcta

SEQ ID NO: 34062 - DNA, 1954 bp, Homo sapiens
cttggctggtggcagtccctctgtcctggcacagacgcagggggagaccctgtgtcttcagacagcatggacttcaggaccctactgagagatggaatcaagagctctccggggttctttgagtggggagttgtatcggaaaccaccatcagcgcgcctgagctcgcctcgcattgttcttctgtagtgcggggggccactgccaccaccgtgaggacacgttggggtctggggagggattgttatggctgtgggtgcaccttgcacgtcttgccgacctagctttgcacgctgatcttccctccgtgcccgcttacattgttaactgggtttctgccctccctcctctccttcgtatttctgtgtctcattgacaactgttctgtagtcgctttgttgacagttgccaaactgctttccaaaaacatttccactgcaatcccggtttttggtgccagccgcagtggtgtgagtgcgctcgctttattatagtcttgccagcactgggcgtctctgtgtattgtaaacacatgcgatcatcactcttatctctccatcccccccacaattaaagatgtgccgtgctatctctgctcaggttaccttggccttgggatgagttggctggaggctcaggcagcgcgagggacaggaggagggcgaggcgctgcctggtggattagcggggagccatggcacgggcaggactcaggagaggaggccggcagctcacagcagaccgcggggctcagctggcctgccctgtgcttggggtttgtttttgagcgttgaaatgaggtccttaaaccttagtccgtgcattgagagcaaggcagctgccttgagccttacttccttttcctctttgtcgcctagtatgacgccgtgcccatccagtccagcgtggtgttatgttcctgcccatccccatcaatggtgaggacccagactgagtccagcacgccccctggcattcctggtggcagcaggcagggccccgccatggacggcactgcagccgagcctcggcccggcgccggctccctgcagcatgcccagcctccgccgcagcctcggaagaagcggcctgaggacttcaagtttgggaaaatccttggggaaggctctttttccacggttgtcctggctcgagaactggcaacctccagagaatatgcgattaaaattctggagaagcgacatatcataaaagagaacaaggtcccctatgtaaccagagagcgggatgtcatgtcgcgcctggatcaccccttctttgttaagctttacttcacatttcaggacgacgagaagctgtatttcggccttagttatgccaaaaatggagaactacttaaatatattcgcaaaatcggttcattcgatgagacctgtacccgattttacacggctgagattgtgtctgctttagagtacttgcacggcaagggcatcattcacagggaccttaaaccggaaaacattttgttaaatgaagatatgcacatccagatcacagattttggaacagcaaaagtcttatccccagagagcaaacaagccagggccaactcattcgtgggaacagcgcagtacgtttctccagagctgctcacggagaagtccgctgtaagagttcagacctttgggctcttggatgcataatataccagcttgtggcaggactcccaccattccgagctggaaacgagtatctaaattcagaagactataaggggatatgcttccgaaaattttcttagggaggactgggggaactgggttgacgcccaccgggtgcgtagcagtcagaagaactctagaaccggtgacgcgtgggataggcgagataagaagtctcgtttttaacacacgcctgtacctgacagagaagtagaccacaaacacaggaaaaagagaagcagcgaggacacctactaaccatgcgcgtcta

SEQ ID NO: 34063 - DNA, 1102 bp, Homo sapiens
cgcggcggcggactggacgcgccgtatgacgccgtgcccatccagtccagcgtggtgttatgttcctgcccatccccatcaatggtgaggacccagactgagtccagcacgccccctggcattcctggtggcagcaggcagggccccgccatggacggcactgcagccgagcctcggcccggcgccggctccctgcagcatgcccagcctccgccgcagcctcggaagaagcggcctgaggacttcaagtttgggaaaatccttggggaaggctctttttccacggttgtcctggctcgagaactggcaacctccagagaatatgcgattaaaattctggagaagcgacatatcataaaagagaacaaggtcccctatgtaaccagagagcgggatgtcatgtcgcgcctggatcaccccttctttgttaagctttacttcacatttcaggacgacgagaagctgtatttcggccttagttatgccaaaaatggagaactacttaaatatattcgcaaaatcggttcattcgatgagacctgtacccgattttacacggctgagattgtgtctgctttagagtacttgcacggcaagggcatcattcacagggaccttaaaccggaaaacattttgttaaatgaagatatgcacatccagatcacagattttggaacagcaaaagtcttatccccagagagcaaacaagccagggccaactcattcgtgggaacagcgcagtacgtttctccagagctgctcacggagaagtccgctgtaagagttcagacctttgggctcttggatgcataatataccagcttgtggcaggactcccaccattccgagctggaaacgagtatctaaattcagaagactataaggggatatgcttccgaaaattttcttagggaggactgggggaactgggttgacgcccaccgggtgcgtagcagtcagaagaactctagaaccggtgacgcgtgggataggcgagataagaagtctcgtttttaacacacgcctgtacctgacagagaagtagaccacaaacacaggaaaaagagaagcagcgaggacacctactaaccatgcgcgtcta

SEQ ID NO: 34064 - DNA, 687 bp, Homo sapiens
ggggtttgtttttgagcgttgaaatgaggtccttaaaccttagtccgtgcattgagagcaaggcagctgccttgagccttacttccttttcctctttgtcgcctagtatgacgccgtgcccatccagtccagcgtggtgttatgttcctgcccatccccatcaatggtgaggacccagactgagtccagcacgccccctggcattcctggtggcagcaggcagggccccgccatggacggcactgcagccgagcctcggcccggcgccggctccctgcagcatgcccagcctccgccgcagcctcggaagaagcggcctgaggacttcaagtttgggaaaatccttggggaaggctctttttccacggtgagtatttgctgctgctgtgtgtcaaacgtacgtgatttccttggggaggctcaccttcctcggggcttgccggagactccaagcaaggctggtgtccttccaggcaggaggtctcaggccccttgaggggtgtcacctgttgtgaaggccacttgagtctttgggggctgggtaccccccaagcagatgacgtgatgagtgtggctaaatatttaacctggttttgtagatgagaacgttagacacatctcttgatggtctgcggaggttttttctgatgtagttaatttcattttaacctggcatcagcaagttac

SEQ ID NO: 34065 - DNA, 253 bp, Homo sapiens
ttcatttttattatatctgttatgataatccatgatgagtgatctctgatgttaccatcagaattgttttggggcatcacaaactgcactcatatgagatgatgaacttaaatgatgtgtgtgttctgactgcttcactgactggctgttccctcgttttttgctttatcctgacttccctattcattgaccataacaatattgaaattaggccaattaataaccctacaatggccaataaaggttcaagtga

SEQ ID NO: 34066 - DNA, 381 bp, Homo sapiens
gggcattttttaaatctttaatttggattttttaaaagttcatttttgattccattattacattgagtataagtaaatctctttatgtatcagtgactcttagaattgactaatctgagagagagttgtaagtcaggaagcagtaagctcatcctctgtaaataaatccacttttccttttgtatatttaatgcttaaaattggtatttcataccctaaaacccattgcataatttaaattatcacacttttttagtatatgaatatatgctgtactacaaaaatattaaaaccatttgtaaaaataaaacatggaaaagtatgtgctctgtgtaaaagttttcaaataccttaaaaccaaaaattaaacacatacaacct

SEQ ID NO: 34067 - DNA, 316 bp, Homo sapiens
acccctgatgttgacctcggccccctggtgcaggtggggtcactggatgtcccggggcccattgccatcgtctcctgtccctgccctgttctgcggcagcgagtccctcagtccagcccacactgggcagggggtggggggagttttatttagaagatgaattttcatacagaaaagcctaaaaatgaaaggacaaatggcccatcattgcattgcttagatgcctgttgacattcagaggcatgtagtaaatacacatggtaaaaaaaaatgtttgagtactacagaaaagtactattaaaactatcacaaagca

SEQ ID NO: 34068 - DNA, 423 bp, Homo sapiens
cagacaccaagtaagggatcaatcagttgttgcttttattaatagtaggcatccatctgcccatttgcacgtaagaaggaaacacccaagaatgaaaagtagcttgttgtaggtcacccagccaactagcacatagtggaaattagaatccaggcactcccagcagggcactttccaccaccctgcacttttgtattcatcaggcacagtatccttactgttgtctgtaactgtctatgttcccagtgtctgactctgcagggccctagtggtataaaggtactgagacttgcctgtgttcagggcttcctgaagattaaatggctgccgaagttcttgagtttagctttagctcaaaagatactgcgtcagactctgcgttctgagtagagtctcagagaatgaaaaaagaaatacaatgaa

SEQ ID NO: 34069 - DNA, 410 bp, Homo sapiens
ttttttttatttttagtagacacagggttttgccatgttggccaggctggtctcgaactcctgacctcaggtgatccacctgcctcagccttccaaagtgctaggattacaggcgtgagccaccgcgcccggccgactgcatactctttaacccttctttgtatgacctaattttgtagcactgtttccacaaagagaacagaaagagaacgcagccattccttggcaaactcttctcagcaaaccattcctcagcaaattctttctgtaaaagggccagagagtaactattgtagactttgcaggctatataatctctgttgcaattaatcaattctgccatcagagcttgaaagcagctatagacaacctataaatgaatggacatggctgtgttccttattggaact

SEQ ID NO: 34070 - DNA, 1064 bp, Homo sapiens
cagcctaaaagaggaaacagttttgcccattcattctttaaactttcttttgagagagccagacactttgtcagtaaatagtaaagcataatatgtgaaaaacatttcaaactaattatgtagaatctttaattccaggtagtaaggaatctgtatttatttaattttttaaattatgataaaatatgcatacacataaaatgtaccattttaagtgttgtaagtgtaccattcagaggcattaagtacattcacattgttgtgcaactgttgttgctattcatctccagaacttttccatcatccgaaactgaaacactgtattcattttttaaaaaactctcaatttccctttgcccctacctcctggtaatctctgttcccttgtatgtctctatgatttgcctattttaggtaccctttataagtagaatcatgcaattatttgatctcttgtgtcttacttatttcacttagtgtaatgacttcaagggtcatccatggtatagcaagtatcagaatttctttcctttttaaacatgaataatatcctgatgtatgattatagtacattttgtttaacctattcatccattgatggacagttggattactttcactttttggctattgtgactagtactgccataagcatggatagacaaatatctgtttgaatttctggtgtcagttcttttggatatatacccagaagtaaaattgttggattgtatgaaattttgtgtttaatttttcagtatttatttactaaatataatattttattcccacctgtttaatgttgcttgcttacatctattctttttcattcctgcatgtattatatattatagctagaccagattacagatcacatgctccatattttccagccttctattgctgtagtcatctggcttgttccctttgccttcctctttccttcttgatctgtcaacacattgaccatttatcaagatctaaataccattcctttgatacataatagagttcaacggtgacagtaaattagaaaaccaaaatataattgataatgaaactcc

SEQ ID NO: 34071 - DNA, 436 bp, Homo sapiens
  misc_feature (37)..(37): n is a, c, g, or t
  misc_feature (44)..(44): n is a, c, g, or t
  misc_feature (53)..(53): n is a, c, g, or t
  misc_feature (61)..(61): n is a, c, g, or t
  misc_feature (75)..(75): n is a, c, g, or t
  misc_feature (93)..(93): n is a, c, g, or t
  misc_feature (178)..(178): n is a, c, g, or t
  misc_feature (181)..(181): n is a, c, g, or t
tactccctgggctgttggggtgttggcagtcttggcnagtaccnaagggcccnacacaggnctccataggccccnggacggaccttggctccnagtcccttcaacgttaacctgccgatgacctttgtctggctcggaaaacaaccttcctcagtggatggccagcttcccctttttnccnaatgcgaattcggcacgagcaggaatgaaaaagaatagatgtaagctagaccagattacagatcacatgctccatattttccagccttctattgctgtagtcatctggcttgttccctttgccttcctctttccttcttgatctgtcaacacattgaccatttatcaagatctaaataccattcctttgatacataatagagttcaacggtgacagtaaattagaaaaccaaaatataattgataatgaaactcc

SEQ ID NO: 34072 - DNA, 3258 bp, Homo sapiens
gaagacacggacagatgaacttaaaagagaagctttagctgccaaagattgggaaagggaaaggacaaaaaagacccctgggctacacggcgtaggtgcagggtttcctactgctgttcttttatgctgggagctgtggctgtaaccaactaggaaataacgtatgcagcagctatggctgtcagagagttgtgcttcccaagacaaaggcaagtcctgtttctttttcttttttggggagtgtccttggcaggttctgggtttggacgttattcggtgactgaggaaacagagaaaggatcctttgtggtcaatctggcaaaggatctgggactagcagagggggagctggctgcaaggggaaccagggtggtttccgatgataacaaacaatacctgctcctggattcacataccgggaatttgctcacaaatgagaaactggaccgagagaagctgtgtggccctaaagagccctgtatgctgtatttccaaattttaatggatgatccctttcagatttaccgggctgagctgagagtcagggatataaatgatcacgcgccagtatttcaggacaaagaaacagtcttaaaaatatcagaaaatacagctgaagggacagcatttagactagaaagagcacaggatccagatggaggacttaacggtatccaaaactacacgatcagccccaactcttttttccatattaacattagtggcggtgatgaaggcatgatatatccagagctagtgttggacaaagcactggatcgggaggagcagggagagctcagcttaaccctcacagcgctggatggtgggtctccatccaggtctgggacctctactgtacgcatcgttgtcttggacgtcaatgacaatgccccacagtttgcccaggctctgtatgagacccaggctccagaaaacagccccattgggttccttattgttaaggtatgggcagaagatgtagactctggagtcaacgcggaagtatcctattcattttttgatgcctcagaaaatattcgaacaacctttcaaatcaatcctttttctggggaaatctttctcagagaattgcttgattatgagttagtaaattcttacaaaataaatatacaggcaatggacggtggaggcctttctgcaagatgtagggttttagtggaagtattggacaccaatgacaatccccctgaactgatcgtatcatcattttccaactctgttgctgagaattctcctgagacgccgctggctgtttttaagattaatgacagagactctggagaaaatggaaagatggtttgctacattcaagagaatctgccattcctactaaaaccttctgtggagaatttttacatcctaattacagaaggcgcgctggacagagagatcagagccgagtacaacatcactatcaccgtcactgacttggggacacccaggctgaaaaccgagcacaacataacggtcctggtctccgacgtcaatgacaacgcccccgccttcacccaaacctcctacaccctgttcgtccgcgagaacaacagccccgccctgcacatcggcagcgtcagcgccacagacagagactcgggcaccaacgcccaggtcacctactcgctgctgccgccccaagacccgcacctgcccctcgcctccctggtctccatcaacgcggacaacggccacctgttcgccctcaggtcgctggactacgaggccctgcaggctttcgagttccgcgtgggcgccacagaccgcggctcccccgcgctgagcagagaggcgctggtgcgcgtgctggtgctggacgccaacgacaactcgcccttcgtgctgtacccgctgcagaacggctccgcgccctgcaccgagctggtgccccgggcggccgagccgggctacctggtgaccaaggtggtggcggtggacggcgactcgggccagaacgcctggctgtcgtaccagctgctcaaggccacggagcccgggctgttcggtgtgtgggcgcacaatggggaggtgcgcaccgccaggctgctgagcgagcgcgacgcagccaagcacaggctcgtggtgcttgtcaaggacaatggcgagcctcctcgctcggccaccgccacgctgcacttgctcctggtggacggcttctcccagccctacctgcctctcccggaggcggccccggcccaggcccaggccgaggccgacttgctcaccgtctacctggtggtggcgttggcctcggtgtcttcgctcttcctcctctcggtgctcctgttcgtggcggtgcggctgtgcaggaggagcagggcggcctcggtgggtcgctgctcggtgcccgagggtccttttccagggcatctggtggacgtgaggggcgctgagaccctgtcccagagctaccagtatgaggtgtgtctgacgggaggccccgggaccagtgagttcaagttcttgaaaccagttatttcggatattcaggcacagggccctgggaggaagggtgaagaaaattccaccttccgaaatagctttggatttaatattcagtaaagtctgtttttagtttcatatacttttggtgtgttacatagccatgtttctattagtttacttttaaatctcaaatttaagttattatgcaacttcaagcattattttcaagtagtatacccctgtggttttacaatgtttcatcatttttttgcattaataacaactgggtttaatttaatgagtatttttttctaaatgatagtgttaaggttttaattctttccaactgcccaaggaattaattactattatatctcattacagaaatctgaggttttgattcatttcagagcttgcatctcatgattctaatcacttctgtctatagtgtacttgctctatttaagaaggcatatctacatttccaaactcattctaacattctatatattcgtgtttgaaaaccatgtcatttatttctacatcatgtatttaaaaagaaatatttctctactactatgctcatgacaaaatgaaacaaagcatattgtgagcaatactgaacatcaataatacccttagtttatatacttattattttatctttaagcatgctacttttacttggccaatattttcttatgttaacttttgctgatgtataaaacagactatgccttataattgaaataaaattataatctgcctgaaaatgaataaaaataaaacattttgaaa

SEQ ID NO: 34073 - DNA, 600 bp, Homo sapiens
caatagggttaatgtgcagaatcctgtgggcatcaggatagggcctgaatgcaaagctccatctctcttaacctagagtaagtcgcccttctgggccaatggctcagagaggaatgaaaatgacaatgtcgactgaccagggaacatcaaagtgtttcatgatgcctagccataaaacacttcctcccattttctcctccctgctctgctaaggcagttgtgggaacatttacccagattcttaagaaatagactctttaaatcccaggcctgattccttgatgacagaaaattaaggtggaaagagctttaggaccttagatactacacgagacatattgttaagtaggaaaaaaggaagttataaaatagcgtgaataatatgataccatctgcataaaactaataatgaaaggagaagaagagggactctttgcaaaggaatcagatatttatggaggaaattaatgactgcctcagaggaagtgacagagttgtctatctgggattgtcggacagagacttcacttttggtacctgttgcattttgtgctgtgatcttctattacctaagcacagtcatcacagaaaatttagatt

SEQ ID NO: 34074 - DNA, 1756 bp, Homo sapiens
agggctggagggttcttgtggcctctggcgggcctccagccagttaggtaaaacgtgtgtgtgtgtgtgtgtgtgtgtgtgtgtacacgagcgcatgcctctctctgatcacaggtagcactcagattaccctgcctgctctgtgctttgctgcagaccatttgaccagaacgtgtgcagctcagccagccacagaactggaatttttcaggagcagggggagcatggagtttggactttgctgagcaactgaagtggagcgcagagcttgctcgcttaggagagagcatcatggatggcaaacaagggggcatggatgggagcaagcccgcggggccaagggactttcctggcatcaggcttctttcaaacccattgatgggcgatgctgtgtctgattggtctcctatgcatgaagctgcaatccacggacatcagctgtctctgaggaacctcatcagccaggggtgggctgtgaacatcatcacggcagatcatgtttccccactccatgaagcctgtcttggaggtcatctctcttgtgtgaagattttattaaagcatggagctcaggtgaatggtgtgacagcagactggcacactccactgtttaatgcttgtgtcagcggcagctgggattgtgtgaatttgcttctgcagcacggagccagcgttcaacctgagagtgatctggcatcccccatccatgaagctgctaggagaggccacgtggagtgtgtcaactctcttatagcttatgggggcaacattgaccataagatcagccacctgggcactccactctatttggcttgtgaaaaccaacagagagcctgtgtcaagaagcttctggagtcaggagcggacgtgaaccaagggaaaggtcaggattccccacttcatgcagtggccaggacagccagtgaagagctggcctgcctgctcatggattttggagcggacacccaggccaagaatgctgaaggcaaacgtcctgtggagctggtgcctccagagagccccttggcccagctcttcttggagagagaaggtgcttctttgccaaaacctaagccctaatctgttgacatcccttggggctctagtagaagggcccccttctttgatgcagttatgccgccttagaattcggaagtgttttggaatccagcagcatcataagataaccaaactcgtcctcccagaggatctgaaacagtttctcctacatctttaaatgcatctagggaatggattcacaaacgatgtgaaaacattattgagtgttgtagccactagaattttaaaatcaagttggatttatagagtttgactagttttttcgattagatttgtatttgttataaacttgtttatggagtttgactaattttttctattcaatttgtatttgttaaactcaagccagggtggaaagacactgcatacgtttgtattattagttagaaggcatgaagacttttttccctgcttggagagtgtcataagttattgttttgcatatctactgcatgccaagcactttctgcatcatctaatttagccctcacagccactgggtcaagatgtccaattttccagagtaaggatagaggagtcaaattcaaatacaggttttctgacattaacttatgtgatgacttgatcgaggcaggcttttccagcatcactgtcctggttccatctctgctatatgggaatgaaaataaagaaacatatttcttggcttgtctaa

SEQ ID NO: 34075 - DNA, 1695 bp, Homo sapiens
agggctggagggttcttgtggcctctggcgggcctccagccagttaggtaaaacgtgtgtgtgtgtgtgtgtgtgtgtgtgtgtacacgagcgcatgcctctctctgatcacaggtagcactcagattaccctgcctgctctgtgctttgctgcagaccatttgaccagaacgtgtgcagctcagccagccacagaactggaatttttcaggagcagggggagcatggagtttggactttgctgagcaactgaagtggagcgcagagcttgctcgcttaggagagagcatcatggatggcaaacaagggggcatggatgggagcaagcccgcggggccaagggactttcctggcatcaggcttctttcaaacccattgatgggcgatgctgtgtctgattggtctcctatgcatgaagctgcaatccacggacatcagctgtctctgaggaacctcatcagccaggggtgggctgtgaacatcatcacggcagatcatgtttccccactccatgaagcctgtcttggaggtcatctctcttgtgtgaagattttattaaagcatggagctcaggtgaatggtgtgacagcagactggcacactccactgtttaatgcttgtgtcagcggcagctgggattgtgtgaatttgcttctgcagcacggagccagcgttcaacctgagagtgatctggcatcccccatccatgaagctgctaggagaggccacgtggagtgtgtcaactctcttatagcttatgggggcaacattgaccataagatcagccacctgggcactccactctatttggcttgtgaaaaccaacagagagcctgtgtcaagaagcttctggagtcaggagcggacgtgaaccaagggaaaggtcaggattccccacttcatgcagtggccaggacagccagtgaagagctggcctgcctgctcatggattttggagcggacacccaggccaagaatgctgaaggcaaacgtcctgtggagctggtgcctccagagagccccttggcccagctcttcttggagagagaagggcccccttctttgatgcagttatgccgccttagaattcggaagtgttttggaatccagcagcatcataagataaccaaactcgtcctcccagaggatctgaaacagtttctcctacatctttaaatgcatctagggaatggattcacaaacgatgtgaaaacattattgagtgttgtagccactagaattttaaaatcaagttggatttatagagtttgactagttttttcgattagatttgtatttgttataaacttgtttatggagtttgactaattttttctattcaatttgtatttgttaaactcaagccagggtggaaagacactgcatacgtttgtattattagttagaaggcatgaagacttttttccctgcttggagagtgtcataagttattgttttgcatatctactgcatgccaagcactttctgcatcatctaatttagccctcacagccactgggtcaagatgtccaattttccagagtaaggatagaggagtcaaattcaaatacaggttttctgacattaacttatgtgatgacttgatcgaggcaggcttttccagcatcactgtcctggttccatctctgctatatgggaatgaaaataaagaaacatatttcttggcttgtctaa

SEQ ID NO: 34076 - DNA, 1647 bp, Homo sapiens
agggctggagggttcttgtggcctctggcgggcctccagccagttagaccatttgaccagaacgtgtgcagctcagccagccacagaactggaatttttcaggagcagggggagcatggagtttggactttgctgagcaactgaagtggagcgcagagcttgctcgcttaggagagagcatcatggatggcaaacaagggggcatggatgggagcaagcccgcggggccaagggactttcctggcatcaggcttctttcaaacccattgatgggcgatgctgtgtctgattggtctcctatgcatgaagctgcaatccacggacatcagctgtctctgaggaacctcatcagccaggggtgggctgtgaacatcatcacggcagatcatgtttccccactccatgaagcctgtcttggaggtcatctctcttgtgtgaagattttattaaagcatggagctcaggtgaatggtgtgacagcagactggcacactccactgtttaatgcttgtgtcagcggcagctgggattgtgtgaatttgcttctgcagcacggagccagcgttcaacctgagagtgatctggcatcccccatccatgaagctgctaggagaggccacgtggagtgtgtcaactctcttatagcttatgggggcaacattgaccataagatcagccacctgggcactccactctatttggcttgtgaaaaccaacagagagcctgtgtcaagaagcttctggagtcaggagcggacgtgaaccaagggaaaggtcaggattccccacttcatgcagtggccaggacagccagtgaagagctggcctgcctgctcatggattttggagcggacacccaggccaagaatgctgaaggcaaacgtcctgtggagctggtgcctccagagagccccttggcccagctcttcttggagagagaaggtgcttctttgccaaaacctaagccctaatctgttgacatcccttggggctctagtagaagggcccccttctttgatgcagttatgccgccttagaattcggaagtgttttggaatccagcagcatcataagataaccaaactcgtcctcccagaggatctgaaacagtttctcctacatctttaaatgcatctagggaatggattcacaaacgatgtgaaaacattattgagtgttgtagccactagaattttaaaatcaagttggatttatagagtttgactagttttttcgattagatttgtatttgttataaacttgtttatggagtttgactaattttttctattcaatttgtatttgttaaactcaagccagggtggaaagacactgcatacgtttgtattattagttagaaggcatgaagacttttttccctgcttggagagtgtcataagttattgttttgcatatctactgcatgccaagcactttctgcatcatctaatttagccctcacagccactgggtcaagatgtccaattttccagagtaaggatagaggagtcaaattcaaatacaggttttctgacattaacttatgtgatgacttgatcgaggcaggcttttccagcatcactgtcctggttccatctctgctatatgggaatgaaaataaagaaacatatttcttggcttgtctaa

SEQ ID NO: 34077 - DNA, 1726 bp, Homo sapiens
agggctggagggttcttgtggcctctggcgggcctccagccagttaggtaaaacgtgtgtgtgtgtgtgtgtgtgtgtgtgtgtacacgagcgcatgcctctctctgatcacaggtagcactcagattaccctgcctgctctgtgctttgctgcagaccatttgaccagaacgtgtgcagctcagccagccacagaactggaatttttcaggagcagggggagcatggagtttggactttgctgagcaactgaagtggagcgcagagcttgctcgcttaggagagagcatcatggatggcaaacaagggggcatggatgggagcaagcccgcggggccaagggactttcctggcatcaggcttctttcaaacccattgatgggcgatgctgtgtctgattggtctcctatgcatgaagctgcaatccacggacatcagctgtctctgaggaacctcatcagccaggggtgggctgtgaacatcatcacggcagatcatgtttccccactccatgaagcctgtcttggaggtcatctctcttgtgtgaagattttattaaagcatggagctcaggtgaatggtgtgacagcagactggcacactccactgtttaatgcttgtgtcagcggcagctgggattgtgtgaatttgcttctgcagcacggagccagcgttcaacctgagagtgatctggcatcccccatccatgaagctgctaggagagcttatgggggcaacattgaccataagatcagccacctgggcactccactctatttggcttgtgaaaaccaacagagagcctgtgtcaagaagcttctggagtcaggagcggacgtgaaccaagggaaaggtcaggattccccacttcatgcagtggccaggacagccagtgaagagctggcctgcctgctcatggattttggagcggacacccaggccaagaatgctgaaggcaaacgtcctgtggagctggtgcctccagagagccccttggcccagctcttcttggagagagaaggtgcttctttgccaaaacctaagccctaatctgttgacatcccttggggctctagtagaagggcccccttctttgatgcagttatgccgccttagaattcggaagtgttttggaatccagcagcatcataagataaccaaactcgtcctcccagaggatctgaaacagtttctcctacatctttaaatgcatctagggaatggattcacaaacgatgtgaaaacattattgagtgttgtagccactagaattttaaaatcaagttggatttatagagtttgactagttttttcgattagatttgtatttgttataaacttgtttatggagtttgactaattttttctattcaatttgtatttgttaaactcaagccagggtggaaagacactgcatacgtttgtattattagttagaaggcatgaagacttttttccctgcttggagagtgtcataagttattgttttgcatatctactgcatgccaagcactttctgcatcatctaatttagccctcacagccactgggtcaagatgtccaattttccagagtaaggatagaggagtcaaattcaaatacaggttttctgacattaacttatgtgatgacttgatcgaggcaggcttttccagcatcactgtcctggttccatctctgctatatgggaatgaaaataaagaaacatatttcttggcttgtctaa

SEQ ID NO: 34078 - DNA, 1669 bp, Homo sapiens
agggctggagggttcttgtggcctctggcgggcctccagccagttaggtaaaacgtgtgtgtgtgtgtgtgtgtgtgtgtgtgtacacgagcgcatgcctctctctgatcacaggtagcactcagattaccctgcctgctctgtgctttgctgcagaccatttgaccagaacgtgtgcagctcagccagccacagaactggaatttttcaggagcagggggagcatggagtttggactttgctgagcaactgaagtggagcgcagagcttgctcgcttaggagagagcatcatggatggcaaacaagggggcatggatgggagcaagcccgcggggccaagggactttcctggcatcaggcttctttcaaacccattgatgggcgatgctgtgtctgattggtctcctatgcatgaagctgcaatccacggacatcagctgtctctgaggaacctcatcagccaggggtgggctgtgaacatcatcacggcagatcatgtttccccactccatgaagcctgtcttggaggtcatctctcttgtgtgaagattttattaaagcatggagctcagcacggagccagcgttcaacctgagagtgatctggcatcccccatccatgaagctgctaggagaggccacgtggagtgtgtcaactctcttatagcttatgggggcaacattgaccataagatcagccacctgggcactccactctatttggcttgtgaaaaccaacagagagcctgtgtcaagaagcttctggagtcaggagcggacgtgaaccaagggaaaggtcaggattccccacttcatgcagtggccaggacagccagtgaagagctggcctgcctgctcatggattttggagcggacacccaggccaagaatgctgaaggcaaacgtcctgtggagctggtgcctccagagagccccttggcccagctcttcttggagagagaaggtgcttctttgccaaaacctaagccctaatctgttgacatcccttggggctctagtagaagggcccccttctttgatgcagttatgccgccttagaattcggaagtgttttggaatccagcagcatcataagataaccaaactcgtcctcccagaggatctgaaacagtttctcctacatctttaaatgcatctagggaatggattcacaaacgatgtgaaaacattattgagtgttgtagccactagaattttaaaatcaagttggatttatagagtttgactagttttttcgattagatttgtatttgttataaacttgtttatggagtttgactaattttttctattcaatttgtatttgttaaactcaagccagggtggaaagacactgcatacgtttgtattattagttagaaggcatgaagacttttttccctgcttggagagtgtcataagttattgttttgcatatctactgcatgccaagcactttctgcatcatctaatttagccctcacagccactgggtcaagatgtccaattttccagagtaaggatagaggagtcaaattcaaatacaggttttctgacattaacttatgtgatgacttgatcgaggcaggcttttccagcatcactgtcctggttccatctctgctatatgggaatgaaaataaagaaacatatttcttggcttgtctaa

SEQ ID NO: 34079 - DNA, 1702 bp, Homo sapiens
agggctggagggttcttgtggcctctggcgggcctccagccagttaggtaaaacgtgtgtgtgtgtgtgtgtgtgtgtgtgtgtacacgagcgcatgcctctctctgatcacaggtagcactcagattaccctgcctgctctgtgctttgctgcagaccatttgaccagaacgtgtgcagctcagccagccacagaactggaatttttcaggagcagggggagcatggagtttggactttgctgagcaactgaagtggagcgcagagcttgctcgcttaggagagagcatcatggatggcaaacaagggggcatggatgggagcaagcccgcggggccaagggactttcctggcatcaggcttctttcaaacccattgatgggcgatgctgtgtctgattggtctcctatgcatgaagctgcaatccacggacatcagctgtctctgaggaacctcatcagccaggggtgggctgtgaacatcatcacggcagatcatgtttccccactccatgaagcctgtcttggaggtcatctctcttgtgtgaagattttattaaagcatggagctcaggtgaatggtgtgacagcagactggcacactccactgtttaatgcttgtgtcagcggcagctgggattgtgtgaatttgcttctgcagcacggagccagcgttcaacctgagagtgatctggcatcccccatccatgaagctgctaggagaggccacgtggagtgtgtcaactctcttatagcttatgggggcaacattgaccataagatcagccacctgggcactccactctatttggcttgtgaaaaccaacagagagcctgtgtcaagaagcttctggagtcaggagcggacgtgaaccaagggaaaggtcaggattccccacttcatgcagtggccaggacagccagtgaagagctggcctgcctgctcatggattttggagcggacacccaggccaagaatgctgaaggcaaacgtcctgtggagctggtgcctccagagagccccttggcccagctcttcttggagagagaaggtgcttctttgccaaaacctaagccctaatctgttgacatcccttggggctctagtagaagggcccccttctttgatgcagttatgccgccttagaattcggaagtgttttggaatccagcagcatcataagataaccaaactcgtcctcccagaggatctgaaacagtttctcctacatctttaaatgcatctagggaatggattcacaaacgatgtgaaaacattattgagtgttgtagccactagaatttttgttataaacttgtttatggagtttgactaattttttctattcaatttgtatttgttaaactcaagccagggtggaaagacactgcatacgtttgtattattagttagaaggcatgaagacttttttccctgcttggagagtgtcataagttattgttttgcatatctactgcatgccaagcactttctgcatcatctaatttagccctcacagccactgggtcaagatgtccaattttccagagtaaggatagaggagtcaaattcaaatacaggttttctgacattaacttatgtgatgacttgatcgaggcaggcttttccagcatcactgtcctggttccatctctgctatatgggaatgaaaataaagaaacatatttcttggcttgtctaa

SEQ ID NO: 34080 - DNA, 1608 bp, Homo sapiens
agggctggagggttcttgtggcctctggcgggcctccagccagttaggtaaaacgtgtgtgtgtgtgtgtgtgtgtgtgtgtgtacacgagcgcatgcctctctctgatcacaggtagcactcagattaccctgcctgctctgtgctttgctgcagaccatttgaccagaacgtgtgcagctcagccagccacagaactggaatttttcaggagcagggggagcatggagtttggactttgctgagcaactgaagtggagcgcagagcttgctcgcttaggagagagcatcatggatggcaaacaagggggcatggatgggagcaagcccgcggggccaagggactttcctggcatcaggcttctttcaaacccattgatgggcgatgctgtgtctgattggtctcctatgcatgaagctgcaatccacggacatcagctgtctctgaggaacctcatcagccaggggtgggctgtgaacatcatcacggcagatcatgtttccccactccatgaagcctgtcttggaggtcatctctcttgtgtgaagattttattaaagcatggagctcagcacggagccagcgttcaacctgagagtgatctggcatcccccatccatgaagctgctaggagaggccacgtggagtgtgtcaactctcttatagcttatgggggcaacattgaccataagatcagccacctgggcactccactctatttggcttgtgaaaaccaacagagagcctgtgtcaagaagcttctggagtcaggagcggacgtgaaccaagggaaaggtcaggattccccacttcatgcagtggccaggacagccagtgaagagctggcctgcctgctcatggattttggagcggacacccaggccaagaatgctgaaggcaaacgtcctgtggagctggtgcctccagagagccccttggcccagctcttcttggagagagaagggcccccttctttgatgcagttatgccgccttagaattcggaagtgttttggaatccagcagcatcataagataaccaaactcgtcctcccagaggatctgaaacagtttctcctacatctttaaatgcatctagggaatggattcacaaacgatgtgaaaacattattgagtgttgtagccactagaattttaaaatcaagttggatttatagagtttgactagttttttcgattagatttgtatttgttataaacttgtttatggagtttgactaattttttctattcaatttgtatttgttaaactcaagccagggtggaaagacactgcatacgtttgtattattagttagaaggcatgaagacttttttccctgcttggagagtgtcataagttattgttttgcatatctactgcatgccaagcactttctgcatcatctaatttagccctcacagccactgggtcaagatgtccaattttccagagtaaggatagaggagtcaaattcaaatacaggttttctgacattaacttatgtgatgacttgatcgaggcaggcttttccagcatcactgtcctggttccatctctgctatatgggaatgaaaataaagaaacatatttcttggcttgtctaa

SEQ ID NO: 34081 - DNA, 1450 bp, Homo sapiens
agggctggagggttcttgtggcctctggcgggcctccagccagttaggtaaaacgtgtgtgtgtgtgtgtgtgtgtgtgtgtgtacacgagcgcatgcctctctctgatcacaggtagcactcagattaccctgcctgctctgtgctttgctgcagaccatttgaccagaacgtgtgcagctcagccagccacagaactggaatttttcaggagcagggggagcatggagtttggactttgctgagcaactgaagtggagcgcagagcttgctcgcttaggagagagcatcatggatggcaaacaagggggcatggatgggagcaagcccgcggggccaagggactttcctggcatcaggcttctttcaaacccattgatgggcgatgctgtgtctgattggtctcctatgcatgaagctgcaatccacggacatcagctgtctctgaggaacctcatcagccaggggtgggctgtgaacatcatcacggcagatcatgtttccccactccatgaagcctgtcttggaggtcatctctcttgtgtgaagattttattaaagcatggagctcaggtgaatggtgtgacagcagactggcacactccactgtttaatgcttgtgtcagcggcagctgggattgtgtgaatttgcttctgcagcacggagccagcgttcaacctgagagtgatctggcatcccccatccatgaagctgctaggagaggccacgtggagtgtgtcaactctcttatagcttatgggggcaacattgaccataagatcagccacctgggcactccactctatttggcttgtgaaaaccaacagagagcctgtgtcaagaagcttctggagtcaggagcggacgtgaaccaagggaaaggtcaggattccccacttcatgcagtggccaggacagccagtgaagagctggcctgcctgctcatggattttggagcggacacccaggccaagaatgctgaaggcaaacgtcctgtggagctggtgcctccagagagccccttggcccagctcttcttggagagagaagacggagtcacgctctgtcgcccaggttggagtgcagtggcgcgatctcggctcattgcaacctccgcctcccggaattcagataagatgtgttccccaggccagcagtccttcatgctgcttgtcataaggagaaaagaatatggagagagcagcatagatgcaaatcagcctttactcgttggaagaccattgctggcaggaacctaactgaaacagagccacagttatgaaaaaaaacagcaggagttcttccaacaatcaacaggacccgtacgattgggggccggtgcttggtcaagccggaatcccgcttgggggcgggggggtccgtggtccgggtccaccctctcgtgtttgggttacttccaccccggggtaaaacagtgggccacacttg

SEQ ID NO: 34082 - DNA, 896 bp, Homo sapiens
  misc_feature (725)..(725): n is a, c, g, or t
  misc_feature (896)..(896): n is a, c, g, or t
agggctggagggttcttgtggcctctggcgggcctccagccagttaggtaaaacgtgtgtgtgtgtgtgtgtgtgtgtgtgtgtacacgagcgcatgcctctctctgatcacaggtagcactcagattaccctgcctgctctgtgctttgctgcagaccatttgaccagaacgtgtgcagctcagccagccacagaactggaatttttcaggagcagggggagcatggagtttggactttgctgagcaactgaagtggagcgcagagcttgctcgcttaggagagagcatcatggatggcaaacaagggggcatggatgggagcaagcccgcggggccaagggactttcctggcatcaggcttctttcaaacccattgatgggcgatgctgtgtctgattggtctcctatgcatgaagctgcaatccacggacatcagctgtctctgaggaacctcatcagccaggggtgggctgtgaacatcatcacggcagatcatgtttccccactccatgaagcctgtcttggaggtcatctctcttgtgtgaagattttattaaagcatggagctcagcacggagccagcgttcaacctgagagtgatctggcatcccccatccatgaagctgctaggagagcctggccaacatggtgaaaccccatctctgcgaaaaatacaaaagtagccaggcatggtggcacacgcctgtagtctaagctacttgngaggctgagatgggagaatctcttgaacccagaaggtaaaggctgcactgagctggaatgcagtggcgcgatttcagctcactgcaagctccgctttccgggttcatgccattctcatgtctaagcctaaataaagcagattaccctcaattgcgggttggccctttcccn

SEQ ID NO: 34083 - DNA, 554 bp, Homo sapiens
ttgcacccgttaagaaattgaattggtgtgggatgggtctaggaaagaagtttaaaatagggattagtttgtaagcgattgaaattatcctaactagtttcaaagttcatgttcctggggagggcatggaggagatagaacattgagtaacattttcgatgctttatagccactccctaattccatttttcacaaaaacctgtggaatttcgtagttatttctccattttatagctgaggaatttaaggctcagagatgttaaataacatcttcagagtggtggaccccacatttgaacccaaaacatcccccttcctgtcttcattctggagcttcttttaccaggtgaatggtgtgacagcagactggcacactccactgtttaatgcttgtgtcagcggcagctgggattgtgtgaatttgcttctgcagcacggagccagcgttcaacctgagagtgatctggcatcccccatccatgaagctgctaggagaggtaaatctgttgagaatttttttttctacccactccttcaagggacatcttactgct

SEQ ID NO: 34084 - DNA, 479 bp, Homo sapiens
tcagaataattttcatgacaattagaagatagacagagactgaacatcactggaggcaaataaattgcttagaagactttgaaaaaaaagtccaaatgagagatgaagagcacccaaaccaagaaactggcagtgctcatggagagcaagaggatgtgatacagagatccacattaggtgtctcctcatcagagattactaatcttatagtccttaatcatctctcaaacttcagcttaaatctcagtttccaaagaaggtgcatgataccactgtgaacacaaaaccatgacttcaattgagaacaggagaaaaatcccccttccattccaagacttcatgtgtgaataagacaaagactttgtactctttgctgattttttgacaatagttatacacaactgtgactcttgccactaaaagatgccagtgtcctctgaatatcaaattaaaaatttatgcactttcagtagaaaaat

SEQ ID NO: 34085 - DNA, 370 bp, Homo sapiens
ggctgaacacagttttatgcttaggcttacataattaaggttgtaatgttatttctggatctttgaggcattagtagagatcactgatgaagtaaactgacaaacataactccttttctttggaaaagatggatgctgtctgctaaactaatcaagttatagagccttaggccgggtgtgtcggctcatgcctgtaatcccggcactttgggaggccaaggtgggcggatcatgaggtcaggagtttaagatcatcctggccaacatggtgaaaccccatctctactaaacacacacacacacacacacacacacacacacacacacacacacgccaggcatggtggtgggcatctgtaatcccagctac

SEQ ID NO: 34086 - DNA, 260 bp, Homo sapiens
agaaaatcagtgggtgagctaatatctttgggaaagggaaggttaggatttgaaaggacaatctctcaatgttatataatagcattcacatagaaatactgatgtacagatcaaacactcttagatattacaagggaaacttggagggttcaaagatttttaaggttaaaccacctaatggaaatatttccaacatttagtgaggtcagtcacaagtaatcgccatagatcaagcaagataccaaagggatgccaggaat

SEQ ID NO: 34087 - DNA, 841 bp, Homo sapiens
ttgctgtggctagcagaaaaagaaacatgtccaagaacaaattgagacaacttaggaacaacttaggaaccaaaaaagtattcccaaatatgtatgaaattcttggaggaaaaccaaaagatatgtgcttactataaggctgccaaatacgacgtatcttgaaacaggctggaagtttcaactaaattagtctgccaacaaagcagctggccaaggaagcaggctctaattcaacctgaaaatcttgcatgatagccaatgctggagaagtgacatatcccttaataggagaggaagtcccaaggacagcatccagatttcttttcccagttcaccttggctaggccatagtgagatcctttaaagtccatatctttgtaaatttaattttagactctttccatagtggataggggctcaatatttaaaggagaaaagggagaaagaaagggagaggagaaaggagaagtaatactgctaaccctaacctagatatatataaaattgcccttgtttacaagaaaagaaccacaaacataggtattaatcacaaggagcttacattttcattgtggaaagggcaccatgaatatgattcaaatgaagacatacaaaaaactcataagcagaggcacacactcactccactccatcccattaagggatttggaagcagaagaaggtggattttttttcactaacacttaagattttcctggccaggcgcagtgctcaagcctgtaatcctagcactttaggaggctgaggcgggaggacagcttgagcccaggagttaagacgccagcctggacaacatggtgagaactcatctttaaaaaaa

SEQ ID NO: 34088 - DNA, 223 bp, Homo sapiens
tctaaaccaagacgtcttcaactttagcctgcatatgcatcacctggaaatcgaggtgtagggtgggccctgagtttgcctttctaaggagagatgctaacaagatctggaccatcagccactcaagacctttaacatgtttcatacctgtcgacaccctgatacaccttggcctctgaaatactttacaagctttgctaaagaacacgttcataatgtacca

SEQ ID NO: 34089 - DNA, 1240 bp, Homo sapiens
ctccttgtcaggaagctcaatattttgtctccaacagacatttttaatgttattaaacaaaagtagtttgtgatgccatgagtcatcaaagattagattagtagttcttaatcccatcaggccagataactgcttttttgaataaataatttgtagtctgtacacttctgaagtgaacttcattgatgactgccacacacaaatttctaaaaaaggcaccaccacaggtacgcacacatgcatgcacgcgcaggcttggagaaagccttactgcttccattgagaaatagtggtctggaataaatcatgctaaaataatcctatttttttaataggattgctggagtggtcaaggacattgtagccagaacaatacaggcaaccttttgagctaatttgtggatcatggtagaggaacatggctttttagctgcatgagtgaaaggtcattcccaaagtaagttttccctggatgtttgttacctgtgagacaagtatgcagagagtgctgtaagattctttacttggccccgtcctatttaacagtttatattaatgtagatggtcttgctttgtaatttatagctgattcaaaacgacaagtagaagttcactagatttcaggatttgagaagatattttgatgttaaacttaacagaaacttaaactgtaaaagttaaataaagataaataggaagttctgtactttgcttaccaacctcaattccagggtttgttagattggttaattagagttcataaaaacaatcctgtgttttagatgattggtgtgaactcttgaggtgtcatgttcttccccacttaatagaatacttaatagatgttcagagtggtggagcttcatttttgaggggagtttactagaagggagaatggtctggaaatcatgaagaacagtaaagggaagattagtatttagctgggttaaaagagacttgcgattatagttattttcagatatttaaagaatattttttggaagtaggatttgatttattttatataggcctagaatataggggatgagaaggatataggacatcatatttggatttcattatggaaatttttttcctgtggaaagataagagaatgtggccaggcacaatggctcacacctgtaatcccagctctttgggaggctaaggtgggaaggttgcttaaagccaggagtttgagaccagcctgggcaacaaagtgagaccctgtttctacaaa

SEQ ID NO: 34090 - DNA, 310 bp, Homo sapiens
ataaattattatttattatttcctgaacataattaagaaaaatgtgtgtgttcacttacaaataacctttaaaaggttctgaagagataaagcaaaacatcgtatgtaaacaattgatgattcaaataatgttagagaaagaaggtctgaaacttcctatttcttattttcaagttcctatgttaaagctgatctgattaccaaacatttgttcactgatctttcagagtttcaagctgtatttctcaacttaccaatattcatgagtgcttttgattcactgtgctgaaaaccagaacaaaggaaggac

SEQ ID NO: 34091 - DNA, 368 bp, Homo sapiens
tattaaatataagatctagtaataagtctattactttttctttttttttcaagacagagtcttactctgtcacccaggctgagtgcagtggcaccatctcagctcattgcagcctccacctactgggttcaaacgattcttatgcctcaagcctcccaagcagctgggaatacaggcatagaccaccacacccagctgattttttgtattttcataaagagggtggtgtcgaactcctgagctcaggcagtctgcctgcctcagcctcccaaagtgctaggattacaggcatgagcgaccatgcctggccttttctgtgcttttaaagtagtgaggattgaagacaatattttaagacatctgcaaca

SEQ ID NO: 34092 - DNA, 416 bp, Homo sapiens
gaaattcattatcatctgagtcctcatttcttgactgatagaatggggataattatatccacctcaaattatgggaaatcaaatggggacaaagctatagtagggttctgaaatgcattgctaaaatgtttaggatcattattattaatattgttttgaaatatcaagtcagaagactttactttctactgttaatgtcaactgatccctaatatactgagatcctttcccctggctcttttgtattattttaaaattaaattaaattattaaaaaatagagatgaagtctcactatgttgcccatgctggtctcgaactcctgggctgaagtgatcctacttggcttcccaaagtgccaggattgcaggtgtgagccaatgtgcttggcctcttctgtattcttgacaatgagaa

SEQ ID NO: 34093 - DNA, 452 bp, Homo sapiens
ttatttctcataattctggaggctgggaagtccaagatcaaaatgtcagcagattcagtgtctggtaaaggcatgtttcctggttcataggtggtaccttctcactgtgtcttcacatagtggaaggggcaaggcagctctctggggcctcttttattaggtcaataatcccatctgtgagcgttctgccctcatgacctaatcacctctccaagcccccagctccccacaccatagcgctgctaagttttaacacatgaattttagagtgacacaaatattcagaccatagaactgttttccccgaacacttcatcttgaggttgttctaaactgaaagttcacatttcattagtacccctgctttactgtgacagacatatagtttgtcatacataaaacccacaaactcaagaaaaaaagaaagcacccatggaaatatataattaaca

SEQ ID NO: 34094 - DNA, 432 bp, Homo sapiens
tgagacagagtctcactctttcgcccaggctggagtgaagtgctgctatcttggttcactgcaaactccgccctctgggttcaagtgattctcctggctcagcctcccaagcggctgggattacaggtgtccaccaccatgcccagctaatttttgtatttttagtagaggcgggatttcaccatgttggccaggctggtctcaaacacctgacctcaggtgatccacctgtctcggcatcccaaagtgttgggattaccacacctggccacaaatgtgcattataaaggaatgtgaaagtaatgattactcacccccaacccactattgaacttctcaatgaaaaagacttcagggagataaggcacatgcatcctatggcttccaacacctagaaaagcaagtgtcccctggagggagtgtcccatggag

SEQ ID NO: 34095 - DNA, 362 bp, Homo sapiens
tcagttggatatctatacagaataccaggaacccgacccctatttcatatcatacacaaaaattaactagggctggatcatagacttaaaagtccaaagacagaacaataactcttttaaaacaaaacataggtaaatatctcaatgaccttagaacagataaagagttcttaacaggatgcaaactgcaccaccataaaagaaaataataaattatgttttatgaaaattcaatcttttcattaaaaaacaccatttagaaaagataaggacaaactgcagagagggagaagatatttgttacatgtgtatccaacaagggacttgtatccagaacatctaaagaagttctacaactcaaa

SEQ ID NO: 34096 - DNA, 449 bp, Homo sapiens
ttccagattatggactaagtgtgggcattatacaaattgagaggagcggtccctatgttttccaggtatatattgttatgacataaagttgatttcagtaagtctggaaagacttaagtagatagcctggataaacagagctaggaggcagggaaccttggtctcagtgcagattttattgctgaactttcttcagtcatcttagtcaaatcctgtagcatctctggacctcaattcttacctgtcaatgagaataaaaacacctatcttttctaacttctacagtttctgcctgagaaaatttaaatatgtgccataaacatagataacattgctaaagacggcttacctctttttatttattctttaaaataatctgcaaacactaccagtttttcagctgcttttggtttcaaaaatgtctcagagcaaagagaattaaaaaaaaa

SEQ ID NO: 34097 - DNA, 577 bp, Homo sapiens
tattgcaaaaaccatagtgtatatagggtttggtactatccacagtttcagtcatccactgagggggtcttggaatgtatcccctttaaataagagggaactgctatgtatgaaaaatgctcaggatcaccagggaaatgcaaattaagatcacagtgagataattacctcacacctgttaggatggctttcaccaaaaagacaaaagatacgtgtaggcaaggatgtggaggaaagagaactcttgtatacgtaaaaaaaaaaaaaaaaaaaattctcctgacttttatttgaattcattatatgttgcctagattgcgatatataatgcccatttattattccattccctctgtgatcaccaattaccaaaatagtgattcttccttatttgaggcctctgacagaaaaaactagaatgagatttgacatcacaaccaacacatccccaaagacataggttaaaaacatattgataaggatcaatatgtatattaaaacagtatgtatatcaaaacattatgttgtatatactttaaatatataaatttttattaattatactttagtaaagctg

SEQ ID NO: 34098 - DNA, 388 bp, Homo sapiens
cacctatgacatacccacagccaacataatactgaatggggaaaagttgaaagcatcccctttgggaactgggacaagacaaggatgcctactttcaccactcctcttcaacatagaactggaagtcctaaccagagcaatcagacaagagaaagaaatcaagggcatccaaattggtaaagacgaagtcaaactgtcactatttgatgatatgattttttaccttgaaaaccctaaggactcctccagaaagctcctagaactgataaaagaattcagcagagttcccatatacaagattaatgtacacaaatcagtagcttttctgtacaccaacagcgaccaagcagagaatcaagaactccaccacttttacaatagctgcaaa

SEQ ID NO: 34099 - DNA, 494 bp, Homo sapiens
ctctttttttcaaaaattaattgaccatatttgtgtgagtctgtttcttggatatctttccattgatctttgtgtctgtcctttagccaataccatgttgccttgagttctgtataataagtcttgaatttgataatgtgagtcctccaactttgttcttaaaattgtttggctattctggttcctttgcactttaatgtatattttataatccgcttgttgatgtctacggaaagtgtgctagaattttagttaggattgtgttgtgtctatagatcaaattgtgaagaagtcacatcttagcaatacttagtttttgattccatgaacacaatataatctaatcagcacatagatcctgtacatatcttactggatttatacccaagtatgaactgttttctggtttttttttgtgtgtgtgtgtgggggtggggggacatgtgctatttgaaatggtatattcaattgttcattgctggtatatggaaaaa

SEQ ID NO: 34100 - DNA, 424 bp, Homo sapiens
aataaataaaataagtaaataaaataaataaaaaaggatgtcaggaattcgagacctgcctgaccaacatggagaaaccccgtctctactaaaaaagaaatacaaaattagccaggcatgatggcacatgcttgtaatcccagctagtcgggaggctgaagcaggagaattgcttgaacttgggaggcggaggttgcggtgagccaaggttgcgccaagattgtgccactgcgctccaacctaggcaataagagcgaaagtccatccccaaaaaaaaaaaagtgatctgaggaaaggcaaaggcctgggctcagaaggtgggatagagagggtggatgtgagagtgtggccagagcgggacacacagcagtggcttggggatgagaaggaagggagaatctcaacggagatgcagtggctttgg

SEQ ID NO: 34101 - DNA, 123 bp, Homo sapiens
tttgactatatctatcaaaagctaaaatgtacttccctttgaaccagtttgaaccagcaattctactgcatgtattggataaatttgcacaagtttcaaatatatatgcaactttgtaatagc

SEQ ID NO: 34102 - DNA, 923 bp, Homo sapiens
ggctaattgaacactaactacagtgatcaaatttgcattttccctgtcaaatgtgccactctgtgaatagctaaattaacttagtcttcctggaatatacccaaatgttgagaaccatctaggacctttcaaaaccatttggtctgttctgtcttaagataagcagaataaatacgtccctgaaatcaaaggaaaactaattgtagtacctctttccagctttaagtcatcaaagtttgaccatctcaagtatgttctaatggggttcattattttgtttgttctacatctgagatacttttacatttgcattgttaatatccatttttcaaaatttattgacatgtctatttattttcaagaatagtaacttattagcctctcctttcaaagcacaaaagctacacatggccaccagaacaagtcaaacaacacagaagtatatcacggaagagctaactcaggccccttctcctcttaaatttctgtcttcctccttaaccagcattaacaatttggtgtttattcttcaatacccatctaagctcatataaaatacacaagtatttataaatgtggtgaacattttctcataaaaatgagatcacactatgttaattctcttcttaacatttaaaaaaaaaatctgtcatctgggcatattggctcactcctgtaatcccagcactttgggaggacaaggcaggaggatcgtctgagcccaggagtttgagaccagcctggacaacatagggagaccctcatctctacaaaaactacaaaactcacacctgtagtcccagatgcttgcttgggaggttgagttagtattgcttgagcctgggagtttgaagctgcagtgagctgtgattggaccattggactctaacctggatgacagagaaacaccctcaaaaaaaaaa

SEQ ID NO: 34103 - DNA, 266 bp, Homo sapiens
gggtagtagagttagagattccatcctcttgaaagcacagttgccccgggaagagtaaaagggagcagaaggcgtaagccaggcacggctgttttcactgttgttcaccttttgtatccttacgaatatgaagatgtactaagttgtgtgttttgcgtgcatatataattttaagctacttgagttgtaggtccctccagtctgtgattcagtttgagatgggactgtatgggaattaacagtgccttgtcttcttaaggagtgat

SEQ ID NO: 34104 - DNA, 1167 bp, Homo sapiens
aactctgggatttctaaggaaggatgcagtgcagagacaggtcccagaggagacaagagctgagagaccatccaaactgggaccaccttgtcactagacttcaaattttcaatattgatagagtgttttctaagagtcaggccctttgctgagtgctatgtgcagcaggatcaaaggcagccaggaggtagaggagtcttgaggtacatcagtcattggagttgaagagcagagattcaaaggaaagttggaactggagctttaaaggagatgtgaagtgggtgactcaacctctgactcagaaaaattgatacctgcagaagaaaaaacccggcgggcttaggactcccagctgagtgttgtatcctccatccctttccacctggtcccttcattttctacccctcacagttccctaacgagaaggtggtccacccaacagacaacgctgcctcagatggttatcaagagggtaccctaagaaagaaatcatctcaccctctctttgtccccatttgtcaagcagcagtgaggccgagccaggggatggtgaaagtggaaggaggtgggagttgggcatcgggtgtgaagatgctcttgaaaggggttttaataaccacttgctaccaggccagtgaacacttaccatagttgatgccttttgagcatgttgcattgtaaactgtccctgaaattactgtgcacttggcttatgggatgaaacatcctcctagttctcttgtctctcagcttctctgaagtctcattgagcaccttctcttcaatttcttttacacagtaagaataggatcagctgtgctaaactaacaaatacccagatatccaggtttggctcatgctacacgtccaaagtaagtcatccaggaagctctgctcatcatcgtactcaggaagccaggctgacagtctttctcctgcacatctgctcccagaacctccccagcagaatgaagggaacctaagaatttattcactggcttttaatgatccctcctagaaagaacacacttctcgcatttcattttccaatgtaaatcatatggctgcaactaacttcaaataagtgggaatacttgaaggtggaaaacatttaagaagtacatactaaataaataataaaatacttctacaagagaaaaaaaaaaa

SEQ ID NO: 34105 - DNA, 1042 bp, Homo sapiens
ttttaatatcctacctcttctttatctagaacattatgaattcaatatttcacatacattgtaggacaaattactgttactctgatcatgatatagcaacatttaagtcagtttccccaaatattcattcaacaaatacttattgagcaactattgagtgctagccccctctctgttcatcagggatttagtagtaacaaagcagacaaatacatacacacagactatgtcaggtggtgttcagagctgtgaaggagagtcagagtgagggaatcaagggtgatgggtgctttttcagacagggcctttctctattaaacaggcttccagtggaagactctgctaatgtttagcagataaccaaaatgcatcagttagaaaaaaatatgatgagaatgagggactggttataggaatgcaattgggcacaaatgtgggaagagctgggtagtgaagctctagaagggagaggtagagaattggaagaagaagcactggtacaggtagacaattcagaacttgcacagaatctgagaagctgaagtaggactgtgattgggagcttgtggagaggtctatggaaattatcatgctgctgaaattgttgcctctatttatctgctacccttctggtccgtggccaagatcctggtgggtgggcttggagccagccttcgtcagcaggcctgcggtaagaaagatgggatggacacacagtggtggagatcaaggatcagctgcagcaggctgggtccctctgcatctgtccatcactgcgactgatggcaatgactgagtataacacctttcttcatggtcaactctacccaggaaccacgtagggaaggaaattctggaaaacagctcccagccttagccaacttgacatatcataatccaacagaactcaacctctaccaacttggaaatcatgtacatttgtcaggactgtatttaatttccacatagagagaaagcaaaattatacttttgaccaaactaatagaattatccattaaacaaacaaaactgtgaaaaaagt

SEQ ID NO: 34106 - DNA, 426 bp, Homo sapiens
ttgtgggggcactggggggacatgggaccactcactctgtcacccaggctgaagtacagtgatgaaatcagagctcattgcagcttcaaactcctgggctcaagagatcctcctgcctcagcctcctgagtagctaggactgcaactgcgtgccaccacacccagctttttatttttttgtagagataggatcttgctatgttgcccagactagtctcaaattcctggcctcaagcgatcttcccacctcggcctctcaacttgctgggatgacaggcatgagccattgtgtctggcctatattttcatatgcaaagatcagacacttctaacaacatggtctgccttttttatttaagttaaaaatgtgattcttacaaaggaacaatttaggttatattctttagaaggcaaacaatccttatt

SEQ ID NO: 34107 - DNA, 1116 bp, Homo sapiens
  misc_feature (304)..(304): n is a, c, g, or t
cgtgggatgttagcggtgggggcaatggagggcacccggcagagcgcattcctgctcagcagccctcccctggccgccctgcacagcatggccgagatgaagaccccgctgtaccctgccgcgtatcccccgctgcctgccggccccccctcctcctcgtcctcgtcgtcgtcctcctcgtcgccctccccgcctctgggcacccacaacccaggcggcctgaagcccccggccacgggggggctctcatccctcggcagccccccgcagcagctctcggccgccaccccacacggcatcaacnatatcctgagccggccctccatgcccgtggcctcgggggccgccctgccctccgcctcgccctccggttcctcctcctcctcttcctcgtccgcctctgcctcctccgcctctgccgccgccgcggctgctgccgcggccgcagccgccgcctcatccccggcggggctgctggccggactgccacgctttagcagcctgagcccgccgccgccgccgcccgggctctacttcagccccagcgccgcggccgtggccgccgtgggccggtaccccaagccgctggctgagctgcctggccggacgcccatcttctggcccggagtgatgcagagcccgccctggagggacgcacgcctggcctgtacccctcatcaaggatccattttgttggacaaagacgggaagagaaaacacacgagacccactttttccggacagcagatcttcgccctggagaagactttcgaacaaacaaaatacttggcggggcccgagagggctcgtttggcctattcgttggggatgacagagagtcaggtcaaggtctggttccagaaccgccggaccaagtggaggaagaagcacgctgccgagatggccacggccaagaagaagcaggactcggagacagagcgcctcaagggggcctcggagaacgaggaagaggacgacgactacaataagcctctggatcccaactcggacgacgagaaaatcacgcagctgttgaagaagcacaagtccagcagcggcggcggcggcggcctcctactgcacgcgtccgagccggagagctcatcctgaacgccg

SEQ ID NO: 34108 - DNA, 724 bp, Homo sapiens
tttttttttttaaaaaacaatgaaccatgaatgccattaatgctttttctatttaaattggtagagcctctcaagatagcaagagagcatattgtggtgttgtagaaagaatatggtctttggagtcagccttatttaaaggtccaatctgagtaatttcagaaaagttgatttgacacaattagttaagtgttctcttctacgaaatagtgataatgttgtccacttttctgagttgcgacaattagaggttatatatgtaagctacctggaacagagtcagtgctctattcacctggatgaatggatcaatgacattataaagactctataaatttgcaattccagaaaagccaaatactttcccttttgcattttgcatgtatgtgcatgaatatatggctccaaagacaattatgaaggagagatgccacaaaatatgatgctatgttctagatgcatagtggcacgggattgcaaaatagttccaattgcactaagaataataaagtcgagaaaatagagatcctacagaaatattttatcttatggagccaggaatgggaatttaaatttaactttgcaattactgacaggaatctatgaatattttatgtgattccaggaaagtgagaatttgctaactacatcttaaattacctgacacaggtgaattccctcagcaagttcatggtcgacgcggccgcgaatttagtagtagaag

SEQ ID NO: 34109 - DNA, 133 bp, Homo sapiens
ccattcatcgaaccttcctgagacaacggaattctggcgatggaacacatgtcagtggtggccaggggacaggtgtggctatgaaggggtggctgccttgtgatgattcaatatgctgtttttcctttgtggt

SEQ ID NO: 34110 - DNA, 541 bp, Homo sapiens
ctcctatccatggtgccttgtgtcctggctgtggcaacctgcatgctgaactgagtccaacagcaggcaccaaggctatgacatccactgtgggtcccagcacagtggctataaagatcagtgaagataatatggtgagaatgaaggcaggcaagctaaagcagtgatgggtgaccttccttgggcccagaagccccctgcccccccaacctgggcgttccagagccacatgtcatacacaagaaatggatttctgtctccagccgctggcttcccctagttatagagaatacaaattgcaaaacgatgcaatgataagatgacccacagccagagcctggggatgagccaaggcggtgcttttagaggcctgcagagacacaccagtctgattccagggtcagcggcagctggcagtcagggagagggttccttggcctccactgtcccatttctggctcctcggtcttagcccagagacagcccaggtcccaggttgaactggcaggagcctgtggccccaataagtgacttggtgtca

SEQ ID NO: 34111 - DNA, 546 bp, Homo sapiens
aaaaatgatcagggtggtggtctgcataaaccctgaagttccattctgtgctcagaatgggcagtaggaatgctgaggttttaaatttgggatcaaggccaggtggggtggcttacttctgtaatcccagcactttgggaggccgaagtgggaggatcacttgaggccagaagcccgagaccagcctgggtaacatcatgagtacccgtctctacaaaacaatacaaaaattagccaggtgtggtggcgggcacctgtagtcctagctgctcaggaggctgaggtggaaggatcagttgaggccaggagttggaggctgccgtgagctatgattgtgccgttgcactccagcctaggtggcagagtgagagcggcatgtttccccacctcccccagcgtgctgtgctgtagctgtgctgggcggcacactgtgggcgcaggccaggcctcttgctttctcagttcctcgcaatactactaattcctccaggccagctcagtggtgcctccgctggcagccctggcagagctgatgcctccgctggg

SEQ ID NO: 34112 - DNA, 662 bp, Homo sapiens
tggactagaatctagacactgaaatgcacatacatgctttatgtaatgcagaatgcatttattggagaactcataaacatcctataaaattttcttccctgagatgcaactataaaacttggccttattctgagaatgcttaacatagatttcatccatactgtaacactgattttgttgttgttgtccttaaagcagctcagcttcctgaggtagtgttatgtctctgtggcaacaaggtgaaaatgtctagcttattttgtcaaagtcaacaataatccacagactccagacctcaatatctgtcccaatttgccattttactttagtgctccaaaaatatggcttatagaaaaaacaataggtgttttaaagagatttacctgaatgatatagagaatgtctagatattttctggctatcaggtaaaacctacccttcaagatggtagaatatataatagcatacaaaacctctatttacctaataagtactttaatttacagaaaaaaaatgtaaatgtaagtgtcggatttagtgccaagtgcagggaatctgaaaaatgtatactaggtctctgctctccgtaattctgccttcatgggtcctagccccatccctcaggaggttgtcctaagatcgtcagtatcaggatgctgtca

SEQ ID NO: 34113 - DNA, 612 bp, Homo sapiens
ctcagctgaaatcagccattttgcaggcagtttttcagaagctggatgaaaggattcattctgtatttacatcagcctgacatattctgtatttatatcagcctgacatttctgattttctaggactttttagtttttttcctgccgtacagtgtattgactaccatttccagctctttcagttggcaaacttgataatagttttagttaaataactagtttgtgttttcgattttaaaaaatgttgtgaagatcagtattagttaggaagccctgcagcatatctgtagaaccttctttccaggttgacctttatcttatgccagactctttgggtaaacttattcaagcattcgttaatttgttgaattatattatcctctagctcacctttctcagtcttgtctacagagatgttttgagacacattttcagacacctgccaaaatccttcccctgatgtaaggctgcgaatctataatatcaaaaaaggaaactaggtttatttggtataacttgctcttattataagcatgctgctgtctgttgacatcatttcccatcctcagtgccaataaaaccatgaatgtaggatttgtcggaaactaatat

SEQ ID NO: 34114 - DNA, 346 bp, Homo sapiens
gtccttctttcactcagtatattgactttgagatccatttatgtcatagcatgtatcaataattcaccatttttttcgctgcatagtattccactgtatagacatactataatttgtttatccattcacttaaggatgggcatttagactgtttacaatttttagcaatacaaataaagtagcagtgagcatctgtgcacaagtctttataaaaatatggccacgtgcggtggctcacgcctgtaatcccagcactttgggaggccaaggggggtggatcacctgaggttaggagttcaagaccagcctggctaacacggtgaaaccttgtctctactcaaaatac

SEQ ID NO: 34115 - DNA, 324 bp, Homo sapiens
ttttttttaagagatgggggtctcactatgttgcccaggctgtctcaaactcctgggctcgagcaatcctcctgcctcagcctcccaaagcactgggattacaggcatgtgcctcagaaattcttgatacggcaaaactaaggtgacagaaagcagatccagggttgcctagggctgaggtagagaaggcacacgtaaaagggcataaaggaaatctggggtgataaaaatactctatgacttgattgtggtggtgactataagactctatacatttggcaggacgcgatggctcacgcctgtaatcccagcactttgggaggc

SEQ ID NO: 34116 - DNA, 318 bp, Homo sapiens
gtaaactcttccttttgaactatggcatacctgagtggacaggcaagttgcagggatggggacatttgacacagagaacttaggaagttccaggaaaccagtatttctgaaactgtagtcaattctgttttgattttttgctacattgatgtaatacctatttcattgttgacctaatattgttctttaagtgggagtgcttgttctttttgaagggacactcttcgtttaataaagaacaagtataattcgcccaaaatagtaagtaaccataagcgttgatatgtaaactctagtgtttgtgtcctacataaagcg

SEQ ID NO: 34117 - DNA, 346 bp, Homo sapiens
gctgcaaccccccgggctcacagcacactcttaaggccagtgctaccagctcccttgggtggatagaggagctacggctcagaagcatgcccacagctcccccaggaccctgaggccagcctgtggcagggcctgtgatttgaacccctctacaaggcttcaaatcagtgctgtttgtcctggcctcataaaacctggctgcccagttgggattggtgtcatctgccttgctgaactgggcactccttgggaagagggtgggtgctgcgagaaggcggtggatcctggctgtgcaaccttcgcaggtggctgaacctctctgtgtctcagtttgctcatctgcaaa

SEQ ID NO: 34118 - DNA, 476 bp, Homo sapiens
gaaaatgagccagtgggcaggaaggaaccccaaattctgtatataaactctgcctaaatctctggatgatccctgatctactcatgtgtagggcagtttccaagtaactaaaagagctgaaccaaaatatgacccactgcctaaaagacagaatttgctgttttgagtccaaccaagttatacagatctgtgggacagtatcattggggctaacatattaatatgtgtaagagtctgggacaactccccactctccgcaaaaaagagcaaagcatattcaatctaaaaacaaccacaagtaggtatatcacagttgaagacgaagatacttgaaatggctagagaaaaatgaaactttacataaagaagaacaataaattggatgaccacagacatcttcatattgtactgcagaaacaaaagagaacagagacaataaaacaacatctttaaagagctcaaatacaaagctgcca

SEQ ID NO: 34119 - DNA, 1499 bp, Homo sapiens
ggcttaaaaagatgaatcgagatgcagtgtgtaggaagcatgggcaagggatgaggaacgccactttgaaaattactaaaactaaagcaagtgactaagagtgtgaatgaccctggctgcaatgactacgcctgctgggcttctattaaaattagactctatttcctgagcacccacaaatggacctgacaaagggaagacacagatgtactgcgtgatgaggaaagcctatcaggattaaaatatggctataactcagcctctccagagtgcagccaccatgacctccgcagattgatgatggaagaaaagaaaaccaggatatcctgtgctctggcttccctggaccatggatggaggacagcccatcccctcatccctagtcccccttgggaacgtatcagcagattctagcatgtccctggagcagaaaatgacatttgtttttgtgattctgttgtttattttcttgggcattctcattgtccggtgcttccggattcttttggatccatatcgaagcatgccaacctctacctgggctgatggacttgaaggcctggagaaagggcagttcgaccatgcccttgcttaggagggatggtgtgggatctcctcctgaggagatgaagtgctttgtgtcttggtgaggattccctttatttagtgttctcaacaaatcaaatttaaacaatatttggtcccaggaccataatccattattccataaatatgcagttgggttaaagacatttgaggatgttggaaatggacacttatataactaatccaacataagaaggtttaaatttttatgtttgctcaatgaatgagtactcttaaaattgtgtgattgtgaaaccaagagcgttaatactgacatagatttgccatcaaacaaaacaccacctgatctgactaaagaataaaagactagaaaggatctcatatgaatctggtgacaaggccaggaagagatttccttgctctaattatgtctatatttgttttatttcatgggcacctatctgggtcctgagcagaatgaggaagattgcgctgaatggacccaaagtagtttcttgttttctcctaaagcagggagctttgggaagcaatggaaaagcttaaaagagatgattctgtccttggtaaatgtgagtgagaatagcgttttgtttttcaagtaaaacttaattcaaaggctacaaagttttaaaaactatttaccaagccaactacattatatgtattcatattaataacatgtgtagaggtagctatacattacttgaatttacactttacacaaatgatttaaaaaataggttgcaagtgcagcttaaagttttttttcaatgaaaagttaattgtttagaggagaagacttttatagtcttcagaggaatgtgtatttatgattgtatatagtcaccaaataaaacttttcaagaaacaaagacacaagaaagcagaataagcaaacaacaagagggggc

SEQ ID NO: 34120 - DNA, 187 bp, Homo sapiens
gctttagaaggcagcgtttcccttagaggagcacagtgggctgggcagcaacagtggatgacgtgcgtattacggcactgctgggtatcatcataaccaacatgaacttgtggcttgttcttacaatgcgccagacgtctcatgaaacattcaacgtttcttaattcaccctcacaaccagaatgag

SEQ ID NO: 34121 - DNA, 516 bp, Homo sapiens
gggccccgtggacacagcctggagcgccgtccgcatcggcctgtacgcccagcacctggaccactggctgcgctacttccccctgtcccacttcctgttcgtcagcggggagcgtctggtcagcgacccggccggagaggtcggccgcgtgcaggacttcctgggcctgaaacgggtcgtcacggacaagcacttctacttcaacgccaccaagggcttcccctgcctcaagaaggcccagggcggcagccgtccccgctgcctgggcaagtccaagggccggccacacccacgcgtgccccaggccgtggtccggcgcctgcaggagttctaccggcccttcaaccgcaggttctaccagatgacgggccaggacttcggctggggctgagcggcaccctggggatgctcagcaccttgattgacacccgctcgcctggccagagcgggctgcgtgcacatgctgggcagagaggaatatttaagaaataaagcttggacccagatttttccaca

SEQ ID NO: 34122 - DNA, 317 bp, Homo sapiens
ctttggctgtaccaatcaagtctactgggttttgctttctatttcgttactgcttttagatttattaaaatttcttctattgcctgatggttaaaattcatacacatagacaccacacagtataaaagagttatgaaaaaatatacaccaatgggttaagaatgattgtctttaggtaagtgagattgtcaggcttttgctttgttttattttgtttttatttgaatattcgttttctacagtgagcatgtattttgtaacaatgaaacatatgcagattacttgtaaataaaattatatctgggagactataaatt

SEQ ID NO: 34123 - DNA, 620 bp, Homo sapiens
attcacaaatacctttcctcagttttttattccaatctggtagacaaaggtggtgctcagtaagttaagtgttggttgaattgagggtgtatgatgcttttcaaagcttgactatcaacccagatagagatttctgtgttcatcttgctggattttttttcttgttttgtgtccactactcctagactctcacatgtgtccaggtatatatacaaagattgaaattgtttaattagcttactctggctaatggtaatgactgatatttcagatttctttttaaaagaaggcctatatttgatgtgtctatctttcactcatttttatgcctactctcatattcttagctcatttccttctctttagtactctgcctttgggttttagagtaacttaatatcacacatgtgggttgtgtcgattatgagcagagcaatatgcgaacctcttttttttttttccatttgattttttcaagactctgtcacccaggctggagtcaggtggcacgatcacgactcactgcagccttaaactcttcctgggctcaagcaatcctcctgccttggcctcctgagtagctaggactacaggcacataccgctgtgccccattaattt

SEQ ID NO: 34124 - DNA, 231 bp, Homo sapiens
gctttggggctcccacaggctggtgtctccagggtgggttgctcattctgtgccgtattccatcccctgtcgcagttgacaccttttccctttgcacccacagtggtgaagacctgtgcttatgctcctagagagacgcaggtgagaacccaagtcacacccctcagtgttttgttttgttggtgtgtgtgtgtgtgtgtgtgtgtgtggtggagtctcactctgttgccc

SEQ ID NO: 34125 - DNA, 440 bp, Homo sapiens
gtatatcagtgttgaaggtaagttctccacctgccctttctgcctgcatcagaatctttttatcccaaaacggtcaacagtgagctactccaagtgtggtccatagatcaccagcattgggatcatcttggggcttgttagaaatgcagaacccgggctgggcacagtggctcacacctgtaatcccaacgcttttgagttgctgtggtgggacggtcgcttgaggccaggagtttgagaccagcctaggcaatatggcaagaccttgtctctacagaaaaatttcaaaaagttagtagggcatggtggcacgcacctgtagtctcagttattcgggaggctaaggtatgatgattgcttgagcctgggagttcaaggttacagtgagctatgatagtgccactgcacttcagcttggactgaagatcctgtctcagaaa

SEQ ID NO: 34126 - DNA, 477 bp, Homo sapiens
ctggactactaagttgaggcctctgccatgagcagcttcagaaggcctgctagtgttcccttctccttgcctgcatgcacagaaggccacacaagggaaacagccatggccagctgataagaacaggggccatcatgcaagcagaaggggaggacaaggccaccttccaacaggcactaaagtaacaatgagaacaacaaaaacaaaatacatagaaaagaaaaaaatggcaaaattgcacttcaggctttaatgccctccttactttcaccccagataatgcaaaaatttttcctcttccttcgacagagcgtaaatgatatgacctggctgggcgctgtggcttacgcctataatcccatcactttgagagcctgaggcaagaggactgctggagcccaggagctccaggctacagtgagctatggtcacgccactacacttcagcctgggcaaaagagtgagagtctgtctcaa

SEQ ID NO: 34127 - DNA, 428 bp, Homo sapiens
gtcaggctgatctcgaactcctgacctcatgatccgcccaccccagcctcccagagtgctgggattacaggcataagccaccgtgccaggccgagaaaacttattaatacatgctctacctgctaaatattttccttcaaagcaaaggaagggccgggcacggtggctcacacctgtaatcccagcagtttgggaggccaagacaggcggatcatttgaggtcaggagttcaagaccagcctggccaacatgatgaaaccccatctctactaaaaatacaaaaactagccaggtttggtggcacacaccttgtaatcccagctctagagaggccaaggcaagaatcacttgaaccgggaggaggttgcagtgagctgagactgcaccaccgcactccatccagcctgggtgacagagcaagactcctc

SEQ ID NO: 34128 - DNA, 374 bp, Homo sapiens
ctaaacaggaatctggtgtcactaggttactgcagtttaagacagattgcctttgtccaacctttccgtgtttgccaagtaaatagtaaataactggacagtatctttgtgattaaaatgatcttccaaaatagtttcctccacaagatactccaatatgtttctgcatatttaagtaagctagactgtgtctctaggataatttattttagacacctgaagagttcataaagtgctacagagtgaaattattatttgagttgtatcatgtatcaaattccatatgaaactgcttttcttctaagactgaaccaggaagaagttgaatacctgaacagaccaataatgagctccaaaactgaatcagtaataag

SEQ ID NO: 34129 - DNA, 465 bp, Homo sapiens
tcttcacacccacagccaaggcccctccggccattggaggctcacacaagggggttatggaaacgccagtgtggcagcgtggggtcaccaacacctcagtggccaggctgcatggtgcctgggccagcttctctgtgaggaaggggagtttgcagggaaactgtttgcagaaaagctgttcctactgtggagggactgaccttggcccctggagcaaactcagtccttaaccacgtgctcaggctacttaattttaaatgaatttgcacagttgcgtgttatgagtgaattcataaacctacaaaggcatagtcttttattcatgctggtatgtgtggaagggggttacttttttaaagttctaaaattaaagaaaaaaagataaatcatcctgtgttgaggattggattttgcaactgaattctctttatcctttgctagatcttgagaaaagaaagaagaaaa

SEQ ID NO: 34130 - DNA, 2685 bp, Homo sapiens
cgcgggggcggtggcgcgcggtcagctgacccggcgggccttgacccagaagctgggccctggcggcggatctggacgtggcggcccgcgccgggctgagtcaccaggagggagctgtggccgaggacgccgaggcctggagtgggtggtagccccgagctgggacgctcctccctccacaatctccccaggtctgcagggaccgagggcctacactgcctcctcccacgccgtgcttaggaacccttgctggcctcagaacaccagcgccctccctccggtgcagccctgcctggccgggggcccctcctccacagccatggtctggaagaaactgggctcccgcaacttctccagctgccccagtggctccatccagtggatatgggatgtgttgggtgaatgtgcccaggacggctgggacgaggccagcgtgggcctgggcttgatctccattctctgctttgctgcatctaccttcccccagttcatcaaagcctacaagacgggcaacatggaccaggcgctgtccctgtggttcctcctgggctggattggcggagactcctgcaacctcatcggctccttccttgctgaccagctgcccctgcagacctacacggctgtgtattatgtcttggcagacctggtgatgctgacgctgtacttttactacaagttcaggacgcgcccctctctgttgtctgcccccatcaactccgtgctgttgttcctcatggggatggcgtgcgccacaccgctgctgagtgctgctgggcccgtggctgcccctagggaagccttccgggggcgggcgctcctgtccgtggagtcgggcagcaagcccttcacccggcaggaagtcattggcttcgtcatcggctccatctccagcgtgttgtacctgctttcccggctgcctcagatccgcaccaacttcctccggaagtccacccaggggatctcctactctctgttcgcgctggtgatgctggggaacacgctgtatgggctgagcgtgctgctcaaaaaccccgaggagggccagagcgagggcagctacctgctgcaccacctgccctggcttgtgggcagcctgggcgtgctgctgctcgacaccatcatctccatccagttcctggtgtacaggcgcagcaccgccgcctcggagcttgagcccctcctccccagctgaccagaaccaggctgagcgcaggaggacaggcaccaccggatgccacaccaggcaggaggaggtgtggacagtgatggtacggcggccctgcatcagcctgcgggtggcctctggatcctccgtggaccgaaccgtccccccaggaacacaccttcaggtagaccccgaagcctcaaggccggggctggagcggagaccccagggcctctcaggagacagtgaggctgcccctcctaccacctacctcattctgcctactcaccccaggggccacagccacagcctgctggtctcgaactccttacctcaggtgatctgcttgcctcagcctctcaaagtgctgggattacaggtgtgccaccgcgcccggccaagatgggagtatttttatgaccattttacagatgggagaacagtctcagcacaattgagcagcttgcccagctaggagcagcagcaacacgagaccctccagctttgggagccaccccacacctggccaacgctggcggcccgtgtccccttcctccatccttgctgggggcccatggcttgtggcagttcagcttcaccctcaggagtggcccgaaccctgctggacccaggctcccttctcaccatcctgaatagcgactttgctgagcctctggccctgccgagatttcaggataagttacccccaggcccgaagccccagcttgccctggcctgtgcctgcctcaggtgccagctagatgtctcgctccacctgggtctgggacctggctccacaccagttacctgggaccagtaggtgcccttccagcctgaagatctgggggcacagtatagccacatgagccccaagtgtggtcctgaactggggccgggtggggaagagtgagatgggataacatagcccctgcttggaggcccttctctgatggggtgacataatcccttcctcctgggaaacaccagcttttggggtgatagcactttcaggcaggagctatggttccttcctcaggaggcctccaatctgatggggaagacatggcccctccccctggggagtgccctgtgtgatggaggcgatacagcccctaccttcagagagcacctggcctgcagctcatccaaacctgagtctcctctcccttggaggcctcattccagcgccccaaggaggattcaaactgttggggctggaagaacttggtggcctgggtccctggagccctgttgaaggagctggtgacattctgatgctggaggcaggtgacggggagcacagactttgtgtcctgcacactgagctccaagtgtgccccagccactgagccttgtgacttgagcagatgtccgaagccgtttcttcatcccatgagaccagtaatactgtctgcctcagaacatagccgtgatcaagatgagcacggaggctcgtgtcccagcacctggcacacagtaagtgcctggtaaataaacaatggctatatttgcttgtc

SEQ ID NO: 34131 - DNA, 1996 bp, Homo sapiens
cgcgggggcggtggcgcgcggtcagctgacccggcgggccttgacccagaagctgggccctggcggcggatctggacgtggcggcccgcgccgggctgagtcaccaggagggagctgtggccgaggacgccgaggcctggagtgggtggtagccccgagctgggacgctcctccctccacaatctccccaggtctgcagggaccgagggcctacactgcctcctcccacgccgtgcttaggccagttcatcaaagcctacaagacgggcaacatggaccaggcgctgtccctgtggttcctcctgggctggattggcggagactcctgcaacctcatcggctccttccttgctgaccagctgcccctgcagacctacacggctgtgtattatgtcttggcagacctggtgatgctgacgctgtacttttactacaagttcaggacgcgcccctctctgttgtctgcccccatcaactccgtgctgttgttcctcatggggatggcgtgcgccacaccgctgctgagtgctgctgggcccgtggctgcccctagggaagccttccgggggcgggcgctcctgtccgtggagtcgggcagcaagcccttcacccggcaggaagtcattggcttcgtcatcggctccatctccagcgtgttgtacctgctttcccggctgcctcagatccgcaccaacttcctccggaagtccacccaggggatctcctactctctgttcgcgctggtgatgctggggaacacgctgtatgggctgagcgtgctgctcaaaaaccccgaggagggccagagcgagggcagctacctgctgcaccacctgccctggcttgtgggcagcctgggcgtgctgctgctcgacaccatcatctccatccagttcctggtgtacaggcgcagcaccgccgcctcggagcttgagcccctcctccccagctgaccagaaccaggctgagcgcaggaggacaggcaccaccggatgccacaccaggcaggaggaggtgtggacagtgatggtacggcggccctgcatcagcctgcgggtggcctctggatcctccgtggaccgaaccgtccccccaggaacacaccttcaggtagaccccgaagcctcaaggccggggctggagcggagaccccagggcctctcaggagacagtgaggctgcccctcctaccacctacctcattctgcctactcaccccaggggccacagccacagcctgctggactcaggactgtcctgtcaactccagacaactgaataaacaggccgggtacagtggctcgcacctgtaatcctagcactttgggaggccgaagcgggtggaccacttgacgtccgtagttcgagaccagcctggccaacatggtgaaaccccatctctactaaaaatacaaaaattagccaggtgtggtggcacacatctgtagtcccagctacttgggaggctgaggcaggagaactgtttgaacctgggagacagaggttgcggtgaaccgagatcgtgccactgtactccagcctgggtgacagagtgagactccgtctcaaaaaaataaaaaagataaccgaggaaacggtacctccccatgaaacacacacaaaacacaaccaaaacaaccaacacgaaaagaaacaacgcacgagaacaccgcgacacaataaccgcggcgaacaccggccacaccacgcgcacgtagaacagaggcccagccccaaattcggaacacgggtgaaatacggcggcccccatggcgcccaacacaccaaacgacgcccagcacaatgtcacacgagcagacccacacgcaaccgcaaccaccacacgcacacgccaaacaaagccgagcaacaggacacagcacacgcgcagaaacacaccgaataaacaaacagcggaaaggaacagaaaagctagaaacaacgcagaagcagacacgtcaccctgaacacaacagcaaagcaaggacaacagacac

SEQ ID NO: 34132 - DNA, 2207 bp, Homo sapiens
cgcgggggcggtggcgcgcggtcagctgacccggcgggccttgacccagaagctgggccctggcggcggatctggacgtggcggcccgcgccgggctgagtcaccaggagggagctgtggccgaggacgccgaggcctggagtgggtggtagccccgagctgggacgctcctccctccacaatctccccaggtctgcagggaccgagggcctacactgcctcctcccacgccgtgcttaggaacccttgctggcctcagaacaccagcgccctccctccggtgcagccctgcctggccgggggcccctcctccacagccatggtctggaagaaactgggctcccgcaacttctccagctgccccagtggctccatccagtggatatgggatgtgttgggtgaatgtgcccaggacggctgggacgaggccagcgtgggcctgggcttgatctccattctctgctttgctgcatctaccttcccccagttcatcaaagcctacaagacgggcaacatggaccaggcgctgtccctgtggttcctcctgggctggattggcggagactcctgcaacctcatcggctccttccttgctgaccagctgcccctgcagacctggtgatgctgacgctgtacttttactacaagttcaggacgcgcccctctctgttgtctgcccccatcaactccgtgctgttgttcctcatggggatggcgtgcgccacaccgctgctgagtgctgctgggcccgtggctgcccctagggaagccttccgggggcgggcgctcctgtccgtggagtcgggcagcaagcccttcacccggcaggaagtcattggcttcgtcatcggctccatctccagcgtgttgtacctgctttcccggctgcctcagatccgcaccaacttcctccggaagtccacccaggggatctcctactctctgttcgcgctggtgatgctggggaacacgctgtatgggctgagcgtgctgctcaaaaaccccgaggagggccagagcgagggcagctacctgctgcaccacctgccctggcttgtgggcagcctgggcgtgctgctgctcgacaccatcatctccatccagttcctggtgtacaggcgcagcaccgccgcctcggagcttgagcccctcctccccagctgaccagaaccaggctgagcgcaggaggacaggcaccaccggatgccacaccaggcaggaggaggtgtggacagtgatggtacggcggccctgcatcagcctgcgggtggcctctggatcctccgtggaccgaaccgtccccccaggaacacaccttcaggtagaccccgaagcctcaaggccggggctggagcggagaccccagggcctctcaggagacagtgaggctgcccctcctaccacctacctcattctgcctactcaccccaggggccacagccacagcctgctggactcaggactgtcctgtcaactccagacaactgaataaacaggccgggtacagtggctcgcacctgtaatcctagcactttgggaggccgaagcgggtggaccacttgacgtccgtagttcgagaccagcctggccaacatggtgaaaccccatctctactaaaaatacaaaaattagccaggtgtggtggcacacatctgtagtcccagctacttgggaggctgaggcaggagaactgtttgaacctgggagacagaggttgcggtgaaccgagatcgtgccactgtactccagcctgggtgacagagtgagactccgtctcaaaaaaataaaaaagataaccgaggaaacggtacctccccatgaaacacacacaaaacacaaccaaaacaaccaacacgaaaagaaacaacgcacgagaacaccgcgacacaataaccgcggcgaacaccggccacaccacgcgcacgtagaacagaggcccagccccaaattcggaacacgggtgaaatacggcggcccccatggcgcccaacacaccaaacgacgcccagcacaatgtcacacgagcagacccacacgcaaccgcaaccaccacacgcacacgccaaacaaagccgagcaacaggacacagcacacgcgcagaaacacaccgaataaacaaacagcggaaaggaacagaaaagctagaaacaacgcagaagcagacacgtcaccctgaacacaacagcaaagcaaggacaacagacac

SEQ ID NO: 34133 - DNA, 1729 bp, Homo sapiens
cgcgggggcggtggcgcgcggtcagctgacccggcgggccttgacccagaagctgggccctggcggcggatctggacgtggcggcccgcgccgggctgagtcaccaggagggagctgtggccgaggacgccgaggcctggagtgggtggtagccccgagctgggacgctcctccctccacaatctccccaggtctgcagggaccgagggcctacactgcctcctcccacgccgtgcttaggaacccttgctggcctcagaacaccagcgccctccctccggtgcagccctgcctggccgggggcccctcctccacagccatggtctggaagaaactgggctcccgcaacttctccagctgccccagtggctccatccagtggatatgggatgtgttgggtgaatgtgcccaggacggctgggacgaggccagcgtgggcctgggcttgatctccattctctgctttgctgcatctaccttcccccagttcatcaaagcctacaagacgggcaacatggaccaggcgctgtccctgtggttcctcctgggctggattggcggagactcctgcaacctcatcggctccttccttgctgaccagctgcccctgcagacctacacggctgtgtattatgtcttggcagacctggtgatgctgacgctgtacttttactacaagttcaggacgcgcccctctctgttgtctgcccccatcaactccgtgctgttgttcctcatggggatggcgtgcgccacaccgctgctgagtgctgctgggcccgtggctgcccctagggaagccttccgggggcgggcgctcctgtccgtggagtcgggcagcaagcccttcacccggcaggaagtcattggcttcgtcatcggctccatctccagcgtgttgtacctgctttcccggctgcctcagatccgcaccaactcgtgcacacctcctgtgtgccaggcacccagctggaccctggagccgtgagtgagcaagaacagccatgagtgccccagaagcttacagcccagcggggcgcagagaggacacaacgctatcatcaaagaattacttcattgcagtggcaccaagtgctgcagagaaaaacaacaagagcgtctagccagggaccgtcctggttagaggggcagcaaaggcccctataagtctcattgaacctgtgacttgacagagtaggagaagtcaggcgaaggcaggagaggaatgttctaggctgtgcagacgagagctggagtgtggagagacacatgacttggtcagacaaacctgggttcaaatcctggctcctcccctgcttcctagctgtgtgacgcagggcacacagtcaacctctctgtgctgccgtgtcttcacctcagttaacagccactgtctcgtcaggatgttgtgtaagatgaggtatctggaaacactccccacaggaccccgttttcagtgagggctcagaaagtgtttgctgaatggctgtaaagagcgttacctgggtctcatttcggagcaagtaaacatggcctttgttttaatatttgttaagtccctgccgggcgcagggaggggtgaaagtttaggctcttgtgccccaaaacggcccagccacctggaagcctccaggacgccacagctgagagcaagcgaagatcctgggccagggtcaagggaggctgcccacgggaaggagaagtcagtgctaggcttggagacagatgg

SEQ ID NO: 34134 - DNA, 1969 bp, Homo sapiens
cgcgggggcggtggcgcgcggtcagctgacccggcgggccttgacccagaagctgggccctggcggcggatctggacgtggcggcccgcgccgggctgagtcaccaggagggagctgtggccgaggacgccgaggcctggagtgggtggtagccccgagctgggacgctcctccctccacaatctccccaggtctgcagggaccgagggcctacactgcctcctcccacgccgtgcttaggaacccttgctggcctcagaacaccagcgccctccctccggtgcagccctgcctggccgggggcccctcctccacagccatggtctggaagaaactgggctcccgcaacttctccagctgccccagtggctccatccagtggatatgggatgtgttgggtgaatgtgcccaggacggctgggacgaggccagcgtgggcctgggcttgatctccattctctgctttgctgcatctaccttcccccagttcatcaaagcctacaagacgggcaacatggaccaggcgctgtccctgtggttcctcctgggctggattggcggagactcctgcaacctcatcggctccttccttgctgaccagctgcccctgcagacctacacggctgtgtattatgtcttggcagacctggtgatgctgacgctgtacttttactacaagttcaggacgcgcccctctctgttgtctgcccccatcaactccgtgctgttgttcctcatggggatggcgtgcgccacaccgctgctgagtgctgctgggcccgtggctgcccctagggaagccttccgggggcgggcgctcctgtccgtggagtcgggcagcaagcccttcacccggcaggaagtcattggcttcgtcatcggctccatctccagcgtgttgtacctgctttcccggctgcctcagatccgcaccaacttcctccggaagtccacccaggggatctcctactctctgttcgcgctggtgatgctggggaacacgctgtatgggctgagcgtgctgctcaaaaaccccgaggagggccagagcgagggcagctacctgctgcaccacctgccctggcttgtgggcagcctgggcgtgctgctgctcgacaccatcatctccatccagttcctggtgtacaggcgcagcaccgccgcctcggagcttgagcccctcctccccagctgaccagaaccaggctgagcgcaggaggacaggcaccaccggatgccacaccaggcaggaggaggtgtggacagtgatggtacggcggccctgcatcagcctgcgggtggcctctggatcctccgtggaccgaaccgtccccccaggaacacaccttcaggtagaccccgaagcctcaaggccggggctggagcggagaccccagggcctctcaggagacagtgaggctgcccctcctaccacctacctcattctgcctactcaccccaggggccacagccacagcctgctggactcaggactgtcctgtcaactccagcctgggtgacagagtgagactccgtctcaaaaaaataaaaaagataaccgaggaaacggtacctccccatgaaacacacacaaaacacaaccaaaacaaccaacacgaaaagaaacaacgcacgagaacaccgcgacacaataaccgcggcgaacaccggccacaccacgcgcacgtagaacagaggcccagccccaaattcggaacacgggtgaaatacggcggcccccatggcgcccaacacaccaaacgacgcccagcacaatgtcacacgagcagacccacacgcaaccgcaaccaccacacgcacacgccaaacaaagccgagcaacaggacacagcacacgcgcagaaacacaccgaataaacaaacagcggaaaggaacagaaaagctagaaacaacgcagaagcagacacgtcaccctgaacacaacagcaaagcaaggacaacagacac

SEQ ID NO: 34135 - DNA, 811 bp, Homo sapiens
ctcccagtgctgaaagcctcctcccttcctccctgtagaacccttgctggcctcagaacaccagcgccctccctccggtgcagccctgcctggccgggggcccctcctccacagccatggtctggaagaaactgggctcccgcaacttctccagctgccccagtggctccatccagtggatatgggatgtgttgggtgaatgtgcccaggacggctgggacgaggccagcgtgggcctgggcttgatctccattctctgctttgctgcatctaccttcccccagttcatcaaagcctacaagacgggccacagccacagcctgctggactcaggactgtcctgtcaactccagcctgggtgacagagtgagactccgtctcaaaaaaataaaaaagataaccgaggaaacggtacctccccatgaaacacacacaaaacacaaccaaaacaaccaacacgaaaagaaacaacgcacgagaacaccgcgacacaataaccgcggcgaacaccggccacaccacgcgcacgtagaacagaggcccagccccaaattcggaacacgggtgaaatacggcggcccccatggcgcccaacacaccaaacgacgcccagcacaatgtcacacgagcagacccacacgcaaccgcaaccaccacacgcacacgccaaacaaagccgagcaacaggacacagcacacgcgcagaaacacaccgaataaacaaacagcggaaaggaacagaaaagctagaaacaacgcagaagcagacacgtcaccctgaacacaacagcaaagcaaggacaacagacac

SEQ ID NO: 34136 - DNA, 424 bp, Homo sapiens
tgaaaccccatctctactaaaaatacaaaaaaaaattaggcatggtgacaggtgcctgtagtcccagctacttgggaggctgaggcgggaaaatcgcttgaacccgggaggtggaggttgcagtgagctgagaccgcaccattgcactccagcccgggtaaaaagaatgaaactcaatctcaaaaaacaaacaaacaaaacgcaaagttgatagaacctccacagatttttctctaatctccacgtgtcctatgtttcccagtctctgagcgttgtatgtacaaatgtagaaacaaattccacaaatgtttattaagggactctgtgccaggcactgttctggatgctgagggatacagcaggaaacacaaccaacaatccctgtcctcaagaaacttcatattgtggtggagagagattaaca

SEQ ID NO: 34137 - DNA, 679 bp, Homo sapiens
  misc_feature (10)..(10): n is a, c, g, or t
accagggttnaagtaatagactccctataagggcgcgagatttcattcactttcaagtaatctgtacgaagaagttgagaataataaaaaatggacagaaaaccaatttctcaaatatagaaaagaccacctgggccatataaatgaatgtctgaaggtcctacaggagaaactggaaaagtctgaaaataaaatggaagaaaaactgctgcagctttcaagcaaagtagagaatttcattaacacacagaaacaggaaacacaactaagtaaagtaaagcatatggaaaataaattgtccaaaaagatggaacaaatggaaaagcagatctggggtgaattagagacaatgcagaatgaatatcaatcaggatttaaatcaattcatgactctctcagctccctccaacaaatacagaaaacaaagatggatttagagaaatataaagtacagaaagacctaaagaaattacagcgcaagatagtggaactccaggaagtataaaccttttcagtcatcttctttttcatcagccaatggagtgatttgttggaaaaagttctgaagaagaaagttactatctctgggatgtttactgcttctaatgtctccttttaaggagacgaatgtaccagaaaaataataaagcaaagaagcttcggatgtcctcaatggaaa

SEQ ID NO: 34138 - DNA, 1579 bp, Homo sapiens
gtcacccttgggaagaggccccagaaacaggaagaccttagttaggatgcaattacaattccttggtacattggcttcctcagaaaaaagaaaaaaatcacagagattgtttttcaaaaatatcaaatctacaaaaaataaagctggaaaagcaagcatcatgagttcagatacaaatgtaaacaaaagtgcctctccaactgcgactgcagaggaacagccagttgaacctgatggcccccttcctggctcagacaataaccaagaaaagaaagtaagattatctccagccaaaatgtcaaccaagaattctacagatctagttgaatatgttgacaagagtcatgcttttctccccatcattccaaacacccagagaggtcagctagaagacagactgaacaaccaggcgcgtaccatagctttccttcttgaacaagccttccgcatcaaggaggacatctctgcttgcctgcaggggacccatggctttcgaaaagaggaatcgctcgccaggaagttactggaaagccacatccagaccatcaccagcatcgtcaaaaaactcagccaaaatattgagattttagaagaccaaataagagctcgagatcaggcggccacaggaactaactttgcagtacacgagataaacatcaaacacctacaaggagttggagatcttcgaggaagagtagccagatgtgattcaagcattgtgaagctttctggagacattcacttattcaggcaagagcaccggcaaattgagaaagccattcaagaattcgtgcccgccctggaaactctttccaagaacttggacatgaaggtgatgcagctcttaggaaagatagaaactgccagttctgagcaaacctcgaatttaaagatggtccagggggattatcgccacgaaatgaaccttttggaattcaaatttcattcactttcaagtaatctgtacgaagaagttgagaataataaaaaatggacagaaaaccaatttctcaaatatagaaaagaccacctgggccatataaatgaatgtctgaaggtcctacaggagaaactggaaaagtctgaaaataaaatggaagaaaaactgctgcagctttcaagcaaagtagagaatttcattaacacacagaaacaggaaacacaactaagtaaagtaaagcatatggaaaataaattgtccaaaaagatggaacaaatggaaaagcagatctggggtgaattagagacaatgcagaatgaatatcaatcaggatttaaatcaattcatgactctctcagctccctccaacaaatacagaaaacaaagatggatttagagaaatataaagtacagaaagacctaaagaaattacagcgcaagatagtggaactccaggaagtataaaccttttcagtcatcttctttttcatcagccaatggagtgatttgttggaaaaagttctgaagaagaaagttactatctctgggatgtttactgcttctaatgtctccttttaaggagacgaatgtaccagaaaaataataaagcaaagaagcttcggatgtcctcaatggaaa

SEQ ID NO: 34139 - DNA, 1440 bp, Homo sapiens
gtcacccttgggaagaggccccagaaacaggaagaccttagttaggatgcaattacaattccttggtacattggcttcctcagaaaaaagaaaaaaatcacagagattgtttttcaaaaatatcaaatctacaaaaaataaagctggaaaagcaagcatcatgagttcagatacaaatgtaaacaaaagtgcctctccaactgcgactgcagaggaacagccagttgaacctgatggcccccttcctggctcagacaataaccaagaaaagaaagtaagattatctccagccaaaatgtcaaccaagaattctacagatctagttgaatatgttgacaagggacccatggctttcgaaaagaggaatcgctcgccaggaagttactggaaagccacatccagaccatcaccagcatcgtcaaaaaactcagccaaaatattgagattttagaagaccaaataagagctcgagatcaggcggccacaggaactaactttgcagtacacgagataaacatcaaacacctacaaggagttggagatcttcgaggaagagtagccagatgtgattcaagcattgtgaagctttctggagacattcacttattcaggcaagagcaccggcaaattgagaaagccattcaagaattcgtgcccgccctggaaactctttccaagaacttggacatgaaggtgatgcagctcttaggaaagatagaaactgccagttctgagcaaacctcgaatttaaagatggtccagggggattatcgccacgaaatgaaccttttggaattcaaatttcattcactttcaagtaatctgtacgaagaagttgagaataataaaaaatggacagaaaaccaatttctcaaatatagaaaagaccacctgggccatataaatgaatgtctgaaggtcctacaggagaaactggaaaagtctgaaaataaaatggaagaaaaactgctgcagctttcaagcaaagtagagaatttcattaacacacagaaacaggaaacacaactaagtaaagtaaagcatatggaaaataaattgtccaaaaagatggaacaaatggaaaagcagatctggggtgaattagagacaatgcagaatgaatatcaatcaggatttaaatcaattcatgactctctcagctccctccaacaaatacagaaaacaaagatggatttagagaaatataaagtacagaaagacctaaagaaattacagcgcaagatagtggaactccaggaagtataaaccttttcagtcatcttctttttcatcagccaatggagtgatttgttggaaaaagttctgaagaagaaagttactatctctgggatgtttactgcttctaatgtctccttttaaggagacgaatgtaccagaaaaataataaagcaaagaagcttcggatgtcctcaatggaaa

SEQ ID NO: 34140 - DNA, 1443 bp, Homo sapiens
gtcacccttgggaagaggccccagaaacaggaagaccttagttaggatgcaattacaattccttggtacattggcttcctcagaaaaaagaaaaaaatcacagagattgtttttcaaaaatatcaaatctacaaaaaataaagctggaaaagcaagcatcatgagttcagatacaaatgtaaacaaaagtgcctctccaactgcgactgcagaggaacagccagttgaacctgatggcccccttcctggctcagacaataaccaagaaaagaaagtaagattatctccagccaaaatgtcaaccaagaattctacagatctagttgaatatgttgacaagagtcatgcttttctccccatcattccaaacacccagagaggtcagctagaagacagactgaacaaccaggcgcgtaccatagctttccttcttgaacaagccttccgcatcaaggaggacatctctgcttgcctgcaggggacccatggctttcgaaaagaggaatcgctcgccaggaagttactggaaagccacatccagaccatcaccagcatcgtcaaaaaactcagccaaaatattgagattttagaagaccaaataagagctcgagatcaggcggccacaggaactaactttgcagtacacgagataaacatcaaacacctacaaggagttggagatcttcgaggaagagtagccagatgtgattcaagcattgtgaagctttctggagacattcacttattcaggcaagagcaccggcaaattgagaaagccattcaagaattcgtgcccgccctggaaactctttccaagaacttggacatgaaggtgatgcagctcttaggaaagatagaaactgccagttctgagcaaacctcgaatttaaagatggtccagggggattatcgccacgaaatgaaccttttggaattcaagaaaagtctgaaaataaaatggaagaaaaactgctgcagctttcaagcaaagtagagaatttcattaacacacagaaacaggaaacacaactaagtaaagtaaagcatatggaaaataaattgtccaaaaagatggaacaaatggaaaagcagatctggggtgaattagagacaatgcagaatgaatatcaatcaggatttaaatcaattcatgactctctcagctccctccaacaaatacagaaaacaaagatggatttagagaaatataaagtacagaaagacctaaagaaattacagcgcaagatagtggaactccaggaagtataaaccttttcagtcatcttctttttcatcagccaatggagtgatttgttggaaaaagttctgaagaagaaagttactatctctgggatgtttactgcttctaatgtctccttttaaggagacgaatgtaccagaaaaataataaagcaaagaagcttcggatgtcctcaatggaaa

SEQ ID NO: 34141 - DNA, 568 bp, Homo sapiens
tcttttcctattatgacgcgccccttatgtcatttttaaagcttacgagatttggccagcatccgaaaagtctgaaaataaaatggaagaaaaactgctgcagctttcaagcaaagtagagaatttcattaacacacagaaacaggaaacacaactaagtaaagtaaagcatatggaaaataaattgtccaaaaagatggaacaaatggaaaagcagatctggggtgaattagagacaatgcagaatgaatatcaatcaggatttaaatcaattcatgactctctcagctccctccaacaaatacagaaaacaaagatggatttagagaaatataaagtacagaaagacctaaagaaattacagcgcaagatagtggaactccaggaagtataaaccttttcagtcatcttctttttcatcagccaatggagtgatttgttggaaaaagttctgaagaagaaagttactatctctgggatgtttactgcttctaatgtctccttttaaggagacgaatgtaccagaaaaataataaagcaaagaagcttcggatgtcctcaatggaaa

SEQ ID NO: 34142 - DNA, 845 bp, Homo sapiens
gtcacccttgggaagaggccccagaaacaggaagaccttagttaggatgcaattacaattccttggtacattggcttcctcagaaaaaagaaaaaaatcacagagattgtttttcaaaaatatcaaatctacaaaaaataaagctggaaaagcaagcatcatgagttcagatacaaatgtaaacaaaagtgcctctccaactgcgactgcagaggaacagccagttgaacctgatggcccccttcctggctcagacaataaccaagaaaagaaagtaagattatctccagccaaaatgtcaaccaagaattctacagatctagttgaatatgttgacaagagtcatgcttttctccccatcattccaaacacccagagaggtcagctagaagacagactgaacaaccaggcgcgtaccatagctttccttcttgaacaagccttccgcatcaaggaggacatctctgcttgcctgcaggggacccatggctttcgaaaagaggaatcgctcgccaggaagttactggaaagccacatccagaccatcaccagcatcgtcaaaaaactcagccaaaatattgagattttagaagaccaaataagagctcgagatcaggcggccacaggaactaactttgcagtacacgagataaacatcaaacacctacaaggagttggagatcttcgaggaagagtagccaggacctccctccttgcccgcttatacctgagagaaactggctgaagtgcgacaggctgaggaaggagagagatttgatactgcaagcctgaatagaggatgctatctaccagccaccaaacacactcactgatcctctgcaggt

SEQ ID NO: 34143 - DNA, 1243 bp, Homo sapiens
gtcacccttgggaagaggccccagaaacaggaagaccttagttaggatgcaattacaattccttggtacattggcttcctcagaaaaaagaaaaaaatcacagagattgtttttcaaaaatatcaaatctacaaaaaataaagctggaaaagcaagcatcatgagttcagatacaaatgtaaacaaaagtgcctctccaactgcgactgcagaggaacagccagttgaacctgatggcccccttcctggctcagacaataaccaagaaaagaaagtaagattatctccagccaaaatgtcaaccaagaattctacagatctagttgaatatgttgacaatgccatacctggagctcccccaggaaaggtgtaccacagagggacaactccaggcacttggaaatagagtaacacactgttaacacatgcacattgtccaaaatacccaaggatgccagtgatgaaggtggcattgcaaaggcaatgcatattaatttgagttgttttctattccatatgtcaaagcaggatttggtctaatgctgtcattcatgttttcagggcactggggatttagtgtcagtccttctactactttgctgtgtaacaccagtcagttccataatgtctctgggctttagttttttcatttgaaaaacaaagaggttggactagaaactactgcagctttaaaataattctgattttaataatcatgaccacagaagaaaaaaatagccaaatgaatgaaatgagttcatgtgaagagaaaaatctaaatacacctggaacttcgattttttaaaaattatctttaacaattaagatgataagatttcttcactaatttttactgcatttttttcacaagaattcccctgtcccttggccagttaaatttaatacattccaaatagttcaatcacagtatgttagcgttagccccttttttcatgttccacataacttgtatttgtttatatgactatgagtctatgatttagaaaaaaataaaactaagcatgggaaaaatatttttaaatgtttaaaaaatgcaatatttggacagatgacttttcttctgagttaaggacaatgaatgtagtatgcacaaaaataattattataaataaatgtattagctaaccttatcttccaaggagaaaagggaaacttgtccccacctgactctctacatgacaaatggaaaataaaaatcattcttctgatccgtcaaattcta

SEQ ID NO: 34144 - DNA, 463 bp, Homo sapiens
gcagactttttcaatactaattttttatgtttaaattaacttatttaaatgaaacaaaacattttttcccatagatttcattcactttcaagtaatctgtacgaagaagttgagaataataaaaaatggacagaaaaccaatttctcaaatatagaaaagaccacctgggccatataaatgaatgtctgaaggtcctacaggagaaactggtgaggagttctgttattttgtgaagcaagcacctgcatagtccttgttagcagtgagtaaaggtctgggaatttgtacttcaacatttatggtaatcttcactgcttcagtaacttttttttttttaaacaccacaataggagtccagaggcctgtcttctggtcctgtttgctactccccaactctgcaaacctgtgtttctcagagtgtgctctacctgtaccaaaagaatctgaagaggtttttttttt

SEQ ID NO: 34145 - DNA, 207 bp, Homo sapiens
ttgagacagagtcttgctttgtcgcccaggctgccgtccagggttgcgatctcggctcactgcaatctccacctactgggttcagcgaaactgcttctcaaactgtggatccagacaaggtgaaggaccctggtaaactgaggacaatgtttgtagcagaactccccaaaactatcgtcaccgactcatgacatcacacaggtaata

SEQ ID NO: 34146 - DNA, 1042 bp, Homo sapiens
tccagcctgggtgacagagcgagactctgtctcaaaaaaaaaaaaagagggggtgctgcccacatgttgcttttacagtacctgcaatttcaggggggaaaacccccaaaaaactaggaagtgcaagtatgtctcaattcaggaaagttcatagaaactttacaaattacaccagataaactggggaattaagttcaacaattgaaggtctgatatgtgttacttttattcaggtgttctgtggatatgaatataaatgagaaagttgaaacatagttcactaacaacattttgaaatgagattaaaatcactaacaacattttaaatgaggtgaattgtatgtgatgtggactaaactagatagctgtttaaaaacttgtttagagaaaatacaattatagttttagatgacctagtgttagtctagattaatctagtcccatcctctagggattggaagtccaagaggggaccattctaagaatggttgtgaaccccttatagaatctgatgaaagctgtggattttgttttcaggaaatctcacttgtccattttcacacggtttagcataaagtttagtctgtttagcctaaagcattgttgggcttacaggcctccagctcctgagaggtctgcttcccgcttgatccttttatctgtttacttgggctcctctggagcatgagagtaggtgaacatggagttttccaaagcagggggcctaacttacttattgagctaggcatgtaacaggaagaaagaagtaaagggcattgcaagctgaccaaaaagtaatactttaaagagaatatacttttcccaagttatttctattatttgtcttttttctcttttccagttaaaagtttgggcagggtgcggaggctcacatctgtaatcccaacatttcgggaggctgaggcaggcagatcatttgaggtcaggagttcgagaccaccctggctaacatggccagactctgtctctactaaaaatacaaaaaaaattagctgggcagagtgatccctcatctctaaaa

SEQ ID NO: 34147 - DNA, 283 bp, Homo sapiens
tttatttttatttttttgtcagtgggtcttttctagacagaattcttagaatacaaaccatttcttctcatcatacagttttggccacaagtctcaaaaacctattttgaaattctgaaaacaaaaattcattcattgttttgctcaacatttctgttatgtcatcactcagaaaatgtcaaacaacccagtgctaaagctgttagtttctgctggggagagagaggcaggagagatgacattattgtatcaaaatgattgtttgcaactctatggtcttgtt

SEQ ID NO: 34148 - DNA, 412 bp, Homo sapiens
cctcctgtcctttttttattatgaaatatttcatatatcaaagaatatgtctaacatatgtgtattacaaagtatatcctctgcctccctcctcatttgaagatcctgccaatcctctgcagagctaatgcttattctgactttggggttttcatttcctttcatatatcccttatatatgtagtcctagtaggtgtatacatatgtatatcatgaatagttatatatataataattgcaaatacatcctgtttatttaatgggttatgtttctttaagttccaatacaatattttctaaattagaaaggtattacaattttaaaaaatgtgccaggacaaaattaataccaaattacaagaatggtaaagcttagaacattgtcattgactataaataatagctgcaattc

SEQ ID NO: 34149 - DNA, 484 bp, Homo sapiens
  misc_feature (1)..(1): n is a, c, g, or t
  misc_feature (368)..(368): n is a, c, g, or t
ngccaagaattcggcacgagggagattcgatcctcttaaggcattatcagtgagcaaatgtgaaggaaatggtgtctggaagaaagttctggttcacatgccttgtagctaagtctttctgcaaacaacctcccttccccccgtcgagtcatttggtgactttgatggggggatttctggttatgtcaaggctctggagacaggaaaggctttggccgccttgggtagttgacctgccttttctgactccgggacgagccagtcctaggctgcctccgggagcacttgaggtatcccgcaggccatgaggacccactgggcagctcctggacagcctcttggctccagcccccacccgaaagtggacnactgtccgccctggccacctggggactggcactgtggtgcacagtggcccaatgtggccaacggaagttttataaaagacaaaatgtatatcaataaacattttataacttgcagc

SEQ ID NO: 34150 - DNA, 321 bp, Homo sapiens
ggcttggacacagagggaaggaaggactcaaggccacccctcagggctgcgttctagtgtgggaagacaaacacatgccaggaaatgaggggacgcctgatactgcaggacctggtcagcgccatgaaggacagcagggaaaacggtggaaagactgtgcaagtgcagggcagcacttcatctgtgctgctggcagcttctctctgttaagatgactttgagcagagactggaatgagtaaaggagagagccacagagatgactgttggcatccaagagttcaaaccaatggcaaatggaaaacattcagaaaaataaaaa

SEQ ID NO: 34151 - DNA, 291 bp, Homo sapiens
cagacacagtacaagtggtgaagatgtaaagaaattggaaccatcacacattgctcctaggattgtaaaatggtggagtcactttggaagtttggcagttcctcaaaaatttaaacagagttaccatatgacccaacaattccattcaggcatatacccgagataactgaaaacagatgtccacacaaaaacctatatatgaatgttcatggcagtagtgtttataatatgcataagacagaaatttcaacatagctaaaagagtgttttttgaatgtccagccactgttg

SEQ ID NO: 34152 - DNA, 406 bp, Homo sapiens
gaggcaagagaaagaaaaaggaagagacagcatttggttatattacatcatttctaaaatctaatttcctggagtgagaatgacactaagggtacctacgagaacattccttcccatgtaaactaatagtgtaataaatactcatatagttactagttttagttgccaaacctagtttgtaaatggtaaatttgagaccagaactatattcttatgactatcagaccactgatagtttcactaagtcaactcccttcactaacaatttgattctacacacacacacacacacacacacacaccagtttcaacaattttctcataagctttaaatcaaattgatgagagaactttccctgtttttctgtcataaactacattatctggataaagttcatactatttt

SEQ ID NO: 34153 - DNA, 468 bp, Homo sapiens
gagatgggtttctgccatgttgcccaggctggtcttgaacatctgcctccgcttcccaaagtgctcggattacaagcgtgagctactgagcctggcctgatatctgtttttagagttgctcctgcagtggtgacaacctcttcctttttgttagacatgtcattccaatacgcccatgagccctggctctgacttcctgcagaactggaatctaggggtagaactgcagatggagctgagagatggagaagctggggtgattggcaagcttgagaaaatgtctgtgacttaatgcatttccagatttacatgaaaaaaaatctttggaccactggggagagacctactttctatgcaataaagaagagattttaatgccatgcagcctgattgcagaagcctctctcctcaatatacacagtccccagttactataccatggaatggagagattgattaggtttatcc

SEQ ID NO: 34154 - DNA, 440 bp, Homo sapiens
aaaatgtgttgtttgaaaattttttatgatgaatgcttgacagagatttacccactttcattatttctagtttttaaaaatgtcagtagactgcttatttgtgtattttatttttttggcttttttcctcctaagattttttttcataggttctcttttatcataatctcaaattcttctcattctatttcccctcccaccatacacactgtgaagcagtgactagctccttcttagctgcggtaaaacctgcaaatctttacggcatttgaacacagtgaccatttgtttcaaggatttagggcaaggaaatgtggagaagtactttttctggaatgtgaatggtattagacacaaccgtggatgtttaggattatagatcatgctgtgacagaatgacaaaggtgtcaatgtggtctttaatataatttgtgtgttgg

SEQ ID NO: 34155 - DNA, 341 bp, Homo sapiens
  misc_feature (11)..(12): n is a, c, g, or t
  misc_feature (14)..(14): n is a, c, g, or t
aaaggcagagnngnaggctgggggtggtagctcatgcctgtaatcccacccaacatactaacaaattaaactatttctatattgaacagtttgtggcctttgtcccagactggtatttctactagttactcaaacaatgacaccctgttgagtttagtttaaaaatacacgcagaagttcatgattatctatattacaagaataaatacagaaatcaaagaatcttccagcttacttgaactatattaaccagtttgccatactgagtggtaagttggatgacttcagtgtttatttatttataaagttacatcttaaagtggccaggcacagtggctcac

SEQ ID NO: 34156 - DNA, 382 bp, Homo sapiens
agaagagcaagtagaaggcaagaaaagcaggagatgatgtcagagaggtggccatgtaggagcctgtgagccacaacaaggagtcttcttactcttcccattgggctgccacaagcaaagagccacatcctgcacaaggttaatacaaatgatattacaagtatcccaagttaatgcaagatactccaaggtaatacaaaagataagggaggaaaatttcatttaaaaacatggttttggccaggcgcggtggctcattacctgtaatcccagcactttgggatgccaaagcagacagatcacttgagctcaggagttcaagaccagcctgggcaacatggtgaaaccccatgttgtctctaccaaaaatacaaaaaaaaaa

SEQ ID NO: 34157 - DNA, 1531 bp, Homo sapiens
  misc_feature (658)..(658): n is a, c, g, or t
  misc_feature (849)..(849): n is a, c, g, or t
  misc_feature (1199)..(1199): n is a, c, g, or t
ggggggcccgggcacaagcagttgagggaaggagactgtgcccctcctggctcccaagtcttcaaggagaagattctcccaggaaatctgacctcagaagacacctccttggggcctctctgctgtcacagccatgccaccttagagctttgtaaagcctgcaaagggctctttaaaaacttcaagccaggcgcagtggctcacacctgtaatcccagcactttgggaggctgaggcaggcggacacttgagcccaggggttcacagctgcagtgagctgcggtcatgccactgcactccagcctgggtgacagagtaagaccctgtctcacagaaataagtctaactttaattgaaatgctgtagcaggctgagcgcagtggctcttgcctgtaatcccagcactttggggaggacaaagtgggcggatcacctgaggtcaggagttcgagaccagcctggccaacatggtgaaacccgtctctactaaaaatacaaaaattagccaggtgtggtggtgtgcacctatagccccagctattcaggagactgaggcaggagaatcgcttgaacctgggaggcggaggttgcggtgagctgagatcatgccactgcactccagcctgggcaacagagcgagactccgcctcaaaaaaanaaataaataaataaataaatacatagccaggcgtggtggcaggtacctgtaatcccagctactcgggaggtgaggcaggagaatggcttgagcccaggaggcagaggctgcagtgagccgagatcgtgccactgcgttccagcttgggcgacagagcaagactgtctcaaaaaaaaaaaaaaaaaaaaaanaatagcagcgtccaactgctacaagctttgtttctaaacccaattcctgcactcacctagtgtcagaaaggtacaagatggactcgctacatggtgtgaccctcctagggaactgcttccaacttcaacttttaagcatgagccaaggactcctgacactagaggaacaagacaccaaaagaaacatgatgtggacagaagcctcctaatgacccatgctatggcttgggactcagagaaagcgctgtgactcagaactgaccctgaaggcccacagtggggagagtggaaaagagctcctgaagatgaaaagcatcagacaaaatcaaaagctcaaagataacaaaccnggaaaagaaaaaggttacgaggacactccaggtctgacatctgagtttgaaagtcacgagtttccaagacggaaagaggccaccaagcgcacagcacggtggataaaagaaaccctaggatgtggaagagaaaaggacaatctcacaagaaaaaaatacatcccaacagaaatggctaagaaaaatcatggaagaactgccctcagaattctgaagggactaggtgcagtggctcaggcctgtaatcattccattttgggaggccaaagtgggaggattgcttgagctcaagacaagtgtgggcaacacagcaagaccccatctcttaaaag

SEQ ID NO: 34158 - DNA, 523 bp, Homo sapiens
ctaaaatagtattacacataattgctattttatcatttcaagttttatttcagattcggggatacatatgtgcgttagttacatgggtatgttgcatgttgctgagggtccgggtatgattggtcccatcacccaggtaaagaacatagtacccaatagttagtttttcaacccttgctcccttccctcacccccaggagtccccagtgtctactggggacatctttatgtccatgaatacacaatgtttagctctcacatatagggtgtattttttaaggtactaacgggtggaattaggcctaccctattgcttagcttgccatgattattcaaatccaaagttgacataaataggactttaaggccttgaaccaggcttgtttaaggagtcactccttcagccttatgaaatgttccattgtaattttttaaaaataataggaagtatgaatagaaatctgtacctttcttgtgttttctcctagaaacgttaataaaataatttagaagtagaaggaca

SEQ ID NO: 34159 - DNA, 345 bp, Homo sapiens
ggtcgacacatgatccacccacctcggccccccaaagtgctaggattacaggcatgagagaaccttggtcttattattgaattggcttaaatgcagctgctcttctgcagatgtggggtctgtctgccacatagattcattctgtgcagtcaaaagacttcccctggatggtgatgcagattgacaagatcctcttctctgacgttccaaagactagattctgtgcaggtcactcgcccttcagtgtgctcattttattgttttcttcaaacaggttgatgcacttgataaggccacagcttcttcttatcttaaccttgttttttggttaaatcgacagtgcaa

SEQ ID NO: 34160 - DNA, 302 bp, Homo sapiens
actgaagctttgagagattagataatttaccaaagggctcagagttaacaaggcagggatctgaatttaggtggcagactcaagcccatgtgcttcagtcacccattgaagcactatccttgggtaatacagatacctatgatgacattcagacctcataggctcctataagctgtcagggatacctggaaatattctttgttactggtccaaaatggctgatgcagttgccacgatgcaattgctcaagcagagatgtctgtggtctactacagagtttatctgtattaatctcttctcat

SEQ ID NO: 34161 - DNA, 674 bp, Homo sapiens
cctgtaatcccaacattttgggaggccgaggcgggtggatcacctgaggtcaggagttcgagaccagcctggtcaacatggtgaaaccccgtctctactaaaaatacaaaaaaaaaaaaattagctgggcgtggtggcacacgcctgtaatcccagctacttgggaggctgaggcaggagaatcgcttgaacccaggaggcggcggttgcagtgagctgagattgtgccattgtactccagcctgggcaacaagagcgaaactccatctcagaaaaaaaaaaaaaagctatcggatgtcactctaatgccatgtgactatcctgtttcccaataacctcttccctaaagattttagcatccgttgattactgtttcctgactcagtcatttaatattttttaattttttaatttattttggtcagatgcagtggctcacacctgtaatcccagcactttgggaggctgaagctggaggatttcttgagtacaggagtttgagaacagccctggggaatatggtgagaccatgtctctaccaaaaaaaaaaaaaagtagccagatgtcatagcgcaatacccgttattccaactaacttggaaggatcattggaccatgatatccagagtttccagtgggcgagatcacaccattgcactcagccctgtgtgaca

SEQ ID NO: 34162 - DNA, 1480 bp, Homo sapiens
tcatttacttttttttgagatagggtctcactatgtttatcaggctggtcttgaacttctggcctcaaatgatcctcctgcctctgcctctgcctcccaaagtgctgggattacaggcttgagccactgtgtctgtcctctttttggaattaattagggcttgttaatttttttaaattatatgttttgtgataaaacatttagaagtccatgttttttattctgtactgtgtagcttaagaaatgtcaaaaccaggagtacaggcttattgggcacactagaaacaagagtgggaaagggttaattcacagacctggccagtctcctcctgtcttcaaggcgatgatttaccctgtgattctcagacttcacatgtaccagaaatctttggggcaacgtgctaacgtgcaggttctcagtccctttccccagcgattctgattcgtggaatttcagttgatcattcaggacacagtataaagttcttatgcagagagaagctgacttgaactatccctatatgactgaggtgcttttaccaggaaggggcttttatagtttcagtcatatatggatgaaaaaggtgctgtattctttttctatgaactactttgtgtattttataagcagtatatatgtactgatacttgtttatcagacattgtgcggtgcatggtgtagaaaactcaaggttattcttttaacttgcacatcttttttactttatttcaatcatttacatcaaactatttcttaatttagtatacatttctctgcttttgcaaacacagtctactggggataattaaatcttttcagagtcgtcatatatgtttttaattctttcaggccctacttagttttgttaaagtccctacactgaaggctccagatacatttgctctttgagttctaccatggtttttagagtttttcttttccctcacttttatctgtcatttatctctcccattactgtgcctacctctaggaagctttctctaatttgccctggggttgggaaattgtgtaactgcatactatatgttgaataagagtagagaggatttgaatgaggttttgagaggctgttctagcaataaaaatgaatgtactttgctacattgacttggtgacattatttcagtggctcaactctcttcccctaacttacttctttatcctcatctgcagttgtcatatttgtgaactcgcggcaagtgagatattgctagaaataatttctcttgatcaataaaccattgtctcccccagctgtgttagtgtttttgtgtattcagttctataatgtgaaacttaagaggattaaaactcaaaaaatgatcaggccaaatttttatgtgggatgaagtgtttctgattcagtgttattgtgatatagagctataaattagttgtttacctatgaaattccttcctgcagtcattctgaaataaagttgttacagctgaaaaata

SEQ ID NO: 34163 - DNA, 349 bp, Homo sapiens
agaaaccccgtctctactaaaaatacaaaattagcagggcgtggtggcacatgtctgtaatcccagctactcgggaggctgaggcaggagaatcgcttgaacctgggaggcacaagttgcagtgagccgagatcgcgccattgcactacagcctgggcaacaagagcgaaactctgtctcaaaaaaaattaaaaaaaaataaataaataacaggcactcacctttcaaagatactcagtgtattattttttaacttttctgtaggtttaaattcttatttatttatttttttgagatggagtcttgctctgttgcccaggctggagtgcaatggcatgatctcagctca

SEQ ID NO: 34164 - DNA, 688 bp, Homo sapiens
ttagaagctatgaattggtccacatactctgcatgtgctgtctgctagaggctgcaaggcgagctgcttcactgtttcatgttccaatctccaccacccagactcctgctccaataacatctctagatctattcacttgtaacaaatggagcccagttctcctccctccccaaggaggccagacactcgatacaatgaaaagaacacaggattcagacccaaacaaatttgtgtccacattctgattctgccatttactctccatgccatgtgcccctgggtgcgtttcttaaccactctgaacttcggttcttaatgcttaaaaatggggagcagtatttgttttatagaatctttgggagtattacacaaaattctaaagacagtgtctggagcctagaaaacgctcactaaattctgattatgactgtttcaaggtgtgactaatcaggatgccaggaaccctacgatggaggcacttcagtttctgggccttgctgaaacattcttgaaaagaggaaacaataaccgtagcctgagatattcgttccttttttttttactctttggagagtacttaaaaaaagaagaaaaaagaaatagtcatagtgattggcatgctattctacctctacatttccaggaaatatacatggtactttttcttatagaaacagcatctcctcca

SEQ ID NO: 34165 - DNA, 1576 bp, Homo sapiens
gataataggttttttacatcacattaacactattttttccaagtcacaaataagaaaaacacttattcaatgaaacaaggtgcaagttttaaatttgggtacacaaatagcctagaagcttcctacagacgctaagacacagccaataatcagatcctttcacttcatcgagaaacttggacaagtcgatattgatgtattagatgaaagttgtctacacacaacttctgagggatacaaacgataataaaaccaaatgttgtctgtttctcctttagaaacacctcctaaaattaatatcatttagtctctagtgtctgtaggattctacagatgagcacaaatagattgggtttgtataacaaatgctaatagtcataactgtttctacaaatatggggtgtccattaagagaatgtgatgttttcctactgctgttgaatcccatggggtgattataggacttgaaataggcagagtcacctctgatgacatcagcttgcctctgtgatttcacagtctgatcctggcaacaagacaaagcacccttggacacacagccaatctctggttgtgatatttccccattgattccttccttgttaacaaggtcattttaatggttcaggtgaggacagcagccagattcaaagtccagaatttgtgctgttacatagagttcacactgtcaaataacattgaatttaataatgatcaaatttttctagtagtctttggcagagtgtataatctcattggcatgattggtgaatattactaatctctttataatgaaagatgctttacaaataccttatatttgctaacatttcaaaactactaaataaatgaaatagccatgtgtacagaaatggtcatttaaagctttaatagaaccaaattcaagacaatgtatcatttagacacacagaaaaggaacttgtatgttttccctattatttttctcatttgccaacaatctatagttttaggttatcaaacagatagatcaacttaactggctagtacattgaaaaatcttcctaagaatcctttgttagcataatctatagagataatttctcaaattatatcatcatgatgcatataaactctataatgtataattgtgtttcatttatttaatgtatgagaacatattgaaatacaaaaccatgcattagccaaaaaattggaatacaggtagtgttcagatcagcaaaacattcagtctggtaaatgcctgcctggggctatgatatcattctcaatgcaggttttatggaaaaactaaaagaatatgttgttagatgatgttggttttgaaaaaaaaaaagacattaacatacacattagttagcccagttaattgcattctactaatatagttgcacattagcaataattttgctgtctctggtctttattttgtggcttcaactaactggaccatgtggactgtaaaggtcaaatggaaaaaacgagcagtggcccctcatcctgtaaggtactgctacatcagagtgacctaaaagtctaacactgtgaggaaaactgtgatttgtaggaaaaaaaa

SEQ ID NO: 34166 - DNA, 398 bp, Homo sapiens
catggcatggtgccgagggttgttcatcctcccacgtggggctgggggccgaccccactgcccacaggcacattttctactgtggacaaccctgtcagctggagccagcccaaggagtggcacacagcctcacccttcagtgcctttttgctctactcctgcccatgcttacagtttacctttcattggtgcagcactgagtgctctggaacacacattcctcctgtagttgggcttgtagttgttaatatcatattgcccatctccagggacaaatttgggatattcactctttatttccatgaagagcccaatctagggtggttctttttattttttttttaaacagtctcactctctcgcctaggctggagtgcagtggcatcatctcagctcac

SEQ ID NO: 34167 - DNA, 137 bp, Homo sapiens
tctttagaattctgggtattattaaaggaagttttcctgatgcactgtcttctgctttaattcattcactcaaccatgctacagatgtttattgagaacacctaatattccaagcactctgctagaagttattttga

SEQ ID NO: 34168 - DNA, 444 bp, Homo sapiens
atctgctttaaagcctaaaaaccagagaggtgcccagtagccaaaaatcaaaacataggctgaacctgagaagacatgtaatcaaaaactgacctctagtgatggcttgttaccaaaacccaccatctaggtaaaatcaggctacagaaaaggtagctttaatgtcttttcattgtggttattatgttacatggttattggcaatttattgtctcagcttcccttttataaataattattagtaaagtgaacagccccagagagatgggattcttagatttcagtgtgtctaacaatgcagacactcgacaggttttaagggaaccatcactaaccttaatcttagccctcttctcccaggctgaccaatcaagagtgtttgattttaggaaataaatgttaactgactaaatgagctgatgctaatcaacattaactggaaga

SEQ ID NO: 34169 - DNA, 407 bp, Homo sapiens
tagggagctggggtgaagcgcagccaggctgtgagtacagcctcctcgctgctctcagcccccaggcgaggctctctccacagccccaactgctgtcagtggacagcctcctgtccccaacctctaaccgtggcagccagtgagcagtggctggacagcgggatcgggcttatctgacttgcatctaaagtaaagctttgctcctgagtgcacataatcacacacacacgtgagccatggttctcatacccacttctctctggggagagaaccagagtttgatcagggcctcagaggaatgcatgactcaaaaaggtcaagaattacaagagaagccaggctcagggtgagagcctgctgtgccgggtgcagggactgggaagcatctacaaccacaactgtaagat

SEQ ID NO: 34170 - DNA, 291 bp, Homo sapiens
ctttacacctagaaagttcattcattcatttgttcattcaacagatatttattgagtgcttactttgtattaggaactcttctaggccgggcgcggtggctcacgcctgtaatcccagcactttgggaggccgaggcgggcggatcacgaggtcaggagatcgagaccatcccggctaaaacggtgaaaccccgtctctactaaaaatacaaaaaattagccgggcgtagtggcgggcgcctgtagtcccagctacttgggaggctgaggcaggagaatggcgtgaacccg

SEQ ID NO: 34171 - DNA, 544 bp, Homo sapiens
agaggaggtgattcatagtgagaagacattctgtgaagtatactaccctattagagattctagtatcctagagatgagtggatctcaggttttagtatacataggaaccccctggaaccccctgtttgttaaaacaggttcctggcccccaccccagaggtcttgggtacagcctgagaatttgcatttctgatctgctttcagatgatcttgtaagattttgtaagattgagaactaaactttgggtagcatctttatagattagacatatgctgtacttaaatgggtgaattttatgacgtgaagtatatctcaataaagatgctaaaaaattggtataaagatagtaaaatgtaagttttagtggtttgttaatggcaagacaatgctctgtaagggaattggtttaattattaatttcttcatttgtaaaatgtgtcactctcctgtgtatgtaccacctagggttgtggtgaaaatggggttatgtgttcttttccaaatggtgttctgtgggtaaaacgtgttgccttaaaaaaaaaa

SEQ ID NO: 34172 - DNA, 3201 bp, Homo sapiens
  misc_feature (299)..(299): n is a, c, g, or t
cattgcattgcgcagagctcagccatctttctcatccgtcaggcattcctgagaaagagggccactctacctctcttgctgccagccttcactccagcaaggagggtgctgggtgacctgagcccacatagccccgagtgagcagtgaggctgtctcctgccctcttctgcctggagggctcgtcagtgtccccaggtgtcaggccctgcctcctgacgttggccttttcactacaggcacccgaagcacacacagcagagtcctctggactttgaggaagaacccacagcaggaggangctgtgtgaaacctgggaccacttctgccttcctacgtggcagtggctcagagttatttgagtgctgtcaaactgagctgattgctgccctagtattagatcagtccatagaaagtgggagcaatggcactgacactgctagaggattggtgcaaggggatggacatggaccccagaaaggccctgctgattgtaggcatccccatggagtgtagtgaggtggaaattcaggacactgtgaaggcaggcttacagcccctgtgcgcatacagggtcctagggagaatgttcaggagggaagacaatgccaaggcagtcttcattgaactggctgacactgtcaattacactactctgcccagtcacataccaggaaagggtggctcctgggaagtggtggtaaaaccccgtaacccagatgatgagtttctcagtagactgaactacttcctgaaagatgagggccgaagtatgacagatgtggccagagccctgggatgttgcagcctccctgccgagagcctggatgcagaggtcatgccccaagttagatccccacctttagagcctccgaaagaaagtatgtggtacaggaaactgaaagtgttttcgggaactgcttcccctagcccaggcgaagagacctttgaagactggctagagcaggtcactgagataatgcccatatggcaagtgtctgaggtggagaagaggcggcgtttgctggagagcttacgtgggcctgctctgtcaatcatgcgggtgctccaggccaacaatgactccataactgtggagcagtgccttgacgccctaaagcagatctttggggataaagaggactttagagcctctcagtttaggtttctgcagacctctccgaagattggagagaaagtctccactttcctgctgcgcttagagcccctgctgcagaaagccgtgcacaagagccccttgtcagtgcgcagcacagacatgattcgtctgaaacatctcttagctcgggtcgccatgacccccgccctcaggggcaagctggagctcttggatcagcgagggtgtcctcccaattttctggagttaatgaagctcattcgagatgaagaagagtgggagaacactgaggcagtgatgaagaataaggagaagccatcagggagaggccggggggcctccggtagacaggcaagagcagaagccagtgtctctgcacctcaggccaccgtgcaggcaaggtcttttagcgacagcagcccccagaccatacagggaggcttacccccattagtgaaacgcaggcggctgttaggcagtgaaagcactaggggagaagaccatggccaggccacgtatcccaaggctgaaaaccagactccaggcagggaggggccacaggctgcaggagaggagttgggaaacgaggcaggggctggggccatgagccatcccaagccctgggaaacataggctcagaagaccgaagcactccttcccctggcaggcagcagggacatttgaacaaggggaaggggcagcttacactaacagggaacttgactggggcagagggacagggaagccaggtcgagatcaagcccccttactttccaccagctggaagggacttcaccaaccaagaccaaatagcatctggttcagtgggggccgggcccatagcccctaacaggtacaggagacacaagcggggaaccactacacttagcacatggggtgcctgggcttcagatggggaccccagcgaagcaggggctgaagaaggtgtggctgggggctctggcctggtcctctggacacccccaaatatctaccctgtggactttgagctgagcatgcccactggcacccaggccacgtgggacctggaggagcctgcctggggcctgcctctgccagaaggagccagggctgctgaggaagagctgtggggcagaagtgaagccccgcaggggaggccacagggtccagcctgtctttaggatcatctacactgcatgaggggagccccaggaaggcagcattcataagcccctgcaccagtgaggaagagaaagaggaggagaattaagaagaggatgatcgggaggaggaagaggagaataaggaggagcaggaggaagagggggaggagaaggaggaagagggggaggaggaagaggggaaggaggaggaagaagtgtaagaagagaagagaggatgtgttgggggtgggtagttgtttttggtttgcgtcatcatcaggcccgggctctgctcactgctgttccgtgtcaagaactccacctctgctttgccggtgtagatctcggccagtggctgcttgttctcttggggatgtgtgtgtttttatctgagcagctcctttccagagtaccccagcgcagttccaggagacggtgggaaggaggcatggcagacgctcaccttgtgactgtgacctcgactgcaggaggaccaaccagacacgggaaggagcagggctgcctgaggctccccaggaagctttgtgctttggcgttccacccctgctgttactcgtgactcagtttcctcaacttggtggggtgttccctgctatgttttccagcatcctgtgactgtcctgtgcagtctatagggcagggccctgccccagcgggtgggctcaggagggggttccctgaagcgagtacacattgccagagcccaccatcctggcaagaggtggatcctggggccctatggaaggagggatgtggtggggggggccacactgagggaggggccggggacttgtgacctgtagtggctgtttgcagtttctctctgtgttagattcccttttcttcagcagtttcagttcatgtttctcttcagtaaattttgttcagtgttccagtgg

SEQ ID NO: 34173 - DNA, 363 bp, Homo sapiens
ggagatgtgggtgaacaactacatggaacaaaagcatggtagaagaggggattataaaaagagaggtctacaatgaaagggccaggtgagacggctcatgcctgtaatcccagcattttgggaggcagaggtgggcagatcacttgaggtcaggagtttgagaccagcctggccaacatggtgaaatcctgtctctactaaaaacacaaaaattatccaggtgtgatggcactcgtacctgcaatcccagctactcggtaggctgaggcaggagaatctctacaacctgggaggcagaggttgcagtgagccaagatcatgcccatgcactccagcctgggtgacagactgagactatgtctc

SEQ ID NO: 34174 - DNA, 324 bp, Homo sapiens
acaggatgaatatccactagacttaaatgagggtataaataaatagattacttctcattcttcaacttaactaaaagcagagtgatgaactaaaatataatattattttgtaagattttcattggtagccaatacattcaagtagaaccttttaaagtggagcctttgatctttttcacaaaattcagacacttgcaatggtttggatgtgtgtgtctgtacatgcttttattttctttccctgtgctgccccaactatgactgggaggatcaaatccacagcaagttcatttctgggccaactctgccaaattatatgatgtg

SEQ ID NO: 34175 - DNA, 211 bp, Homo sapiens
ggtaagtttggcccacaaaactcattggcatgctttggcaccaactccagccctgaatatgttcattttacatctggactcaccatagctaactaattcaatccctgtattcaaatttcaaatttcacagaagaatttgctagcttaagtcagatgtccatttagtccagttaactgtaactgggtaaggcagagtcatatgaaaaaaaaa

SEQ ID NO: 34176 - DNA, 968 bp, Homo sapiens
gtgtgggatgaagggtgccaaggagacagggcagggcagggaccctcaagaaaagcggggaggcggggggaagggatggtacaagcagccatggcacctcagtgtgtccctcaggcacctggacacacaggtgggcaaagatgctgacactgggggccagaaacgccgatacccccattcttccatttttactcagtctcaggtggtcccaaggaggggaccttcgtggccttgctgtgctcacaggctcacctttgtgtttccagctgcagagaaagtaccctgggccatgcagctgcactcccctcccaggaaaggggcaggatggctgcccagatgagtgaggcatcagccctggccccccaggtcttcccgagtccactggaactgatggtgggtgagcccagctccaagagccctggccagtgcttctgggggttctgctatgagaaggcagcagggccccgaggggccctggctcagctgcgtgagctgtgttgccagtggctgatgcctgaggcctgctccaaggagcagatgctggagctcttggtgctggagcagttattgggcacactgctcccagagatccaggcctacacgcaggagcagtggctaggcagccctgaggaggccactgccctggcagagcggctacagcaggagtcagctgggccaggactccagatgaatgggggctggtctgggggctgggtgtgcttcccctgctcacgaccccagctgagccagcactggggccagtcgtgggttggtggctgagagggcctgggggctgtgggaaagtgatggtgacaggtgggagtttggtggtcttggcttggacggcagagtcagagatctccagtccacacctgtgtgctccgcattgtgtcctgagaactgaaggtgcagagaagggtgggtcatgccaccgcatgccccttgttttctcagatctgctaggctga

SEQ ID NO: 34177 - DNA, 457 bp, Homo sapiens
ccacctgctcagaaaatcgaaccttcacaggattggacctcaacttggccttcttcgcagcactgatgaaagcagatttgggggactggaaaaagaacagagagatggtcttcatggccctgcaacttcctcttcagctgagcttggagaggcatcgtctggaaaacatggtggtatctggattctttttctggttgtccaaacagttgcttttccccagtgggctggaatggagacacctgtcacccattctagcaggtcaggagggagcagggggagagaccaaggtcatctttcctttcacaaatacctggaaacctggagtcaccttgcaaaagaccaaccccataatgcttcaaagagggaactgcagaggaccctctatacagctgtcccctcccctgtcccctcctccctcctgaagctatagtcaataaattcagacatgttgtctaat

SEQ ID NO: 34178 - DNA, 412 bp, Homo sapiens
attcactctattttatcttgatggaaatatttatacttatattcttaagtgctattgttttgaaaggaaaacatatctattagtacaatcaaggggctctgcaaaacttattaataatagggtttgctggtattttagacatgttggcaagtaacttttcaccatgctttcagacagtttttaactagagcctaggtgcgtatcaggtaacatatttcacttttctgaaagaaaatgctctaagacacttttcagagtgaccatgggactgcatgatctttctgcagactcatctgcacctaagtggctggactttcattgttctaattttaatcacatcaatcccttgaaaaatacctaatccttcttctggcttcgctgtactttgcgcatatgttggaagtttaagttg

SEQ ID NO: 34179 - DNA, 4273 bp, Homo sapiens
gtggtcgaccatcctgttcaatgtactgccctacaaggcgacagacacctacatcctgaagagcccggacgaggcctcacagctgctggacgaccacatcgtcatgacccagaatatgtcattttcaccctacaagaagccctttgagcagcgcatcaactcctgggagaacaaactgaagctgacccaggaggttctggaggagtggctgaactgtcagcggtcctggctctacctggagcccatctttagctctgaggacatcaaccagcagctgcctgtggagagcaagcgctaccagaccatggagcggatctggaagaagatcatgaagaatgcctacgagaaccgggaggtgatcaatgtgtgttccgacctgagaatgctggacagcctgcgggactgcaacaagattctggacctggtgcagaagggcctcagcgagtatctggagaccaagaggagcgccttccccagattctacttcctgtcagatgatgaactactagagatcttgtcgcagacaaaggaccccacggccgtgcagccacacctgcgcaagtgcttcgagaacatcgctcggctgctattccaggaggacctggagatcacgcacatgtactcagccgagggggaggaggtacagttgtgcttctccatctacccctccagcaacgtggaggactggctgcgggaggtggagcgcagcatgaaggccagtgtgcacgacatcattgagaaggccatcagggcctaccccacgatgcccaggacccagtgggttctgaactggcctggccaggtgaccatcgctgggtgccagacctactggaccatggaggtggcagaggctctggaggccggcaacctcagaagccaactgttcccccagctctgccagcagctcagtgatctggtggcccttgtgcgggggaagctgtcccgcatgcagcgggcagtgctgtcagcgctaatcgtcattgaggtccatgccaaggacgtggtgagcaagctaatccaggagaacgtggtcagcgtgaatgacttccagtggatctcacagctgaggtactactggacaaataatgacctgtatatccgtgctgtgaatgctgagttcatctatggctatgagtacctgggcaacagtgggaggctggtgatcacgcccctcaccgacaggtgctacctgacactgaccggagctctgcacctcaagtttgggggtgccccagctggcccagctggcacaggcaaaactgagaccaccaaagacctgggtaaggccttggccatacagaccgttgtgttcaactgctctgaccagctcgacttcatggccatgggcaagttcttcaagggcctggccagtgctggggcctgggcctgcttcgacgagttcaatcgcatcgacatcgaggtgctgtctgtggtggcgcagcagatcaccaccatccagaaggcgcagcagcagcgggtggaacgcttcatgtttgagggtgtggagatcccactggtgccatcctgcgcagtgtttatcaccatgaacccgggctacgctggccgcacggagctgcctgacaatctgaaggcgctcttccgacccgtggccatgatggttccagattacgccatgatcactgagatctccctctattcctttggctttaatgaggccagtgtgctggctaagaagatcacaaccaccttcaagctgtcttctgagcagctcagctcccaggatcactatgacttcgggatgagagccgtgaaaactgtgatctcggctgctgggaacctcaagcgagaaaaccccagcatgaatgaggagctgatctgcctccgggccatccgtgatgtgaacgtgcccaagttcctgcaggaggacctcaagctcttctctggcatcgtgtccgacctgtttcccaccatcaaggaggaggacacggactacggcatcctggatgaggccatccgcgaggcctgcaggaacagcaacctcaaggatgtggagggcttcctgacaaagtgcatccagctctacgagaccacggtggtacgacacggcctcatgctcgtcgggcccacaggctccggcaagagtacttgttacagagtcctggcagctgccatgacgtcactgaaagggcagccatccatcagtggtggcatgtacgaggctgtcaactactacgtgctcaaccccaagtccatcacgatgggccagctgtacggggagtttgacctcctcacccatgagtggacagacgggatattctcctcgttcatccgggcgggggccatcacctccgacaccaacaagaagtggtacatgttcgatgggccggtggatgccatctggattgagaacatgaacacggtgctggatgacaacaagaagctgtgcctcagctctggggagatcatcaagctcacagaggcaatgaccatgatgttcgaggtgcaagacctggcggtggcttcaccagctacagtctcccgctgtggcatggtgtacctggagcccagcatcctggggctcatgcccttcatcgagtgctggctgaggaagctgcctcccttgctgaagccctatgaggagcatttcaaggccctctttgtcagcttcctggaggaatccatctccttcgttcggtcctcagtgaaggaggtgatcgcctcaaccaactgcaacctgaccatgagcctcctcaagctgctggactgcttcttcaagccctttctgcctagagagggcctcaagaaaataccctctgaaaagctgagtcgcatcgtagagttgatcgagccctggttcatcttctccctgatctggagcgtgggtgccactggggacagcagtggccgcaccagtttcagccactggctaaggctcaagatggagaacgaacagctgactctgcttttcccagaagaggggctggtgttcgattacaggctggaggacgcgggcatcagtggcaccaacgacagtgaggatgaagaggaggaatacaagcaggttgcctgggtgaagtggatggactcctcagctccattcaccatggtaccagacaccaactactgcaacatcattgtgcccaccatggacaccgtgcagatgtcccatttactggacatgctgctcaccaacaagaagcccgtgctgtgcattgggccaacaggcacggggaagacgctcaccatctctgacaagctcctcaagaacctggcactggattacatcagccacttcctcaccttctcagcccgcacttcagccaaccagacccaggacttcattgacagcaagctggacaagaggcggaagggtgtgtttggaccacctctggggcgcaactttatcttcttcatcgatgacctgaacatgccggccctggagacctacggtgcacagccacccatcgagctgttgcgccagtggatggaccacggcggctggtacgaccgcaagatcattggtgccttcaagaacctagtggacatcaactttgtctgtgccatgggccccccgggtggaggcaggaacaccgtcaccccgcggctgatgcgtcacttcaactacctgtctttcgctgagatggacgaggtcagcaagaaacgcatcttctccaccatcctgggcaactggttggatggactccttggagaaaaaagctaccgggagcgtgtgcctggggccccccacattgcccacttcacggagccccttgtggatgccaccatcatggtgtatgcaaccatcacctcccagctgctgcccactccagccaagtcccactacaccttcaacctgagggacctctccaaggtcttccaaggcatgctcatggctgacccggccaaggtcgaggaccaagtgcagctgctgcgactgtggtatcacgagaactgccgcgtgttccgggaccgactggtgaatgaggaggaccgcagctggttcgaccagctcctcaagcgctgcatggagcagtgggaggtgaccttcaacaaggtctgccccttccagcccattctttacggggacttcatgtcaccaggctccgatgtcaagtcctacgagctcatcaccagtgagagtaagatgatgcaggtgatagaggagtacatagaggactacaaccagatcaacacggccaagctgaagctggtcctcttcatggacgccatgagccacatctgtcgcatcagccgcaccctacgccaggcgctgggcaatgcactcctgctgggcgtgggtggcagcggccgc

SEQ ID NO: 34180 - DNA, 3917 bp, Homo sapiens
ttcaaccacggaggggtcattttttaatcatcctcatttccccctcttaccgtgaggttatttcatccaagcctggactagtgacagaatctttacccccctaatcagagctgcactcagatctcaggtcttcaatcttattgggtatatcctcagaggttgcacttatgccttttatatacaatagttaattatatacaggtagtagtacatattatcctacacaaaaagtatatgaaatttggagaaactgaaatgagccgtactcagccgagggggaggaggtacagttgtgcttctccatctacccctccagcaacgtggaggactggctgcgggaggtggagcgcagcatgaaggccagtgtgcacgacatcattgagaaggccatcagggcctaccccacgatgcccaggacccagtgggttctgaactggcctggccaggtgaccatcgctgggtgccagacctactggaccatggaggtggcagaggctctggaggccggcaacctcagaagccaactgttcccccagctctgccagcagctcagtgatctggtggcccttgtgcgggggaagctgtcccgcatgcagcgggcagtgctgtcagcgctaatcgtcattgaggtccatgccaaggacgtggtgagcaagctaatccaggagaacgtggtcagcgtgaatgacttccagtggatctcacagctgaggtactactggacaaataatgacctgtatatccgtgctgtgaatgctgagttcatctatggctatgagtacctgggcaacagtgggaggctggtgatcacgcccctcaccgacaggtgctacctgacactgaccggagctctgcacctcaagtttgggggtgccccagctggcccagctggcacaggcaaaactgagaccaccaaagacctgggtaaggccttggccatacagaccgttgtgttcaactgctctgaccagctcgacttcatggccatgggcaagttcttcaagggcctggccagtgctggggcctgggcctgcttcgacgagttcaatcgcatcgacatcgaggtgctgtctgtggtggcgcagcagatcaccaccatccagaaggcgcagcagcagcgggtggaacgcttcatgtttgagggtgtggagatcccactggtgccatcctgcgcagtgtttatcaccatgaacccgggctacgctggccgcacggagctgcctgacaatctgaaggcgctcttccgacccgtggccatgatggttccagattacgccatgatcactgagatctccctctattcctttggctttaatgaggccagtgtgctggctaagaagatcacaaccaccttcaagctgtcttctgagcagctcagctcccaggatcactatgacttcgggatgagagccgtgaaaactgtgatctcggctgctgggaacctcaagcgagaaaaccccagcatgaatgaggagctgatctgcctccgggccatccgtgatgtgaacgtgcccaagttcctgcaggaggacctcaagctcttctctggcatcgtgtccgacctgtttcccaccatcaaggaggaggacacggactacggcatcctggatgaggccatccgcgaggcctgcaggaacagcaacctcaaggatgtggagggcttcctgacaaagtgcatccagctctacgagaccacggtggtacgacacggcctcatgctcgtcgggcccacaggctccggcaagagtacttgttacagagtcctggcagctgccatgacgtcactgaaagggcagccatccatcagtggtggcatgtacgaggctgtcaactactacgtgctcaaccccaagtccatcacgatgggccagctgtacggggagtttgacctcctcacccatgagtggacagacgggatattctcctcgttcatccgggcgggggccatcacctccgacaccaacaagaagtggtacatgttcgatgggccggtggatgccatctggattgagaacatgaacacggtgctggatgacaacaagaagctgtgcctcagctctggggagatcatcaagctcacagaggcaatgaccatgatgttcgaggtgcaagacctggcggtggcttcaccagctacagtctcccgctgtggcatggtgtacctggagcccagcatcctggggctcatgcccttcatcgagtgctggctgaggaagctgcctcccttgctgaagccctatgaggagcatttcaaggccctctttgtcagcttcctggaggaatccatctccttcgttcggtcctcagtgaaggaggtgatcgcctcaaccaactgcaacctgaccatgagcctcctcaagctgctggactgcttcttcaagccctttctgcctagagagggcctcaagaaaataccctctgaaaagctgagtcgcatcgtagagttgatcgagccctggttcatcttctccctgatctggagcgtgggtgccactggggacagcagtggccgcaccagtttcagccactggctaaggctcaagatggagaacgaacagctgactctgcttttcccagaagaggggctggtgttcgattacaggctggaggacgcgggcatcagtggcaccaacgacagtgaggatgaagaggaggaatacaagcaggttgcctgggtgaagtggatggactcctcagctccattcaccatggtaccagacaccaactactgcaacatcattgtgcccaccatggacaccgtgcagatgtcccatttactggacatgctgctcaccaacaagaagcccgtgctgtgcattgggccaacaggcacggggaagacgctcaccatctctgacaagctcctcaagaacctggcactggattacatcagccacttcctcaccttctcagcccgcacttcagccaaccagacccaggacttcattgacagcaagctggacaagaggcggaagggtgtgtttggaccacctctggggcgcaactttatcttcttcatcgatgacctgaacatgccggccctggagacctacggtgcacagccacccatcgagctgttgcgccagtggatggaccacggcggctggtacgaccgcaagatcattggtgccttcaagaacctagtggacatcaactttgtctgtgccatgggccccccgggtggaggcaggaacaccgtcaccccgcggctgatgcgtcacttcaactacctgtctttcgctgagatggacgaggtcagcaagaaacgcatcttctccaccatcctgggcaactggttggatggactccttggagaaaaaagctaccgggagcgtgtgcctggggccccccacattgcccacttcacggagccccttgtggatgccaccatcatggtgtatgcaaccatcacctcccagctgctgcccactccagccaagtcccactacaccttcaacctgagggacctctccaaggtcttccaaggcatgctcatggctgacccggccaaggtcgaggaccaagtgcagctgctgcgactgtggtatcacgagaactgccgcgtgttccgggaccgactggtgaatgaggaggaccgcagctggttcgaccagctcctcaagcgctgcatggagcagtgggaggtgaccttcaacaaggtctgccccttccagcccattctttacggggacttcatgtcaccaggctccgatgtcaagtcctacgagctcatcaccagtgagagtaagatgatgcaggtgatagaggagtacatagaggactacaaccagatcaacacggccaagctgaagctggtcctcttcatggacgccatgagccacatctgtcgcatcagccgcaccctacgccaggcgctgggcaatgcactcctgctgggcgtgggtggcagcggccgc

SEQ ID NO: 34181 - DNA, 1300 bp, Homo sapiens
ggctgatgtagtcactcttgagggccagcgtccagatgcccactgccatgacagccagacctgagcaagccaggcctggcttgctcaggtcatggtaccagacaccaactactgcaacatcattgtgcccaccatggacaccgtgcagatgtcccatttactggacatgctgctcaccaacaagaagcccgtgctgtgcattgggccaacaggcacggggaagacgctcaccatctctgacaagctcctcaagaacctggcactggattacatcagccacttcctcaccttctcagcccgcacttcagccaaccagacccaggacttcattgacagcaagctggacaagaggcggaagggtgtgtttggaccacctctggggcgcaactttatcttcttcatcgatgacctgaacatgccggccctggagacctacggtgcacagccacccatcgagctgttgcgccagtggatggaccacggcggctggtacgaccgcaagatcattggtgccttcaagaacctagtggacatcaactttgtctgtgccatgggccccccgggtggaggcaggaacaccgtcaccccgcggctgatgcgtcacttcaactacctgtctttcgctgagatggacgaggtcagcaagaaacgcatcttctccaccatcctgggcaactggttggatggactccttggagaaaaaagctaccgggagcgtgtgcctggggccccccacattgcccacttcacggagccccttgtggatgccaccatcatggtgtatgcaaccatcacctcccagctgctgcccactccagccaagtcccactacaccttcaacctgagggacctctccaaggtcttccaaggcatgctcatggctgacccggccaaggtcgaggaccaagtgcagctgctgcgactgtggtatcacgagaactgccgcgtgttccgggaccgactggtgaatgaggaggaccgcagctggttcgaccagctcctcaagcgctgcatggagcagtgggaggtgaccttcaacaaggtctgccccttccagcccattctttacggggacttcatgtcaccaggctccgatgtcaagtcctacgagctcatcaccagtgagagtaagatgatgcaggtgatagaggagtacatagaggactacaaccagatcaacacggccaagctgaagctggtcctcttcatggacgccatgagccacatctgtcgcatcagccgcaccctacgccaggcgctgggcaatgcactcctgctgggcgtgggtggcagcggccgc

SEQ ID NO: 34182 - DNA, 473 bp, Homo sapiens
atggctgtgaaggaacggtagtcacagtggaaagaatggctagcatttacagagtttctactctgccaagttctgtgcttagggcttcacctgcccctgcctatgatgtaggtgctaccaccatcctcattttatagatgaggaaattgaggctcagggagtgcagtgactcacccaaggtcacacaagttagtggtgtggccaggacccaagcccatgctctgacccttgggccccatgccatgtcccccaggcttcctgacaaagtgcatccagctctacgagaccacggtggtacgacacggcctcatgctcgtcgggcccacaggctccggcaagagtactgtaagcagagccaagcttggcagccagtgtccggatagtgggcctgtaggggggtgcagcttcaacaggggttggcctccatttgtgccccttggcatagaatacccctccccctccccttggccccc

SEQ ID NO: 34183 - DNA, 387 bp, Homo sapiens
gaactgacaccagacgcagggagagagggaaacgtggctcacacatctgccagccagccagcccacgagcccaccacactgcacctgcatcgtagctggttccattttcaccacaaatcttatccacaggaaatgggctttcttaggagaagggaggaaatgcatttaatcagcacggaaggaaggtaattggtggttggcaaatttgtagctccgggcgtctagcgcaggtctgatgcccttcactcagcctgacgcccttcacagaagtgttgattgaataaacgatggtggtcctgatgctggagtgctaagtagatatttaaaaaaccacatttttgaagaattgctaatgtggggaatgtcccccttgtagtgctgagtgaa

SEQ ID NO: 34184 - DNA, 405 bp, Homo sapiens
tgagacagagttttgctcttgttgcccaggctggagtacaatggcatgatctcagctcaccacaatctccgccacctggtttcaagcaattctcctgcctcagcctcccgagtagctgggattacaggcatgtgccaccacgcctgactaattttgtattttcagtagagacggggtttctccatgttggtcaggctggtctccaactcccgacctgaggtgatctgcccacctcagcctcccaaagtgctgggattacaggcatgagccaccatgcctggccaaaaataaagaacttttaagacaaacctgaaaatcccagtaagagccatcttttgactggctttatgttactcttcagataccgtctaaaaggctcaagaccagccagattttaggtagggt

SEQ ID NO: 34185 - DNA, 443 bp, Homo sapiens
ttttttttgagacagagtctcagtctgtcgcccagactggaatgcagtggtatgatcttggctcactgcagcctcgacttctcgggtacaagcaattctcccacctcagcccctggagtagctgggactacaggagtataccaccatgcccaactcgtttttatatttttatagaaatggtgtctcaccatattacccaggctggtctcaaactcctgggctcaagcgatccatctgcctgccttggtctcccaaagtgctgggattacaggtgtgatcctctgagtctggccaatttttatttaaagatattttttaaattggactggacgcggtggctcatgcctgtaattaatcccagcaactttgggaggccaaggcggatggctttagaccagcctgggtaacatggcaagaccccatctctaaaaacaaaaaaagga

SEQ ID NO: 34186 - DNA, 571 bp, Homo sapiens
agtagcctagggttactgggcaacacaatggtgtcaccagctcactgtcccggctgcctgggtctggtggcagctgggggcttttatgacatcgcgtgtggggacctatggcaggagcctcgccctgtcctggcacacgttggccccaagcaaatgtggaggtcctccagagggacaaggaggcatcatgggcatctccacagctgatggcaggatcccgggtgccctgtaccccttcgtctgctgcctgcaatatggtgggtgggcacttcctgctgcttgccagcctagcctggcgagggacaacctctagtctcagacagcctcctgccatgcatgctcacggaaagcaccgttgttcattccggacccttcctgcgtgttctccatgatactgacctcttctgtggtggaataatctgcctggctccctgctgccgctagcttgcatggccacagcagggggcactcggccaccctttccactttctacccagccctggacttttaagatgaggctctttacggaaggaggcctgggctggagactcagccttgcttcccctcactg

SEQ ID NO: 34187 - DNA, 398 bp, Homo sapiens
gagatcctctgccctaagatatccattatccattacatgtaaggaattaacttctctcctatgcgaccaggatggcctttgttacatagtatccttagagctgagaaaacagttacctaaatcactgcctgtgttctgtggttcagataaagaacccactgaaagaggctgcgtgcatgaaccggctctgaccaactgaacatgaaacacaggttggaataaaaatatttttttatttgatggtcttccatatagacagaatttcatcaggaatcaaagaaaggtggttaccacatataaacaccaactaaactctgagctttctggcaactgaaaaggaaaacgttgagttctagaatagcctttgttgtttgatgcaactaaccatatcacctttt

SEQ ID NO: 34188 - DNA, 705 bp, Homo sapiens
atttataatagatgtcctactaattccatgcggtcctgacacaccttgaaaaacaggctaagactgagctgagggggatgttgaaagaggcagcactttcaacaaatgtccagctattatataggtcatgttataactgcaggtgtggagcttctgctccagagactgctcctataaatgattttgtaaaacagattacacctactctcttgatttttcaacaattcagattttcatatactgagactgcttaaagcagaagtcttttatgccattctaaagcaagaagatatgctggtcattttgcgtagccttttagtttttaggcatttttaaaatgcttaaaaaattaaataccaacccccaaataactcagtcaactcaattctactgactcaaaaggaaatggtttcagataaagatgcccacatggcttttagttcagccagttctttctaactacaagtaacataataatttcctttgcataggaaagttcttagaatcatcagtcatgaaaacagatgttgggcacagaggtgaagcagcagccagcatcagtaaatttgccattattaaccgcccaccgccaccctcaaccccattcccaccccctgttggaattggattagccttctggtattattttaagagtgattggaatttaattttagttaggaagaactgagtccattgtttacttac

SEQ ID NO: 34189 - DNA, 507 bp, Homo sapiens
attgccgagaagagccctgcagacagttcacacctctgtttcttttgcaagatatagctacctcaaaaaatcctttcttgatcaaactcttatggcctggaatccttgcgtttctgctgatgactgtcattttagagtacttactaaagacaatggttggggaaatagatattttaaaaataagggaaaaagtgggtagggtaaacccaggcttacttatgtaaactctgagtgctgaagttagaagacaacctttaagattaaaaaaaaaaaaaaaaaaaaagatttctggtagccgccagaagctaaggaacagattctccctctgagcctccagaacccagatgacaccttgatttcagacttctgacctccaaaactgtgaggaggaaggaaatgtgttgttttaagggcacccagctgggtgacagtttcattcacagtagccacaggaaactaatacccagccccatggcaggcataggtcaagcctggcacagtctggat

SEQ ID NO: 34190 - DNA, 129 bp, Homo sapiens
gtatagagacaatagtggaatctcagagattaaggtctttgagggtgaagaatgaagggctgagaactgagcctttgccattgtaggtgatagtgtctattacatgcctactatgtgctgagcactggc

SEQ ID NO: 34191 - DNA, 408 bp, Homo sapiens
gaacataaatgtaaaataaaggaggtgctatccagcagtaatttaagcaatgttgcactagccacccacttgcaatcatatatgcaacatgcttacattttttcccatgtaaaaatgggaaaaataatagtaatagtaaaatacagttgtccctcggtatccgtgggggattggtttcaggacctcccactgcatacccaaatccacaaatcctcaagtctgttatataaaatggtgtagtatttgaatataatctacacacatcctcctgtatactttgaataatactaggtaacttttaatacctaacataaggtaaatgctatgtaactagttatactgtatttaggtaatattgacaagaaagcctgtacatgttcagtacagatacaactatcttgttttaaa

SEQ ID NO: 34192 - DNA, 303 bp, Homo sapiens
gtgtccgaggcacctactaaagccgggcgcagtgtccgaggcacctactaaagccgggcgcagtgtccgaggcacctactaaagccgggcgcagtgtccgaggcacctactaaagccgggcgcagtgtccgaggcacctactaaagccgggcgcagtgtccgaggcacctactaaagccgggcgcagtgtccgaggcacctactaaagccgggcacagtgtctgaggcacctactaaagctgtaggctggaggttcttgcacttgagataagccccgattacaaaataacactctgtggaagg

SEQ ID NO: 34193 - DNA, 351 bp, Homo sapiens
tttaagaggaaaaactatttctttcatttctagctaagtctgatgggccctttcaaacactgctttcatcatgcaccttttatttcacgatttctgcataatgaaaatacaagatcgataactgtggattatcgtaatgccttgagcctttgaaaatgaacattttctagattataaatgttccctttgtaattcatttcaaacttcatcctcccatttgtcctaattcccgaaatttaactgttgccttttgagcctcctaggaaattctgggtatcctttaggcaagggaggtagctcttgggggaatagcattcaggccacaggcaattcatttgcgacttgggctct

SEQ ID NO: 34194 - DNA, 341 bp, Homo sapiens
aaacacacacacatacagagcaatcaatcgatatttaaaacacggatgttatatccaggaagcataatataaactacctagtttataattagcagtaagcaacttgatatgagccttgtctttttcaaaaaggattaacaataaaagccaaaaacacattaagatattcagacattaataaatgccatttattaatcactgttgccaattggtatcagtcaccaatctcctacaaaagtgatgacatctaacagattatgttcagagttagctgtgtcccctaccaactgtgtgaatttgagtaagttacgtaaactctctaaaaatcaatttgtttcagt

SEQ ID NO: 34195 - DNA, 333 bp, Homo sapiens
aaaaaagtaaaaaatttaaaaattagatgggcatggtgacatgtgcctgtaatccaggtactaaggaagctgaggtaggaggatgacttgagtctaggagttcgaggctgcagtgagctctgatcgcaccactgcactccagcctgagtgacacagcaagaccctgcttcaaaaaaaaaaaaaaaaaaaaattactggacacaattattgtgccagacccctaggttaacagtgaggattcagtgggagaactaaacagataaacagatccagtccccaccctcagagagttacagtttaatgggaaaaagacattcaccaaagaaggacaca

SEQ ID NO: 34196 - DNA, 979 bp, Homo sapiens
  misc_feature (804)..(804): n is a, c, g, or t
aaaatttgagccatgggtaaggcctggtagaaagggaggaggttggggaggcgtgaataggcctttggaaagaggtgctgttaacccaaaacagagaggcagcagctttgcaattagattttctttttgaaatagcaggctctgtccctggtagcaatagggataaataaaaagtaatatgtattcattgggaaaataattggaaaaagaattaggcaaaataagcatgtggttttgtatcttgttttttaaaacagcttgttgtaatacattagatattctttgaaaaaaatagaatttgaagttcagaaaatcaaatcagttttagggattgagaatctcactacatattttgtctttcaaaattgtttgtttatttatttatttagaaatggggtcttgctatgttgtccgggctggagtgtagtggtacaatcatacctcactgcagcctcaaactcgtgggctcaagggatcctcctgtctcagtctcctgagtagctgggactatagtcaggcacacctcaccttgttcccagaccaaactgagggtcgggctgcttattcttgcggcccagtaatgagatgcagatgaactgggaaagaagggagtttattgctgtaactgggtacagggaggtctggaaaatatcaccagaacaattcaaaattacaaagttttccagagcttatataccttctaagctatatgtctatgtgtacgtgtgcattcatctaaagacataagtaagtgattaacttcttctaatctataactaagatctgagtcctgaaggccttccnttggagccttcgtaaattcatttaatctaaatgggtgaaggtgctggggtgattacccttatcttgtgtcctgctaaatcacagggttttggggagttcctttagtccccagtaaagcttgtttgtgaaggtctggggagttccttaagatccacaataaaacttgtttaatcct

SEQ ID NO: 34197 - DNA, 450 bp, Homo sapiens
gcctcggcctcccaaagtgctgggattacaggcatgagccaccgtgcctggccagtctcagattttcatgatagccctctgaactctccttggcttcttgcctttggctgttttctcaatgcatatattttcctgggggacaaatctaagttttcatctgatgctctgccttcagaggggaaccattccttaatgacctatttaattgtattatcattgttgtttaattcatcacatatttactgagcttcttttgttggtggtggtgccatcagacacagtggtccaggagatggagaccatcctggctaacacaaagaaaccccgtctctactaggaatacctatataaaaaattagccaggcgtggtggcagacgccgtagtgccagcactcgggaggcgaggcaggagaatgcatgaaccccaaggcagagttgcagtgagccaga

SEQ ID NO: 34198 - DNA, 313 bp, Homo sapiens
ccaagccccacacacacaccggcccctaggaaggcctagccgaggggctcaagtccagccagcagctcaggctggccaggccacttccaagcagagtcctggaccagggttctggtcccagctcccacaggacctgactactgcctcagtttccccatctgtcaatggagccagcaaggcctgtctggagtgcaaatcttgaccaagtcaccccggaagtcccttcaaaagcaagaccaggggttgtgggccggtcccagaggagaagccagagctgctagtcctcctcctgctgggcaggcgcctgcaccca

SEQ ID NO: 34199 - DNA, 394 bp, Homo sapiens
agctcgaggctgtgataaaggagaagatgagaaactgtgcgaggaagccagggtccaactatgaggcaggccctctgtgtcagaatagaatggcggcagccacaaggagaatgttaggacttaaaagcaacagtcagaatgggcaagaggccagatgagaaggaggcacaaagcccccctcccagtaaggaaaaccccaaacaagcagaaactgtaggaaaaaaacaaacttttgaagaaaggcagggtccaaatctggggcacactaaaatgtggggtgattttgggcgactggtagagtaacagaggaactcctttaaatgatgctttgagtggctcaggtcatgatggtggagctgtagaggacacgtgcccacagctggcttctgtgatg

SEQ ID NO: 34200 - DNA, 566 bp, Homo sapiens
ggatacctgggtttctcagcctcagtactattgatgttttgggctggataattctttgttgtggggaactgtcccttccattatagaatgttttaacagcatcccgggcctctacccactaaatgccgatagcgttcctccaattgtgataaccaaacatgacttcatccccagttgagaaccactaccttaggccagaggaaaagattatctggactggtgtagatcaatcatgattcatcccccgggcctggggaaggggggaagggaactttccttcctaaactcaaaagattttcacaggctacaaaatctggattctgttagcaggattgagtggtaaaatggctgttgggtaatccaccagtatcagtcacacgaagaaaacagctcggatcaataaaaccaaaggtggtagaggccaggcatggtggctctcacctataatcccaacactttgggagatcaaagtgggaggattgtttgagcccaggaggtcaaggctgcagtgagctgtgttcatgccagtgtactccatcctgggcaacacagtgagatcctgtctg

SEQ ID NO: 34201 - DNA, 256 bp, Homo sapiens
gcaactagattggttttgagaccaccttgaatgtcaagaattcattgccgtagtttcaaaagtagcactatatttatttttccgggcattttttttccctctttgctttcatggataaagtaaattcagaaatatattttaagaataaaagaggtgatcttgttttcctggtggaaataatatttcaatgactttgaccctatgcattttatttcatagttttttattttattaaataaactgctttttccatttt

SEQ ID NO: 34202 - DNA, 2142 bp, Homo sapiens
cgccgctgtaaccccggaagcaatcctgagaggtcgggaccggcaagatggcggcgcggacagcgttcggtgctgtgtgccggcgcctctggcagggattggggaatttttctgtaaacacttctaagggcaatacagccaaaaatggtggcttgcttctcagtaccaatatgaagtgggtacagttttcaaacctacacgttgatgttccaaaggatttgaccaaacctgtggtaacaatctctgatgaaccagacatattatataagcgcctctcggttttggtgaaaggtcacgataaggctgtattggacagttatgaatattttgctgtgcttgctgctaaagaacttggtatctctattaaagtacatgaacctccaaggaaaatagagcgatttactcttctccaatcagtgcatatttacaagaagcacagagttcagtatgaaatgagaacactttacagatgtttagagttagaacatctaactggaagcacagcagatgtctacttggaatatattcagcgaaacttacctgaaggggttgccatggaagtaacaaagacacaattagaacagttaccagaacacatcaaggagccaatctgggaaacactatcagaagaaaaagaagaaagcaagtcataaagcctcagggaggccatttttgcctaaatttgaaatgagggtgggccagatgagtatgtttaagtggagagtgcttccagctgagatgatttgagtctgtcctaactgctccattgagttctcgtgccctcatcagctgagggcagggaatggaactttaatggaagaaccacttttatctattctttttattcattgtttcagttctgatttcagcaaacatgagcaaaccactttgactgaaagcagaaagagtgaaaattctattttgttacgctactggtgttcaattattagtttgtaccatttttaatttatgtcagttgatgcatctgaaaataagtgcttggagtgttcgtacccttatttttttttaagattcctagaaggaatctttggttaattcagattgagcagttaaagtttttgctatttacctttgtgcaggctggcatatgctaatttgggggtggtaaccaaccgattttatctcatgtaagcattacattttgaagactgaatatacttcacagcagatcaaacacatttatggcatgcactgacctcttcttggagcccagaactttatagagttgcctaccagggttactgtaatggaatttatgatcttaagaaattactagttgtattatttatcctatgattcattcattcaataagcttttactgcataaactttacatccagcactgtagttaagtacccaaaattgaatagaaataatggcttttgaaaattgcacaaagcaggccaggcacggtggctcacgcctgtaatcccagcactttgggaggccgaggcaggcggatcacgaggtcaagagatccagaccatcctggctaacacggtgaaaccccgtctctaataaaaatacaaaaattagctggacatggtggcacgtgcctgtaatcccagctactcaggaggctgaggcaggagaatcgcgtgaacccgggcccggtggaggctgcagtgagacgagatcgcgccactgcactccagcctggcgacagagcgagacaccgtctcaaaaaaaaaaaaaagaaaattgtgcaaagcataggtaaatatttttctttattaagcttctcactgagaagccctctttattttggtaaatgtcactctgtttgttaggagatgtctgcttttccatgaaatgaaatagtggctaaagccctgaaagaggcaagactacaatgggctgaaacagttggtatagcaaccccagagaagtgcttcattttctttttatagtagaagcaggtccatgtcttttgtggtttcctgcacatctttggagtagttatgacttctcagtttttccccccttaaactgcattgcctattcttttttcctgacatgctatcaggtatcagtgtgttgaatacataatgcttgtgtatcagacttacgttactgtcatcaccattaaaagaattgcagccttgtgccccatgaccttca

SEQ ID NO: 34203 - DNA, 2482 bp, Homo sapiens
cgccgctgtaaccccggaagcaatcctgagaggtcgggaccggcaagatggcggcgcggacagcgttcggtgctgtgtgccggcgcctctggcagggattggggaatttttctgtaaacacttctaagggcaatacagccaaaaatggtggcttgcttctcagtaccaatatgaagtgggtacagttttcaaacctacacgttgatgttccaaaggatttgaccaaacctgtggtaacaatctctgatgaaccagacatattatataagcgcctctcggttttggtgaaaggtcacgataaggctgtattggacagttatgaatattttgctgtgcttgctgctaaagaacttggtatctctattaaagtacatgaacctccaaggaaaatagagcgatttactcttctccaatcagtgcatatttacaagaagcacagagttcagtatgaaatgagaacactttacagatgtttagagttagaacatctaactggaagcacagcagatgtctacttggaatatattcagcgaaacttacctgaaggggttgccatggaagtaacaaagacacaattagaacagttaccagaacacatcaaggagccaatctgggaaacactatcagaagaaaaagaagaaagcaagtcataaagcctcagggaggccatttttgcctaaatttgaaatgagggtgggccagatgagtatgtttaagtggagagtgcttccagctgagatgatttgagtctgtcctaactgctccattgagttctcgtgccctcatcagctgagggcagggaatggaactttaatggaagaaccacttttatctattctttttattcattgtttcagttctgatttcagcaaacatgagcaaaccactttgactgaaagcagaaagagtgaaaattctattttgttacgctactggtgttcaattattagtttgtaccatttttaatttatgtcagttgatgcatctgaaaataagtgcttggagtgttcgtacccttatttttttttaagattcctagaaggaatctttggttaattcagattgagcagttaaagtttttgctatttacctttgtgcaggctggcatatgctaatttgggggtggtaaccaaccgattttatctcatgtaagcattacattttgaagactgaatatacttcacagcagatcaaacacatttatggcatgcactgacctcttcttggagcccagaactttatagagttgcctaccagggttactgtaatggaatttatgatcttaagaaattactagttgtattatttatcctatgattcattcattcaataagcttttactgcataaactttacatccagcactgtagttaagtacccaaaattgaatagaaataatggcttttgaaaattgcacaaagcaggccaggcacggtggctcacgcctgtaatcccagcactttgggaggccgaggcaggcggatcacgaggtcaagagatccagaccatcctggctaacacggtgaaaccccgtctctaataaaaatacaaaaattagctggacatggtggcacgtgcctgtaatcccagctactcaggaggctgaggcaggagaatcgcgtgaacccgggcccggtggaggctgcagtgagacgagatcgcgccactgcactccagcctggcgacagagcgagacaccgtctcaaaaaaaaaaaaaagaaaattgtgcaaagcataggtaaatatttttctttattaagcttctcactgagaagccctctttattttggtaaatgtcactctgtttgttaggagatgtctgcttttccatgaaatgaaatagtggctaaagccctgaaagaggcaagactacaatgggctgaaacagttggtatagcaaccccagagaagtgcttcattttctttttatagtagaagcaggtccatgtcttttgtggtttcctgcacatctttggagtagttatgacttctcagtttttccccccttaaactgcattgcctattcttttttcctgacatgctatcaggtatcagtgtgttgaatacataatgcttgtgtatcagacttacgttactgtcatcaccattaaaagaattgcagccttgtgccccatgaccttcaaaaaaaaaaaaaaaaaaaaaaaaaaaaaaacggtggtggggcggccgtgggccccggaaaagctttttaagaacaaatctgggtgggggcacgggggccccaagattgggataggcgtgaaacggtggctcaatagcgtgtttcccatgaggagaaacacggggcgccacagagcacaagagaggcgcagaggagatcctccacccccatataaagagacaggcccgccggggagaaaaccgcgagagggttagcggacaacacaatatctccgaagagggagagtcctgcgaggagcacaaatacaagggggagactcctaaacacacgaggaagcccc

SEQ ID NO: 34204 - DNA, 1711 bp, Homo sapiens
cgccgctgtaaccccggaagcaatcctgagaggtcgggaccggcaagatggcggcgcggacagcgttcggtgctgtgtgccggcgcctctggcagggattggggaatttttctgtaaacacttctaagggcaatacagccaaaaatggtggcttgcttctcagtaccaatatgaagtgggtacagttttcaaacctacacgttgatgttccaaaggatttgaccaaacctgtggtaacaatctctgatgaaccagacatattatataagcgcctctcggttttggtgaaaggtcacgataaggctgtattggacagttatgaatattttgctgtgcttgctgctaaagaacttggtatctctattaaagtacatgaacctccaaggaaaatagagcgatttactcttctccaatcagtgcatatttacaagaagcacagagttcagtatgaaatgagaacactttacagatgtttagagttagaacatctaactggaagcacagcagatgtctacttggaatatattcagcgaaacttacctgaaggggttgccatggaagtaacaaagacacaattagaacagttaccagaacacatcaaggagccaatctgggaaacactatcagaagaaaaagaagaaagcaagtcataaagcctcagggaggccatttttgcctaaatttgaaatgagggtgggccagatgagtatgtttaagtggagagtgcttccagctgagatgatttgagtctgtcctaactgctccattgagttctcgtgccctcatcagctgagggcagggaatggaactttaatggaagaaccacttttatctattctttttattcattgtttcagttctgatttcagcaaacatgagcaaaccactttgactgaaagcagaaagagtgaaaattctattttgttacgctactggtgttcaattattagtttgtaccatttttaatttatgtcagttgatgcatctgaaaataagtgcttggagtgttcgtacccttatttttttttaagattcctagaaggaatctttggttaattcagattgagcagttaaagtttttgctatttacctttgtgcaggctggcatatgctaatttgggggtggtaaccaaccgattttatctcatgtaagcattacattttgaagactgaatatacttcacagcagatcaaacacatttatggcatgcactgacctcttcttggagcccagaactttatagagttgcctaccagggttactgtaatggaatttatgatcttaagaaattactagttgtattatttatcctatgattcattcattcaataagcttttactgcataaactttacatccagcactgtagttaagtacccaaaattgaatagaaataatggcttttgaaaattgcacagcctggcccaaaactagcagtatttcttcgacgaaagtatttggcatatttgaagcccgcttcttgatataaacaagtttggcatgaagtacagtactgaaaaaatgatataaacaaaataacttcttagcttatcaggatatagctatcttgataggctaagaagatttttggttttcttttgttggttttaaattaggcctctgagtaaaatgcatatcctgaaaattagaattaatgcctgggtcacactttctgtccatggtgggtatgggagatggtgagagaagagtg

SEQ ID NO: 34205 - DNA, 1537 bp, Homo sapiens
cgccgctgtaaccccggaagcaatcctgagaggtcgggaccggcaagatggcggcgcggacagcgttcggtgctgtgtgccggcgcctctggcagggattggggaatttttctgtaaacacttctaagggcaatacagccaaaaatggtggcttgcttctcagtaccaatatgaagtgggtacagttttcaaacctacacgttgatgttccaaaggatttgaccaaacctgtggtaacaatctctgatgaaccagacatattatataagcgcctctcggttttggtgaaaggtcacgataaggctgtattggacagttatgaatattttgctgtgcttgctgctaaagaacttggtatctctattaaagtacatgaacctccaaggaaaatagagcgatttactcttctccaatcagtgcatatttacaagaagcacagagttcagtatgaaatgagaacactttacagatgtttagagttagaacatctaactggaagcacagcagatgtctacttggaatatattcagcgaaacttacctgaaggggttgccatggaagtaacaaagacacaattagaacagttaccagaacacatcaaggagccaatctgggaaacactatcagaagaaaaagaagaaagcaagtcataaagcctcagggaggccatttttgcctaaatttgaaatgagggtgggccagatgagtatgtttaagtggagagtgcttccagctgagatgatttgagtctgtcctaactgctccattgagttctcgtgccctcatcagctgagggcagggaatggaactttaatggaagaaccacttttatctattctttttattcattgtttcagttctgatttcagcaaacatgagcaaaccactttgactgaaagcagaaagagtgaaaattctattttgttacgctactggtgttcaattattagtttgtaccatttttaatttatgtcagttgatgcatctgaaaataagtgcttggagtgttcgtacccttatttttttttaagattcctagaaggaatctttggttaattcagattgagcagttaaagtttttgctatttacctttgtgcaggctggcatatgctaatttgggggtggtaaccaaccgattttatctcatgtaagcattacattttgaagactgaatatacttcacagcagatcaaacacatttatggcatgcactgacctcttcttggagcccagaactttatagagttgcctaccagggttactgtaatggaatttatgatcttaagaaattactagttgtattatttatcctatgattcattcattcaataagcttttactgcataaactttacatccagcactgtagttaagtacccaaaattgaatagaaataatggcttttgaaaattgcacagtgcccggccaagtaaaatgttttttaaaatggttatgtgcattattcataaaaaataatggtgtccagtctttttaaacttgtaaagacacatcttattgaataaagagatgagagctt

SEQ ID NO: 34206 - DNA, 2168 bp, Homo sapiens
cgccgctgtaaccccggaagcaatcctgagaggtcgggaccggcaagatggcggcgcggacagcgttcggtgctgtgtgccggcgcctctggcagggattggggaatttttctgtaaacacttctaagggcaatacagccaaaaatggtggcttgcttctgtttctctttttttccccacacatagcagtaccaatatgaagtgggtacagttttcaaacctacacgttgatgttccaaaggatttgaccaaacctgtggtaacaatctctgatgaaccagacatattatataagcgcctctcggttttggtgaaaggtcacgataaggctgtattggacagttatgaatattttgctgtgcttgctgctaaagaacttggtatctctattaaagtacatgaacctccaaggaaaatagagcgatttactcttctccaatcagtgcatatttacaagaagcacagagttcagtatgaaatgagaacactttacagatgtttagagttagaacatctaactggaagcacagcagatgtctacttggaatatattcagcgaaacttacctgaaggggttgccatggaagtaacaaagacacaattagaacagttaccagaacacatcaaggagccaatctgggaaacactatcagaagaaaaagaagaaagcaagtcataaagcctcagggaggccatttttgcctaaatttgaaatgagggtgggccagatgagtatgtttaagtggagagtgcttccagctgagatgatttgagtctgtcctaactgctccattgagttctcgtgccctcatcagctgagggcagggaatggaactttaatggaagaaccacttttatctattctttttattcattgtttcagttctgatttcagcaaacatgagcaaaccactttgactgaaagcagaaagagtgaaaattctattttgttacgctactggtgttcaattattagtttgtaccatttttaatttatgtcagttgatgcatctgaaaataagtgcttggagtgttcgtacccttatttttttttaagattcctagaaggaatctttggttaattcagattgagcagttaaagtttttgctatttacctttgtgcaggctggcatatgctaatttgggggtggtaaccaaccgattttatctcatgtaagcattacattttgaagactgaatatacttcacagcagatcaaacacatttatggcatgcactgacctcttcttggagcccagaactttatagagttgcctaccagggttactgtaatggaatttatgatcttaagaaattactagttgtattatttatcctatgattcattcattcaataagcttttactgcataaactttacatccagcactgtagttaagtacccaaaattgaatagaaataatggcttttgaaaattgcacaaagcaggccaggcacggtggctcacgcctgtaatcccagcactttgggaggccgaggcaggcggatcacgaggtcaagagatccagaccatcctggctaacacggtgaaaccccgtctctaataaaaatacaaaaattagctggacatggtggcacgtgcctgtaatcccagctactcaggaggctgaggcaggagaatcgcgtgaacccgggcccggtggaggctgcagtgagacgagatcgcgccactgcactccagcctggcgacagagcgagacaccgtctcaaaaaaaaaaaaaagaaaattgtgcaaagcataggtaaatatttttctttattaagcttctcactgagaagccctctttattttggtaaatgtcactctgtttgttaggagatgtctgcttttccatgaaatgaaatagtggctaaagccctgaaagaggcaagactacaatgggctgaaacagttggtatagcaaccccagagaagtgcttcattttctttttatagtagaagcaggtccatgtcttttgtggtttcctgcacatctttggagtagttatgacttctcagtttttccccccttaaactgcattgcctattcttttttcctgacatgctatcaggtatcagtgtgttgaatacataatgcttgtgtatcagacttacgttactgtcatcaccattaaaagaattgcagccttgtgccccatgaccttca

SEQ ID NO: 34207 - DNA, 2069 bp, Homo sapiens
cgccgctgtaaccccggaagcaatcctgagaggtcgggaccggcaagatggcggcgcggacagcgttcggtgctgtgtgccggcgcctctggcagggattggggaatttttctgtaaacacttctaagggcaatacagccaaaaatggtggcttgcttctgtaacaatctctgatgaaccagacatattatataagcgcctctcggttttggtgaaaggtcacgataaggctgtattggacagttatgaatattttgctgtgcttgctgctaaagaacttggtatctctattaaagtacatgaacctccaaggaaaatagagcgatttactcttctccaatcagtgcatatttacaagaagcacagagttcagtatgaaatgagaacactttacagatgtttagagttagaacatctaactggaagcacagcagatgtctacttggaatatattcagcgaaacttacctgaaggggttgccatggaagtaacaaagacacaattagaacagttaccagaacacatcaaggagccaatctgggaaacactatcagaagaaaaagaagaaagcaagtcataaagcctcagggaggccatttttgcctaaatttgaaatgagggtgggccagatgagtatgtttaagtggagagtgcttccagctgagatgatttgagtctgtcctaactgctccattgagttctcgtgccctcatcagctgagggcagggaatggaactttaatggaagaaccacttttatctattctttttattcattgtttcagttctgatttcagcaaacatgagcaaaccactttgactgaaagcagaaagagtgaaaattctattttgttacgctactggtgttcaattattagtttgtaccatttttaatttatgtcagttgatgcatctgaaaataagtgcttggagtgttcgtacccttatttttttttaagattcctagaaggaatctttggttaattcagattgagcagttaaagtttttgctatttacctttgtgcaggctggcatatgctaatttgggggtggtaaccaaccgattttatctcatgtaagcattacattttgaagactgaatatacttcacagcagatcaaacacatttatggcatgcactgacctcttcttggagcccagaactttatagagttgcctaccagggttactgtaatggaatttatgatcttaagaaattactagttgtattatttatcctatgattcattcattcaataagcttttactgcataaactttacatccagcactgtagttaagtacccaaaattgaatagaaataatggcttttgaaaattgcacaaagcaggccaggcacggtggctcacgcctgtaatcccagcactttgggaggccgaggcaggcggatcacgaggtcaagagatccagaccatcctggctaacacggtgaaaccccgtctctaataaaaatacaaaaattagctggacatggtggcacgtgcctgtaatcccagctactcaggaggctgaggcaggagaatcgcgtgaacccgggcccggtggaggctgcagtgagacgagatcgcgccactgcactccagcctggcgacagagcgagacaccgtctcaaaaaaaaaaaaaagaaaattgtgcaaagcataggtaaatatttttctttattaagcttctcactgagaagccctctttattttggtaaatgtcactctgtttgttaggagatgtctgcttttccatgaaatgaaatagtggctaaagccctgaaagaggcaagactacaatgggctgaaacagttggtatagcaaccccagagaagtgcttcattttctttttatagtagaagcaggtccatgtcttttgtggtttcctgcacatctttggagtagttatgacttctcagtttttccccccttaaactgcattgcctattcttttttcctgacatgctatcaggtatcagtgtgttgaatacataatgcttgtgtatcagacttacgttactgtcatcaccattaaaagaattgcagccttgtgccccatgaccttca

SEQ ID NO: 34208 - DNA, 2089 bp, Homo sapiens
cgccgctgtaaccccggaagcaatcctgagaggtcgggaccggcaagatggcggcgcggacagcgttcggtgctgtgtgccggcgcctctggcagggattggggaatttttctgtaaacacttctaagggcaatacagccaaaaatggtggcttgcttctcagtaccaatatgaagtgggtacagttttcaaacctacacgttgatgttccaaaggatttgaccaaacctgtggtaacaatctctgatgaaccagacatattatataagcgcctctcggttttggtgaaaggtcacgataaggctgtattggacagttatgaatattttgctgtgcttgctgctaaagaacttggtatctctattaaagtacatgaacctccaaggaaaatagagcgatttactcttctccaatcagtgcatatttacaagaagcacagagttcagtatgaaatgagaacactttacagatgtttagagttagaacatctaactggaagcacagcagatgtctacttggaatatattcagcgaaacttacctgaaggggttgccatggaagtaacaaagacacaattagaacagttaccagaacacatcaaggagccaatctgggaaacactatcagaagaaaaagaagggtgggccagatgagtatgtttaagtggagagtgcttccagctgagatgatttgagtctgtcctaactgctccattgagttctcgtgccctcatcagctgagggcagggaatggaactttaatggaagaaccacttttatctattctttttattcattgtttcagttctgatttcagcaaacatgagcaaaccactttgactgaaagcagaaagagtgaaaattctattttgttacgctactggtgttcaattattagtttgtaccatttttaatttatgtcagttgatgcatctgaaaataagtgcttggagtgttcgtacccttatttttttttaagattcctagaaggaatctttggttaattcagattgagcagttaaagtttttgctatttacctttgtgcaggctggcatatgctaatttgggggtggtaaccaaccgattttatctcatgtaagcattacattttgaagactgaatatacttcacagcagatcaaacacatttatggcatgcactgacctcttcttggagcccagaactttatagagttgcctaccagggttactgtaatggaatttatgatcttaagaaattactagttgtattatttatcctatgattcattcattcaataagcttttactgcataaactttacatccagcactgtagttaagtacccaaaattgaatagaaataatggcttttgaaaattgcacaaagcaggccaggcacggtggctcacgcctgtaatcccagcactttgggaggccgaggcaggcggatcacgaggtcaagagatccagaccatcctggctaacacggtgaaaccccgtctctaataaaaatacaaaaattagctggacatggtggcacgtgcctgtaatcccagctactcaggaggctgaggcaggagaatcgcgtgaacccgggcccggtggaggctgcagtgagacgagatcgcgccactgcactccagcctggcgacagagcgagacaccgtctcaaaaaaaaaaaaaagaaaattgtgcaaagcataggtaaatatttttctttattaagcttctcactgagaagccctctttattttggtaaatgtcactctgtttgttaggagatgtctgcttttccatgaaatgaaatagtggctaaagccctgaaagaggcaagactacaatgggctgaaacagttggtatagcaaccccagagaagtgcttcattttctttttatagtagaagcaggtccatgtcttttgtggtttcctgcacatctttggagtagttatgacttctcagtttttccccccttaaactgcattgcctattcttttttcctgacatgctatcaggtatcagtgtgttgaatacataatgcttgtgtatcagacttacgttactgtcatcaccattaaaagaattgcagccttgtgccccatgaccttca

SEQ ID NO: 34209 - DNA, 1802 bp, Homo sapiens
cgccgctgtaaccccggaagcaatcctgagaggtcgggaccggcaagatggcggcgcggacagcgttcggtgctgtgtgccggcgcctctggcagggattggggaatttttctgtaaacacttctaagggcaatacagccaaaaatggtggcttgcttctcagtaccaatatgaagtgggtacagttttcaaacctacacgttgatgttccaaaggatttgaccaaacctgtggtaacaatctctgatgaaccagacatattatataagcgcctctcggttttggtgaaaggtcacgataaggctgtattggacagttatgaatattttgctgtgcttgctgctaaagaacttggtatctctattaaagtacatgaacctccaaggaaaatagagcgatttactcttctccaatcagtgcatatttacaagaagcacagagttcagtatgaaatgagaacactttacagatgtttagagttagaacatctaactggaagcacagcagatgtctacttggaatatattcacaaacatgagcaaaccactttgactgaaagcagaaagagtgaaaattctattttgttacgctactggtgttcaattattagtttgtaccatttttaatttatgtcagttgatgcatctgaaaataagtgcttggagtgttcgtacccttatttttttttaagattcctagaaggaatctttggttaattcagattgagcagttaaagtttttgctatttacctttgtgcaggctggcatatgctaatttgggggtggtaaccaaccgattttatctcatgtaagcattacattttgaagactgaatatacttcacagcagatcaaacacatttatggcatgcactgacctcttcttggagcccagaactttatagagttgcctaccagggttactgtaatggaatttatgatcttaagaaattactagttgtattatttatcctatgattcattcattcaataagcttttactgcataaactttacatccagcactgtagttaagtacccaaaattgaatagaaataatggcttttgaaaattgcacaaagcaggccaggcacggtggctcacgcctgtaatcccagcactttgggaggccgaggcaggcggatcacgaggtcaagagatccagaccatcctggctaacacggtgaaaccccgtctctaataaaaatacaaaaattagctggacatggtggcacgtgcctgtaatcccagctactcaggaggctgaggcaggagaatcgcgtgaacccgggcccggtggaggctgcagtgagacgagatcgcgccactgcactccagcctggcgacagagcgagacaccgtctcaaaaaaaaaaaaaagaaaattgtgcaaagcataggtaaatatttttctttattaagcttctcactgagaagccctctttattttggtaaatgtcactctgtttgttaggagatgtctgcttttccatgaaatgaaatagtggctaaagccctgaaagaggcaagactacaatgggctgaaacagttggtatagcaaccccagagaagtgcttcattttctttttatagtagaagcaggtccatgtcttttgtggtttcctgcacatctttggagtagttatgacttctcagtttttccccccttaaactgcattgcctattcttttttcctgacatgctatcaggtatcagtgtgttgaatacataatgcttgtgtatcagacttacgttactgtcatcaccattaaaagaattgcagccttgtgccccatgaccttca

SEQ ID NO: 34210 - DNA, 827 bp, Homo sapiens
acgtctgtgctcgagagcgtatgcggatggcttccccgcaggcttgtgcccgttcagtgctcatgccactggcctggttgccgtccgccatctgcactagggcgttctccctcgtattgaccggatcttcacgcgctgcacgtccccgtagacgccgaaagaattaagaggctttggggttgactctctctgggttgaggttgctgacccgccataccaggatttcctgcccccgcccggcccgggatggcgatccgacctgccgccgccgctgccccgcccccgaggggatggcccaggggggccagggccccgtggacccttcggacggaaggcctgcagcttgaggaatggccaaggtgggagggaaacccgctcctgcatacggagaaaaaaaaaaaagaaaattgtgcaaagcataggtaaatatttttctttattaagcttctcactgagaagccctctttattttggtaaatgtcactctgtttgttaggagatgtctgcttttccatgaaatgaaatagtggctaaagccctgaaagaggcaagactacaatgggctgaaacagttggtatagcaaccccagagaagtgcttcattttctttttatagtagaagcaggtccatgtcttttgtggtttcctgcacatctttggagtagttatgacttctcagtttttccccccttaaactgcattgcctattcttttttcctgacatgctatcaggtatcagtgtgttgaatacataatgcttgtgtatcagacttacgttactgtcatcaccattaaaagaattgcagccttgtgccccatgaccttca

SEQ ID NO: 34211 - DNA, 435 bp, Homo sapiens
gcaaagcataggtaaatatttttctttattaagcttctcactgagaagccctctttattttggtaaatgtcactctgtttgttaggagatgtctgcttttccatgaaatgaaatagtggctaaagccctgaaagaggcaagactacaatgggctgaaacagttggtatagcaaccccagagaagtgcttcattttctttttatagtagaagcaggtccatgtcttttgtggtttcctgcacatctttggagtagttatgacttctcagtttttccccccttaaactgcattgcctattcttttttcctgacatgctatcaggtatcagtgtgttgaatacataatgcttgtgtatcagacttacgttactgtcatcaccattaaaagaattgcagccttgtgccccatgaccttcagctcagttgttgactgtca

SEQ ID NO: 34212 - DNA, 603 bp, Homo sapiens
tggccaccccagcctcccaaagtgctgggattacaggcgtgagccactgcacctggcccaatttaggattctatgccaaactgtagtatgaacataaagacatctttatttttatttatttattttatttatttttgagacggagctccatctgtcgccctggctggggcccaggggcaagatctccactcactgcagcctccgcctcccggattcagggagttatcctgcctcagcctcctaagtagttgggactacagacgcgtgccaccacacctggttaatttttgtatttttagtagagacggagttttgccatgttgaccaggctgatctcaaacttctgacctcaagtgagccgcctaccttgtgctcccaaagtgctgagatcacaggcatataccaccatgctcggcctattatttttaatttgatggtcatattattccagatttggccaatgggatttccttcaagctgactcctgtgtccttttgacaaatatctataatcctttatttatttttatttttttgagacagagtcctgttctgtcacccaagctggaatgtagtggcgtgatctcgcctcactgcaaccccg

SEQ ID NO: 34213 - DNA, 686 bp, Homo sapiens
tggccaccccagcctcccaaagtgctgggattacaggcgtgagccactgcacctggcccaatttaggattctatgccaaactgtagtatgaacataaagacatctttatttttatttatttattttatttatttttgagacggagctccatctgtcgccctggctggggcccaggggcaagatctccactcactgcagcctccgcctcccggattcagggagttatcctgcctcagcctcctaagtagttgggactacagacgcgtgccaccacacctggttaatttttgtatttttagtagagacggagttttgccatgttgaccaggctgatctcaaacttctgacctcaagtgagccgcctaccttgtgctcccaaagtgctgagatcacaggcatataccaccatgctcggccaaggatgttaatttcttaaaaatggaaaaacttacacatttttattctcatatttttctgtcactggatagaaacattactagcagagtaaataatccagatgcctgtcttcagcctttttgtcagacatgaagagtaagcttagaaggtaggagccgcatgactgtgagatcgttgtactgatcgtttcctgaacaccgccaatactataatggtttttgtcaccacttgaaatggtctccataccgggatcctctagacagcataca

SEQ ID NO: 34214 - DNA, 389 bp, Homo sapiens
cgtctgacaccaaagcccatgcccctctcactgtacctggtccttcctggagtgaataacattcgtgggtctgtgcagggaagctgccagcctgggcagtgggagctgggcccagcaggtgggcacgtcactcctggccaccgcttgggggcgcccctgtgaaaggttccccacctcccggcagtccaaataggggaactcctgggcagcttgcctcttgggcttggtatgagcttcagcagggtggggaccatggcactcactggaattaggtcttcccagcaccagaggggctgagtggactcaggctacccacttcccctctctgtacttgtttcctttcctgtaaaatgatatgatttcctaggacctcttgtcttgtggctttt

SEQ ID NO: 34215 - DNA, 742 bp, Homo sapiens
ccatttcttccaaaagagaatgtaaaagtgctagaacagactagtattcagctaaagggtcctaaaagcaccatacaatgttcaatatggcaacaggagaaatctggtcaaaagccagtttgtctccagttttcttctgcctttgcctcaggctcccaaaattgaatagtggagttttagctgctcagtgaggttcctgtagagatttctctccatccatgacatacaattcttccttaagaagccagacaactggcactcctatatataaatagaagtaattaaaaacttatctgaagaagagaaaaggaaaaggaatctacttttctatatgccaattgctgggatcaaaataaactacaaaggatttatgaagaaaattgtgaatgttcacgttacaaattcttttaagaagtgcatacatttatgtatatgtatacaactatatgtaagagattttgctgtatgatatgcattatgggtgaaagttcacgataagttttattattgctttattactttttattggtatgttgacaggaatatcatggatatgtttacagtgacttttatattacagtggacgctttgatcttaaaacagccacaacaactcatctacggctgaaatataatatgcgtggacaagcttttgctgaagtgtagtgtgtcctttaagtttgttttttaaaaagtaacttacctcagaagaaataaatgataactataaagaaaaaaaaaag

SEQ ID NO: 34216 - DNA, 493 bp, Homo sapiens
aagaggctggaaataaacgaatctgctattatcaattactgtcatgtaccaagcactaaaaaataggtcatgtgatatgctaaaagcatacctgcattgtttgatggctttttcaacatggcactattgacactgggaccaggtaattatttgttgtgagggactgtcctgtgtatggtaggatgcttcgcagcatcttgacatctacccactagatgccagtagccccttccccgttcccagccatgacagcccaaagtgtctccagacactgctaaatgtccccccagggagcaaaatcaccccaagtttaaaaccccagttgacctatcttgtgctgataatcttcgaaggagggaatcacttcattttaatagtggagaaaatgagactcagaaaggctacttcacccagtgttacattgaagtaaataacaacggatttgagattgaaacccaaatatccttcttacatgtggttcatgtgagaccaa

SEQ ID NO: 34217 - DNA, 413 bp, Homo sapiens
atgctatcttatttctgtctcattatctgcctggtcatcttttttcaacacaggtaaacttaaaagaactttaaaacttaccatacagtaaaattaactttttctttaggggtagagttccatgagttttgacacacatgtatccatttagttaccaccacaatcaggatagaaaacaattccatcaccccaaaacacctccttgcatgttccctatataggaacattctcctagtctctggcaagcactgaccctgttccttatcattatagtttagcattttagaatgtcattataaatggaattatacagtatgaagccttttgagattggcttctttcactcagcttaatgcctttgaggttcacccatgttgatcaatttaccaatgatatatttctttttcaaagta

SEQ ID NO: 34218 - DNA, 484 bp, Homo sapiens
gtttttttgtttttttttttttttttgagatgaagtctcactcttgtcatccaggctggagtgcaatggcgtgatcacagcaacctctgcctcccaggttcaagcgattctcctgcctgagcctcccacgtggctgggatttacaggcacctgccaccatacccagctaatttttgtacttttagtagacacagggtttcgccatgttggccaggctggtcttgaactcctgacctcaggtgatccacacacctcggcctcccaaagcactgggattacaggtgtgagccaccacacccggcccatgagtgttttttgtggtggaaaacttgaaaaatccagtgtctattaatagaaaactggctaataaaaataactcatagctctaaagaaaatagtagagaagaaatttcaaaaacctgcatgaatggcaggaagaacatttaagtctctggactataagggcccattacatgctcagaac

SEQ ID NO: 34219 - DNA, 408 bp, Homo sapiens
gaacttgggtcttaggtcagacccttgaactgattgctatttaattatcatgtatattctgtattagcaattatcaacagtaaaatctcgtcatttttgtaggagaggtgtccttatttaaactggtggggaaactaatcattgctttcatacttgagcagcagtgtcactcttttgaatctttttggaaataaagagggctcatcatttgtcttctgtttcaattggaaggttccaatagaaatactcctaatgaactagatttggcctgacccccaacagtttatctgcaggccttgaatgcatgtgctttgattagtagaattatttacagctgtttttgttttgtggcccttttttagtttgctgacatacctttttctgaggaagttcaaaaaatctggatgt

SEQ ID NO: 34220 - DNA, 476 bp, Homo sapiens
ccaaactgggccagtgacttatactagggctattagaacagggattcacatttctggtgagtctgtgaagcttctagtatataagctgggagcctctggtagccatatttggtacctctcataccataaagtgaagctcacacagaggcaaacagggccaaaggatgaggcaacattgagagaacattgagcatctggatccagctgtgcctgaaagccctaaactacaacaaatttctttttggggtaggggttggggataagccagtttgaattggatatttgtcccttgcaaccaaacaacaccttactaattcagaaatagaggcaaaggtaagtaagatggttgagatcagacttgggttcaaatcctggccctgccacttagagctgtgtgcccttgaggagtcttgatctccgcatctgtcaaatgggaatagtcatgctgcctttgaggtggttgtgagggtaaacca

SEQ ID NO: 34221 - DNA, 743 bp, Homo sapiens
cactggaagaaaaatgtttcccaagcaaccagctttattctagctgactcactttgtactccctccttccatgtcattgctcctttttacctctttaggagtctgttaggaattttgcaacctgacaaaaggcttctgcagagccaaccaccttttttttcctcagggcctgaaaaaaaagtgagtcttcctactgacaggaaaataaaaagagaccttgttagtcaatttttttctgtatgttcaattgttctggtatattcttttccttgagtataaagaaaagtctgaaaataatggtaaaagtgtgagattgctctgatatttcctttttgtactttaggaggtggttctttgagttcctagttgtttagttgaacatgaagcaggtggcaaatgtaagtttagtctacacactgattccttcctgttcgcagaagggttcatgtgttcgtttttaaataatcttcgggtaaggaatagagaaacaccaagcccaagaggcagaaggatctgtctatagctaatgagtgagaaactaactgtgggatggtttatggtctctggctctttgaaaccacagaaatttaaagttatttttaaaaagccaacttgactgggcacagtggctcatgcctgtaatcccgaggcaggcggggggccaaggcagacagatttcttgagcccaagagttcaagaacagcctgggcaatatggtgaaaccccatcttctcaaaaaagtt

SEQ ID NO: 34222 - DNA, 738 bp, Homo sapiens
  misc_feature (453)..(454): n is a, c, g, or t
  misc_feature (458)..(458): n is a, c, g, or t
  misc_feature (509)..(509): n is a, c, g, or t
  misc_feature (517)..(517): n is a, c, g, or t
  misc_feature (529)..(529): n is a, c, g, or t
  misc_feature (592)..(592): n is a, c, g, or t
  misc_feature (615)..(615): n is a, c, g, or t
  misc_feature (621)..(621): n is a, c, g, or t
  misc_feature (624)..(624): n is a, c, g, or t
  misc_feature (632)..(632): n is a, c, g, or t
  misc_feature (650)..(650): n is a, c, g, or t
  misc_feature (654)..(654): n is a, c, g, or t
  misc_feature (659)..(659): n is a, c, g, or t
  misc_feature (662)..(663): n is a, c, g, or t
  misc_feature (667)..(667): n is a, c, g, or t
  misc_feature (673)..(673): n is a, c, g, or t
  misc_feature (682)..(682): n is a, c, g, or t
  misc_feature (687)..(687): n is a, c, g, or t
  misc_feature (697)..(697): n is a, c, g, or t
cttatctatgctgtgcaaaggaataagaaactagtgctgtctcgggaaccagcaacacagatgttcccaggagcaatgtttgcagggttctatgaggctgaaaatattggatcagtattcctgaggaatctgcgtttcagaatcccaggtccggaaggacaagaagtactttgcaaacaaatcaaatgtacgtttaggaagatgaaatcatgcaacagaaagatttttcagaatttttcagcaacagattttacacacaattcagaaggaagaaagaacagatgagtttgggaatcaggagaccagatgtcaagactggactacatctttatattcatttccagatttaaagttctatgttgtattttatttgatgcaaagcaataaaatattcctccctcctgtgaaaaaaaaaaaaaaaaaaaaactcgagactagttcttcctcgtgccnnattncggacgagctcgtgccgaattcggcacgaggtaaaatattttttttttggnattatcgngtaatttaactncatggatcccctgaaggggtttttgagcaccctcagagatctttagacctcacttgctctggntgctttattgtaagccactttgngagganttngagaacantaggatttagaagactantttngaatntgnntacntatagncggcgtggnggttntgcctgtatnccaacccattgttctgagggggggggtggagactcctgcgg

SEQ ID NO: 34223 - DNA, 400 bp, Homo sapiens
accagccacctcactggtcctctgttgccagtagaaaaagccctacaaggattaatgcaagaagaagttctgctttggggttctatgaggctgaaaatattggatcagtattcctgaggaatctgcgtttcagaatcccaggtccggaaggacaagaagtactttgcaaacaaatcaaatgtacgtttaggaagatgaaatcatgcaacagaaagatttttcagaatttttcagcaacagattttacacacaattcagaaggaagaaagaacagatgagtttgggaatcaggagaccagatgtcaagactggactacatctttatattcatttccagatttaaagttctatgttgtattttatttgatgcaaagcaataaaatattcctccctcctgtga

SEQ ID NO: 34224 - DNA, 407 bp, Homo sapiens
cttatctatgctgtgcaaaggaataagaaactagtgctgtctcgggaaccagcaacacagatgttcccaggagcaatgtttgcagggttctatgaggctgaaaatattggatcagtattcctgaggaatctgcgtttcagaatcccaggtccggaaggacaagaagtactttgcaaacaaatcaaatgtacgtttaggaagatgaaatcatgcaacagaaagatttttcagaatttttcagcaacagattttacacacaattcagaaggaagaaagaacagatgagtttgggaatcaggagaccagatgtcaagactggactacatctttatattcatttccagatttaaagttctatgttgtattttatttgatgcaaagcaataaaatattcctccctcctgtga

SEQ ID NO: 34225 - DNA, 440 bp, Homo sapiens
aaatgaataatataaacataggaatttgtgaaatagaaaagcaaaagaacaatagagactatcaatataatgaaaaaatggaaaaactatagacaaatctctggtaagactgatcaggaaaaatgaaaacaaaaatgagaaatcagaagtgagtccgagtgtagaggctcatgcctgtaatcctagcactttgtgaggctgaggcagaaggatcacttgagcccaaggagttgaggctgtggtgagccatggtggctccactgcacgccagcctgggcaagggagcctgtcttaaaaaaaagaacataactacaaatcagtagaaatttaaaaataacaaatactataaactgtcacacaaataaatttgaaaacagatgaaaaaatttctaataaaagataattagcccaaattattccaaaacaggaaaggtagtcag

SEQ ID NO: 34226 - DNA, 356 bp, Homo sapiens
cagaagtcattgtctttttctgggcagcccctgtggatggattcagctgcagtgaccagcacacatggtggttaatgggagttctaagagggagaggccagtgaaggtcggggctcatatgggaaaccaagtcatttcccaccaggaacgtttggcacactgacccctcacccaggcagctgatatgatggctaaagggaacaacaagtgaccacacccactcttgagagcaactgcaaattgcatgtggccacgagggtctctgtaatctgtttctgtttgctaaatgcctctctaccgggggcagttaagacactcggagagtggacaaacttggaggatgttgctcagttcca

SEQ ID NO: 34227 - DNA, 2258 bp, Homo sapiens
  misc_feature (1147)..(1147): n is a, c, g, or t
  misc_feature (1155)..(1156): n is a, c, g, or t
  misc_feature (1173)..(1173): n is a, c, g, or t
  misc_feature (1195)..(1195): n is a, c, g, or t
  misc_feature (1237)..(1237): n is a, c, g, or t
  misc_feature (1259)..(1259): n is a, c, g, or t
  misc_feature (1263)..(1263): n is a, c, g, or t
  misc_feature (1647)..(1647): n is a, c, g, or t
cacagctaactatagcctcaaactcctgggctcaagcagtcttccacctcagcctcttgagtagctgggattgcaggcatgcagcatcacatctgactaatttttttattttttgtagagattgggtcttgctgtgtggcccaggctggtctcaagctcctgggctcaatgatcctcctcctcggcctaccaaagtgctgggattataggcatgagccactgtgcccagccaatttcatgtttttgaaaaatttgtcaattgtggaataagtgggtaaaaatcctattacaacaaattgtaccaagtcttagactaactagaataggaccatttctgagccccaggaagggctgtcggaggtgctgccccacatccaggaggctctgtggtctgggccacaccttcaggaggatgtgcacctactgggagccccaggccatctctaatctcacactagattctcccacccacagatatgtggtctccctgatgaaggctggatttagtccttgttctcagcgaggtgggtattggccccacaatggccacagtacactgaccccgtaacagaggaaatctatagctcgtataattcattttcatggcaagtggctgcatttgtttttggcctcacttggtctgcttcccagaatccctaagaagggaccaaactgccaaggtgggaggatcacttaagcccaggagtttgagaccagtgtaggcaacacagcaagacctcgtctctatatttatttaaaaataaaaaagccaggcgcggtggctcacacctgtaatccagcactttgggaggccgaggcaggcagatcacaaggtcaggagatcgagaccatcctggctaacatggtgaaaccccatctctactaaaaatcaaaaaaattagccaggtgtggtggcgggcgcctatagtcccagttactcgggaggctgaggcaggagaatggcgtgaacctgggaggcggaggttgcagtgagccgagatcgcaccactgcgctccagcctaggtgaaagagcaagactccatctcaaaaaaagaaaaaaaaaaaaaaaaaaagtccaggcgcggtggcttatgcctgtaatcccagcactttgggaggccaaggcgggtggatcacctgaggtcnggagttcnngaccagcctggccaacntggtgaaatcccgtctctactnaaaatacaaaaattagctgggcatggtgttgcacgcctgtantcccagctacttgggaggctgnggcnggaagacctcttgatcccaagagacagaggctacagtgagcagagattgtgccactgcactccagcctgggcaagcgagactccgtctcaaaaaaaaaaaaaatacaaaaattagctgagcttagtggcgcatgccagtaatcccagctactcaggaggctgaggcaggagaatcatttgaacctggaggatagaggttgcagtgagccaagatcacgccactgcactccagcctgggcgacagagtgagactgtctcaggaaaaaaaaaaaaaaaaaagaaggaaccaaaatgtagtgatcaaacccttccattttataactgggaaaactcaggcctcgtgacaaggcagaaagaccccaaatggtagaaaacagctgctgnaaccccttgtgctcttgtcctcactgaggggctgaagtagctcttagagctagaggggtgttagaggtaaccccgctccagaggactgactgtagcccaaggcaagagagggagtttcctgaggaaggacccagatggtgacctcagggtgggtgaaggaggtattctttgaatttctcttggagttgggagacttgatattgtccgacctaatctgcagtgctgaatcctgtcccacaactaagggggaccaattctcatgtccttgatcctctttgaagcaccttgggcttgtctgtcccacatcatcagtggcattaagcacaagagataccatcttagcacaatccttttactctaaatgttcaggggaggggtatagcagcaaggagagggggtctctgtgatggcccaaggagatatttttgatactgaagacccaggcccccaggggaactgcaggaagcgtctagctcataggcataggcctttcagtaaaggtcacccatccagggatccaggatgtagctggttccaggtgatgaaatcttcccaccttatgactggggaatgtcaggtctagtagcaaagcaaagagaccccagatggca

SEQ ID NO: 34228 - DNA, 2112 bp, Homo sapiens
  misc_feature (1001)..(1001): n is a, c, g, or t
  misc_feature (1009)..(1010): n is a, c, g, or t
  misc_feature (1027)..(1027): n is a, c, g, or t
  misc_feature (1049)..(1049): n is a, c, g, or t
  misc_feature (1091)..(1091): n is a, c, g, or t
  misc_feature (1113)..(1113): n is a, c, g, or t
  misc_feature (1117)..(1117): n is a, c, g, or t
  misc_feature (1501)..(1501): n is a, c, g, or t
aggtggaagttgcagtgagcagagattgcaccattgcactccagcctgggcgacaagagtgagcaaaactccactgtgcccagccaatttcatgtttttgaaaaatttgtcaattgtggaataagtgggtaaaaatcctattacaacaaattgtaccaagtcttagactaactagaataggaccatttctgagccccaggaagggctgtcggaggtgctgccccacatccaggaggctctgtggtctgggccacaccttcaggaggatgtgcacctactgggagccccaggccatctctaatctcacactagattctcccacccacagatatgtggtctccctgatgaaggctggatttagtccttgttctcagcgaggtgggtattggccccacaatggccacagtacactgaccccgtaacagaggaaatctatagctcgtataattcattttcatggcaagtggctgcatttgtttttggcctcacttggtctgcttcccagaatccctaagaagggaccaaactgccaaggtgggaggatcacttaagcccaggagtttgagaccagtgtaggcaacacagcaagacctcgtctctatatttatttaaaaataaaaaagccaggcgcggtggctcacacctgtaatccagcactttgggaggccgaggcaggcagatcacaaggtcaggagatcgagaccatcctggctaacatggtgaaaccccatctctactaaaaatcaaaaaaattagccaggtgtggtggcgggcgcctatagtcccagttactcgggaggctgaggcaggagaatggcgtgaacctgggaggcggaggttgcagtgagccgagatcgcaccactgcgctccagcctaggtgaaagagcaagactccatctcaaaaaaagaaaaaaaaaaaaaaaaaaagtccaggcgcggtggcttatgcctgtaatcccagcactttgggaggccaaggcgggtggatcacctgaggtcnggagttcnngaccagcctggccaacntggtgaaatcccgtctctactnaaaatacaaaaattagctgggcatggtgttgcacgcctgtantcccagctacttgggaggctgnggcnggaagacctcttgatcccaagagacagaggctacagtgagcagagattgtgccactgcactccagcctgggcaagcgagactccgtctcaaaaaaaaaaaaaatacaaaaattagctgagcttagtggcgcatgccagtaatcccagctactcaggaggctgaggcaggagaatcatttgaacctggaggatagaggttgcagtgagccaagatcacgccactgcactccagcctgggcgacagagtgagactgtctcaggaaaaaaaaaaaaaaaaaagaaggaaccaaaatgtagtgatcaaacccttccattttataactgggaaaactcaggcctcgtgacaaggcagaaagaccccaaatggtagaaaacagctgctgnaaccccttgtgctcttgtcctcactgaggggctgaagtagctcttagagctagaggggtgttagaggtaaccccgctccagaggactgactgtagcccaaggcaagagagggagtttcctgaggaaggacccagatggtgacctcagggtgggtgaaggaggtattctttgaatttctcttggagttgggagacttgatattgtccgacctaatctgcagtgctgaatcctgtcccacaactaagggggaccaattctcatgtccttgatcctctttgaagcaccttgggcttgtctgtcccacatcatcagtggcattaagcacaagagataccatcttagcacaatccttttactctaaatgttcaggggaggggtatagcagcaaggagagggggtctctgtgatggcccaaggagatatttttgatactgaagacccaggcccccaggggaactgcaggaagcgtctagctcataggcataggcctttcagtaaaggtcacccatccagggatccaggatgtagctggttccaggtgatgaaatcttcccaccttatgactggggaatgtcaggtctagtagcaaagcaaagagaccccagatggca

SEQ ID NO: 34229 - DNA, 208 bp, Homo sapiens
acagataagagcagaagcgctcttgatggttttgtatttcttgttctgttccaccaggagctcttggtgctgagcccgagtgtttactagatgcatggaaaggaaacttcccttcctaactgaatatttttggagggagaaataatacaaaaaagtgcagttttcacttatattgtgaaatgtgaaaataaagtcatcagctttttta

SEQ ID NO: 34230 - DNA, 988 bp, Homo sapiens
ttatctaatactatgcactgagttacataccttactttttggagggtcttctaaaaccttgctataatatgagaggatcttgattttctacaactaagtaaaagataacatgctgctccattttcttaaatgatgaagggatggctttcctaacatggaacacttaacagatgactaccattatacctaaatataaaagatggtaagaactgatttccagaaggacttcaaaggattggttcggtgaaggaaacagagtatatcatgataacatactatacaattcaaggaagatatctgacttcctttcttagcagctctgctgcatgttggttcctagtgttgccattattaactgacaatcatagaatggcttctgcttgcttcacaactgaaactaggagggcggaggggaggaggtggcaagaggggtaaaggcagtagcagtaatgatggaccggttaataagagactctgagtgtgatgtaaatagtatgtttattaaacaatagagcccattggaatttttttcttccacgtattgttagatgtaaaacctgatacactaccatacagacaggtgattgactagaccttgtttatgtagttctaatgtggaatacttagagttgttatgaattacgattatccataacttttgaatctaaaaagctggctacacaacgtattttgttggaatctttttgtaataccaaatgtctacactctttgatctagagaatcacaaaattttagaaacatcactacccaggttaattgacttttttattgtttactgtccaaatacctgttacatattaatagtattctactttatatacctgtaataaactattcagggtttcttaagctggttgttgaaatgttttgtaatactgctcttcttaccttgttataggaacttttataataaacctgaaaaagtgaaacatatctttcccaaataaatagcagattatataaatga

SEQ ID NO: 34231 - DNA, 728 bp, Homo sapiens
ttatctaatactatgcactgagttacataccttactttttggagggtcttctaaaaccttgctataatatgagaggatcttgattttctacaactaagtaaaagataacatgctgctccattttcttaaatgatgaagggatggctttcctaacatggaacacttaacagatgactaccattatacctaaatataaaagatggtaagaactgatttccagaaggacttcaaaggattggttcggtgaaggaaacagagtatatcatgataacatactatacaattcaaggaagatatctgacttcctttcttagcagctctgctgcatgttggttcctagtgttgccattattaactgacaatcatagaatggcttctgcttgcttcacaactgaaactaggagggcggaggggaggaggtggcaagaggggtaaaggcagtagcagtaatgatggaccggttaataagagactctgagtgtgatgtaaatagtatgtttattaaacaatagagcccattggaatttttttcttccacgtattgttagatgtaaaacctgatacactaccatacagacaggtgattgactagaccttgtttatgtagttctaatgtggaatacttagagttgttatgaattacgattatccataacttttgaatcttactcttgatcttagaattccaaatttagaaacatacttccacggtaattgctttttatggt

SEQ ID NO: 34232 - DNA, 426 bp, Homo sapiens
  misc_feature (22)..(22): n is a, c, g, or t
  misc_feature (25)..(25): n is a, c, g, or t
cccccccccctccttggaaatnagnaatattttctttcccatccaaggtcacagatgccatgaattctattcatggatcccatgcatctctgaatcctatttaggttcagaacccctgagggaaaggaaagtttatttataaactcaactgaaaaaatgcttccggcagggcccagtggctcacgcctgtaattccagcactttgggaggtggaggtgggtggatcatctgaggtcaggagttcaagaccagcctggccaacatggtgaaaccccatctctaataaaaatacaaaaatttagctgggtgtggtggcatgcacctgtaatcccagttacttgggaggctgaggcaggagaatcgcttgaacccgggaggcagaggttgcagtgagccaagatcttgccattgcactccagcctgggc

SEQ ID NO: 34233 - DNA, 309 bp, Homo sapiens
aaatagggattgaaattctcaccctgctcacctctctgcagacattgatgagtgtggcacagagggagccaactgtggagctgaccaattctgcgtgaacactgagggctcctatgagtgccgagactgtgccaaggcctgcctaggctgcatgggggcagggccaggtcgctgtaagaagtgtagccctggctatcagcaggtgggctccaagtgtctcgatgtggatgagtgtgagacagaggtgtgtccgggagagaacaagcagtgtgaaaacaccgagggcggttatcgctgcatctgtgccga

SEQ ID NO: 34234 - DNA, 180 bp, Homo sapiens
attgtgggcatttgggaataaactaaaaatataggctatacccagtaacaggcacgtagccaaataaagtcagagttttaaagataaaacataaacttggaacataaacatgcgcagcatggcccgaacctcattccagacggagatacagaggcagctaaaagatcactgcacaatact

SEQ ID NO: 34235 - DNA, 254 bp, Homo sapiens
agacagtcaattaccacttattggagagctatagttaacagttaacgaccatatgccttgaatgagtgggcttgaggaagaaagcacagaaagggggccacatttcacatctggacagttcagagcctggcttagctgacagaagggaaatacaatagaaggtgggccttaagtggaagttagagactcacagaaagaggaacttggagccagagggagggtagaaattcaagccccagggatcttgcatgaat

SEQ ID NO: 34236 - DNA, 679 bp, Homo sapiens
tgaaaatgtgctttcagattgttttttatatgtaattcttagacacttgtcattaagaaaatagtggctggcttgtgctcagcaagaagcacactggcacgtggctttggtataggaagtggaaggcaaggacctgggtttctgacaagtgcagtcagacatacacatccatctgagagctgcttgccttgttcccgtggtaaggccatggctcccacatactggaagcatatttttgtgaactgttttcagaattgggaacatattcagtggaatgtcttaaacgctgacacatcttcctcctttgaggggaagtatattttcagaagcagctaagacatttagagccaaaattgctgataggtggttcagtcaagttggctgatggcatctgaggtcaaaaacgaagatgtgacgattgagttcttaaagaggtaactcttaaagtgggcccaagggagaaggcagcatctttggactcctaggctggatggctacccaagaatatgccattgaaggatgacacctattcagatgtgaaagttcccagagcaggcaccttgggcccactttaagagttacctctttaagaactcatcgtcacatcttagtttttgacctcagatgccatcagcccacttgactgaaccacctatcagcacttttggctggtgcatcg

SEQ ID NO: 34237 - DNA, 1732 bp, Homo sapiens
tgaaaatgtgctttcagattgttttttatatgtaattcttagacacttgtcattaagaaaatagtggctggcttgtgctcagcaagaagcacactggcacgtggctttggtataggaagtggaaggcaaggacctgggtttctgacaagtgcagtcagacatacacatccatctgagagctgcttgccttgttcccgtggtaaggccatggctcccacatactggaagcatatttttgtgaactgttttcagaattgggaacatattcagtggaatgtcttaaacgctgacacatcttcctcctttgaggggaagtatattttcagaagcagctaagacatttagagccaaaattgctgataggtggttcagtcaagttggctgatggcatctgaggtcaaaaacgaagatgtgacgattgagttcttaaagaggtaactcttaaagtgggcccaagggagaaggcagcatctttggactcctaggctggatggctacccaagaatatgccattgaaggatgacacctattcagatgtgaaagttcccagagcaggcacctttgggtcacccaccacgtgtggctttttggtgcctgcatgaaactgtgttgccccctggtgagatgcccgggtgtcctgtaagccgatttaactctgcctgaggaagaggagctgtccactccagttgcccttggctaagtttagcctaacacacagggttttgacccatagttctaaaatacacaaattttgagactacagcacttctttggaaagaggaagaatgcaaagttcagtatttcaatactttgtattttacttgaaattacccttagtagcatcttttttttcctgtctgaaagcttttgtgtggatgagaagggacatttcatttcctcccttaacaaagtgtcattctgaggttctcatgtgtgtttttggaaatagagatactggttttgtagagtttgcctttgggtatgttttctttttttcttaaatctccaaggaagagaactgactaaaatagtaggaacatgaaagtattaaatgccaattaatttgttgtagtaaagtatcttcattagcgttatactccatcatatctggtgtaaactgctcacagaaaaccctatgaaaccaaagggggaccattcaggtctaaaaagcgacaggtccgagactgggtctgtcacctgggcattttcaaagaggacattttgaagaatttgcatattcagatttttaaaatgcacttaacatacttcattacagatttcttgggtagggaggatgggataggccagggatgggatggaatcagttctgcctgggaaactaatccgaatcatttacctttctgtattaaccttggcctgtcctaaaaagagaacgactgtttcatcatgagttgctctgagttttgttaatgtttgtgttggtggattgacggttaaatgaagcatttagctggaatatgaactttgggagttttcatgttgtcctggatttctctttgtaaacctttaaaccttagcccctggttgattgtgttaaacccattatgagaatgttatttaaagttgtattataattgcaacctccactaattattcagtactgtagcagcaaagtattatttgtaagaatttggttatttttatacttatatccactctaagtctggcgttctagtcagtaaaatgatgcaataaaattaatatcattttc

SEQ ID NO: 34238 - DNA, 796 bp, Homo sapiens
  misc_feature (10)..(11): n is a, c, g, or t
  misc_feature (16)..(16): n is a, c, g, or t
  misc_feature (18)..(19): n is a, c, g, or t
cggggggggnnccttnannttctggtttgccgtctagctttgggtatgttttctttttttcttaaatctccaaggaagagaactgactaaaatagtaggaacatgaaagtattaaatgccaattaatttgttgtagtaaagtatcttcattagcgttatactccatcatatctggtgtaaactgctcacagaaaaccctatgaaaccaaagggggaccattcaggtctaaaaagcgacaggtccgagactgggtctgtcacctgggcattttcaaagaggacattttgaagaatttgcatattcagatttttaaaatgcacttaacatacttcattacagatttcttgggtagggaggatgggataggccagggatgggatggaatcagttctgcctgggaaactaatccgaatcatttacctttctgtattaaccttggcctgtcctaaaaagagaacgactgtttcatcatgagttgctctgagttttgttaatgtttgtgttggtggattgacggttaaatgaagcatttagctggaatatgaactttgggagttttcatgttgtcctggatttctctttgtaaacctttaaaccttagcccctggttgattgtgttaaacccattatgagaatgttatttaaagttgtattataattgcaacctccactaattattcagtactgtagcagcaaagtattatttgtaagaatttggttatttttatacttatatccactctaagtctggcgttctagtcagtaaaatgatgcaataaaattaatatcattttc

SEQ ID NO: 34239 - DNA, 1555 bp, Homo sapiens
tgaaaatgtgctttcagattgttttttatatgtaattcttagacacttgtcattaagaaaatagtggctggcttgtgctcagcaagaagcacactggcacgtggctttggtataggaagtggaaggcaaggacctgggtttctgacaagtgcagtcagacatacacatccatctgagagctgcttgccttgttcccgtggtaaggccatggctcccacatactggaagcatatttttgtgaactgttttcagaattgggaacatattcagtggaatgtcttaaacgctgacacatcttcctcctttgaggggaagtatattttcagaagcagctaagacatttagagccaaaattgctgataggtggttcagtcaagttggctgatggcatctgaggtcaaaaacgaagatgtgacgattgagttcttaaagaggtaactcttaaagtgggcccaagggagaaggcagcatctttggactcctaggctggatggctacccaagaatatgccattgaaggatgacacctattcagatgtgaaagttcccagagcaggcacctttgggtcacccaccacgtgtggctttttggtgcctgcatgaaactgtgttgccccctggtgagatgcccgggtgtcctgtaagccgatttaactctgcctgaggaagaggagctgtccactccagttgcccttggctaagtttagcctaacacacagggttttgacccatagttctaaaatacacaaattttgagactacagcacttctttggaaagaggaagaatgcaaagttcagtatttcaatactttgtattttacttgaaattacccttagtagcatcttttttttcctgtctgaaagcttttgtgtggatgagaagggacatttcatttcctcccttaacaaagtgtcattctgaggttctcatgtgtgtttttggaaatagagatactggttttgtagagtttgcctttgggtatgttttctttttttcttaaatctccaaggaagagaactgactaaaatagtaggaacatgaaagtattaaatgccaattaatttgttgtagtaaagtatcttcattagcgttatactccatcatatctggtgtaaactgctcacagaaaaccctatgaaaccaaagggggaccattcaggtctaaaaagcgacaggtccgagactgggtctgtcacctgggcattttcaaagagaacgactgtttcatcatgagttgctctgagttttgttaatgtttgtgttggtggattgacggttaaatgaagcatttagctggaatatgaactttgggagttttcatgttgtcctggatttctctttgtaaacctttaaaccttagcccctggttgattgtgttaaacccattatgagaatgttatttaaagttgtattataattgcaacctccactaattattcagtactgtagcagcaaagtattatttgtaagaatttggttatttttatacttatatccactctaagtctggcgttctagtcagtaaaatgatgcaataaaattaatatcattttc

SEQ ID NO: 34240 - DNA, 633 bp, Homo sapiens
atggtctatatgagcggttgaagaaatagaaaataaaatgcaaatcacaagatgtccattaaaacagtctacctttttcctttgacagccattaattcttcttaaaatgtattgagaaatattttataatagatatacaaaagggcataagctataactagaaaacactgtacaactctctcatagattaagaaatagaaaattaccgacatgggaaaaataaatcccttgtgtatcactaccacctccagaggcaatcattatcctgaatttgtcgttacaattccatggatttccttatatttttgctgcatatgtatccctaactaatatttagaatcttcacatgtgtttcatcttgagagaaacaagatttttatttctctcttattcaagaaacaagagaaacatttttgaatatttcagcagcttagttttttgtttgtctgctttttattttctaagttcaacactatgttgatgaagacccctatacaagtatgtgcagagtcagctcattaattttcactgctgcataatatattacagtctataaattagtcataatttacacatcgagtttctcctcatggattttttttatgttttgctattaaaaaaaatgctgcaatg

SEQ ID NO: 34241 - DNA, 377 bp, Homo sapiens
cacccacagagtcatctcttggaggccctggaaaagtccctgctggggagtggagggagcctgtcgctgttccagctccagggtacagctgagagactcacagttgcacatctgaagctcccagtatggtgtctgtgctgctggtggtctggaagccactagccagtcacagcagggctcagtaagacaccccaacagctccttatcctgccagcccattacccctccctacttctcccccagcaagagccagaatgacacagaaagaaaaagaagtgctctgggtatcagaatcacctgggtgacacgatacccatgttagactccaggtggataaataaactgtggactattcagagaatgtactactatatagc

SEQ ID NO: 34242 - DNA, 572 bp, Homo sapiens
gctcgacaatcgcttgaacccaggagatggaggttgcagtgagctgagatcacgccactccactccagcctaggcaacagagcgagactcctgcctcagcctcccaagtagctgagactacaggtgcgtgccacctacctggctaatttttgttttgtatttttggtagagatggggtttcactgtgttagccaggatgatctcgatctcctgaccttgtgatctgcccacctcagcctcccaaagtgctgggattacaggcatgagccattgcactcggccctaaacctagtggatacctcttaaataacgtgatcaaactgaacaataccaatgttgggacaaattaacatcacggcctcctgatatgatgcactgaagaggacatgatatcacttccatggggttcttgccaaaaatgcaaccctcccatccaatctaatcgtaagaaaccaaacaaaaccaagacaagggatattctataaaataactgactagtactcaccagaagagctgtggtcatgaaagacaaggaaagactgaggaaccaccacacactggagactaaggag

SEQ ID NO: 34243 - DNA, 229 bp, Homo sapiens
tgaacctaaaagcatgcagttttagagtaagcaggaaggtaacacttctctaatccagtcgcccgtgtgaaacttggctcatctctgaaacagcactcggctgatatcttttaagctttacaggcaccaggaggcctcggacatagggaggtgaaccatcaagtccctctgaaacatctgttcttcttggaacgcatgtatggaattctgtgtatatttctgttaaaag

SEQ ID NO: 34244 - DNA, 270 bp, Homo sapiens
gttacaatttttaattgcacaagcgatatataaagacgttttctttgcaacataaaatgataggttaagactccttatgcagataaggtttagacacttgtttaaggagcatcctggcccaccttttaaaaaatgtgtatgcattcactttatgcatcagatggtttagggaatttttttccctggggcatgggacatgtcatggggtagatggtcaggtacgtctcctctacccagctgattctctttttttttttttttttttttttg

SEQ ID NO: 34245 - DNA, 912 bp, Homo sapiens
tcaaagctaaaccataggaagactggtgtgaggaactgggagaacttagcccagatgtgaaagtttggggaagtgcatgggatggaaacgataactggcttcaaacacccagaggctgatacgtggaggaaactagcagaattcttcctaataaatgctgttccctactaagaggaatgctggccactggaggaatggcggattctgggtctgggctaagggaaaatacaagatgatcctggacatctagttgtgatagaaagctaggaagtgctcaactaatggggtcatgttgaaaagacagatggtagcatcaagggattttcactggccaaattttggggtaatttgagtatccaaaaaaaatgatgataatggatcccatgtaggagaaatgacagaacttagaaaatcatcattttgtaattctcaaagtaatagttgatgcaggcaaagatcatcagtggcagctaaaacttctgtaaaaagttgttgggaaacatcaaaagataccagctgctgttgaaaaaaaaaaaaagttgttgggaaaagttgttaaaatatcaccccacagatcagtttttaattgcaaagggggaaaatttaccatttcaatggagagacctagtggtcaccatctaaatcaagtagtcaacatgtatattatcactagtgagataagcagtacacttatgtagtagtcctaaggaaaaaaaaaaaaaaaaaaaggctgggagaatattccaggtaacaagagaccaaagaggccgggcgcgttggctcacacctgtaatcccagcattttgggaggccaaggcaggtgaatcatttgaggtcaggagttcgaggccagactggccaaaatgatggccaactccatctctactaacaattagctgggcatggtggtgc

SEQ ID NO: 34246 - DNA, 2153 bp, Homo sapiens
  misc_feature (1349)..(1349): n is a, c, g, or t
ggataattgtcccaacatcgtttacatcactgcttttccaggaacgaaatgccgtctatgttggttgtgaacgtgcatttggcacctggcagggccaaccctcatggcgtgtgcgtgaacacatccctaaaccatagtctaatttatcctatttttgtagttcatgtgagcagaatccagtgtctgtgttctcgcatctggttttcactccacgtgtttggggtgtgtgcgtatcgctgtgcatggtgtggactttctccacgtcccgtgtgcaaacgccaccccacccagaggccacgccaggacccaggcctgtgggcagtggttcccggtttgcccttgcaaggacgctgtgtcctcctgcgtgagcatccctgcctcgggtctaatcctgggagtggaaggcaggtcgtgggtgtggctgcatcctcagcttctctggatgatgcccaggaacatgcccagagccagagggcccagctgctcggctccctcacactgggctgggcacttggtcgccagccgtttggggagtgtgttctcatggtggtttcaggtgtgagtctgaccaacaaccccccgtgcccgctggacactggagttccttcctctctggcggtgtttctcatcagggttccccaccggcctactgcacgctgcgtctctcctgacctgtaggagtcccctacacctctggctgctcgactttgttggtttaatgttttgcaaatgtcttcctccattttgtggtttgccttttcattctcctaatggaacatgttgctttacagaagcatctagttttaacagagtcttgtttaagacggtgtcaacacgcactgggctggcctggtccctgaactcaggtgtgtttcctttgcaaactctagagcagagagacaagggaggaaggacagatagcggcagagtgtgtggaaatgttttccaggaaggatggctttgagtgacagcatcatttgagtgacagcagtggtaggtggtgtaatggattctgatgtggtgggggtaaggggcgcagccaagctccgattcctcctgctgggcccaaggaccaaggactgtgacaggaatgcatagtccctcctctgtcctgccagaggccagagacttgtgtccaccactctgccgggctgtcttcaggaacttgttcaggaggtgctggggtgcagggcacgtctgaaaggcatttctggacacctgctgtggcctcatacaggagagtaggtgacctggccaaggccagcacacaggacaagattaagcatccagggacccggggtcacagccctcactccattgcaggggtggggatgacagaggccagaggngatcagacaggggcagctgttgatggttctgagatgcagtttctgtctgaggggcctcctcccactcctggcctgtgcagaggggtgggtgtgtggagggaaggtgggtctgccctggtcaaacagcagaggcattgcctgttagtctcattccattccgagtgcccccagggagagtcagccaccttatgtagagaggcaaggccagaaggcagggggggcctcccctctggtgaccaacagggcctgtggtacaagcagtgccggctgctgccctctctggcctttgtctccttccagcctctccgctattagcagaggagcagaacacttgacaggtggacacaggccacccccaacccctggccctggaggaggctccacagtggcctcctagagccaggagaccggactgagctgaatctgctgctcctgacaggacctgacctcacagggggcgcctttgaggacaacctgaggtcactgcacttgcaggagggccaggacttccttcacttcagctgacggacccatggcagctgctcccagtgcatcccaggccagcaggagctttgtgagctgcaggcatggcgatggtgcgcctgttccacacccagcaggcgcaaccagagtctcgtgtgtgccgaccacaggagccaagccttttccactgtgtggactcatgtggccaaggctaggcctggtcacccaggaccctcaccacgtgaccccagccaatcgggacagttcaaggaggaggagacccctattacacaggttggaataaaatatttaaatctcgta

SEQ ID NO: 34247 - DNA, 929 bp, Homo sapiens
  misc_feature (20)..(20): n is a, c, g, or t
cgaagcgggggatgagcggncggacgtgggcggggcgtccgaggagagccaggccatgcaggccacgtgtctattatcctcccagtccacaacgctgaaccgtggctggacgaatgacctcacagggggcgcctttgaggacaacctgaggtcactgcacttgcaggagggccaggacttccttcacttcagctgacggacccatggcagctgctcccagtgcatcccaggccagcaggagctttgtgagctgcaggcatggcgatggtgcgcctgttccacacccagcaggcgcaaccagagtctcgtgtgtgccgaccacaggagccaagccttttccactgtgtggactcatgtggccaaggctaggcctggtcacccaggaccctcaccacgtgaccccagccaatcgggacagttcaaggaggaggagacccctattacacaggttggaataaaatatttaaatctcgtaaaaatgtaacccaaggctcttttagggtataaagaccattggccaccaggtcaaacacaacaacagtagtgtgttaaccccacactcctgtgtggccaggtcgtcacacacatcccgtgaagagctgtctgctaaacacacagcacggactgtcacagtcctggtcttgtggtcctggtgacctcacaagcctcacagatgcggtggcacctcccagttcttggcctgcccatgttcctgtgtccaggccccatccccacctgagagcaggccagggagccaccctaatctacaccacgcacatggcacccctgggctcctcacatagggaaagggttgctcacccaagcccttgggcctctgagtggccacacctggggctgctttggtgctgctggccgtggttctgcacctcaagccctatgagcacagcacaggtcccagagatgggtgt

SEQ ID NO: 34248 - DNA, 942 bp, Homo sapiens
ggataattgtcccaacatcgtttacatcactgcttttccaggaacgaaatgccgtctatgttggttgtgaacgtgcatttggcacctggcagggccaaccctcatggcgtgtgcgtgaacacatccctaaaccatagtctaatttatcctatttttgtagttcatgtgagcagaatccagtgtctgtgttctcgcatctggttttcactccacgtgtttggggtgtgtgcgtatcgctgtgcatggtgtggactttctccacgtcccgtgtgcaaacgccaccccacccagaggccacgccaggacccaggcctgtgggcagtggttcccggtttgcccttgcaaggacgctgtgtcctcctgcgtgagcatccctgcctcgggtctaatcctgggagtggaaggcaggtcgtgggtgtggctgcatcctcagcttctctggatgatgcccaggaacatgcccagagccagagggcccagctgctcggctccctcacactgggctgggcacttggtcgccagccgtttggggagtgtgttctcatggtggtttcaggtgtgagtctgaccaacaaccccccgtgcccgctggacactggagttccttcctctctggcggtgtttctcatcagggttccccaccggcctactgcacgctgcgtctctcctgacctgtaggagtcccctacacctctggctgctcgactttgttggtttaatgttttgcaaatgtcttcctccattttgtggtttgccttttcattctcctaatggaacatgttgctttacagaagcatctagttttaacagagtcttgtttaagacggtgtcaacacgcactgggctggcctggtccctgaactcaggtgtgtttcctttgcaaactctagagcaaaaagggaaggatcgtgaaaaagggaagatcgtgggaaagggaaggat

SEQ ID NO: 34249 - DNA, 629 bp, Homo sapiens
atccattgagcttttcatttcacttcttacatttctaggggctctgtttttttctaatctcttcttgatcatttctagcccttttcaaaaatgtactcatattatagcctacattctaccagagaggttttgtatttgcatcttctgcccttgtctgggaataccactggtcagggccaagtcaatcaaattttccactttaggagttttggggatcatacaggtagtattaattcaggccacttcaggggagatagattgagataagagtcttgctgctgttcctttgaaaaagacttatttagggtcccagctttatatagcggtccattagatctggccctgggccttaaattctctcatccattctgctatcaaaatagcgtgactagattccagggctcagcagaaaccctcaggatctccaaggtctctgctctcacatggagggtttctggttagcacctagaacgtgtttgtgggtacacaaatcccacatcagctccccggtcccagggatactggcttcttgctgctctctaaactcacaaagcttgctccacttctgggaccacaagcattctcttttctgccattgaaacaaaagacgaggggatcctctagagtcg

SEQ ID NO: 34250 - DNA, 495 bp, Homo sapiens
  misc_feature (20)..(20): n is a, c, g, or t
cgaagcgggggatgagcggncggacgtgggcggggcgtccgaggagagccaggccatgcaggccacgtgtctattatcctcccagtccacaacgctgaaccgtggctggacgaatgtttgaggtctgttttgcaacaggactttgaaggtaccatggagctgtctgttttcaatgatgccagtaaggacaagtctggggctatcattgaaaaatggagagtgaagctggaagattctggtgtccacgtgatcattggggggcacgattctccctctcctagaggcgtcggatacgctaaaaatcaagcagttgcccagagctcagggtcttacctttgctttttggattcggatgacgtcatgatgccccagcgggtgaggctgcaacacgaggctgccgttcagcacccgtcgagcttgctggttcgtggttacgtgaattacattgtgtagtttgtcctgagagaatgaaataaacgctgagatacttgtact

SEQ ID NO: 34251 - DNA, 1790 bp, Homo sapiens
  misc_feature (20)..(20): n is a, c, g, or t
cgaagcgggggatgagcggncggacgtgggcggggcgtccgaggagagccaggccatgcaggccacgtgtctattatcctcccagtccacaacgctgaaccgtggctggacgaatgtttgaggtctgttttgcaacaggactttgaaggacaagtctggggctatcattgaaaaatggagagtgaagctggaagattctggtgtccacgtgatcattggggggcacgattctccctctcctagaggcgtcggatacgctaaaaatcaagcagttgcccagagctcagggtcttacctttgctttttggattcggatgacgtcatgatgccccagcgggtgaggctgcaacacgaggctgccgttcagcacccgtcgagcatcattggttgcagagtgaggagagatccccctaactccaccgaacgatacacacgttggatcaaccagctgacgccggagcagctcctaacccaggttttcacctcaaatggccccacggtgatcatgcccacctggttctgctcgcgagcgtggttctcccacgtgggcccctttaacgagggaggtcagggcgtcccggaggacctgctgttcttctacgagcacctcaggaagggcggcggcgtcatccgcgtggaccagagtctcctgctgtatcgccaccacccacaggcggccacgcactgcgtcctcgagacgaccatctggacccaccgcgtccgcttcctggaagagcaggccctgccccgctgggcggccttcaccatctggaacgctggcaagcaggggcgccggctgtaccgcagcttgactgccggcagccagcgcaaggtggtggcattctgtgacgtggacgagaacaagatcaggaaaggcttctattgccacgaggactctcaggaaagacccaagccccgaatccccatcctgcacttccgagccgcccggccacccttcgtcatctgcgtgaagctggacctcacagggggcgcctttgaggacaacctgaggtcactgcacttgcaggagggccaggacttccttcacttcagctgacggacccatggcagctgctcccagtgcatcccaggccagcaggagctttgtgagctgcaggcatggcgatggtgcgcctgttccacacccagcaggcgcaaccagagtctcgtgtgtgccgaccacaggagccaagccttttccactgtgtggactcatgtggccaaggctaggcctggtcacccaggaccctcaccacgtgaccccagccaatcgggacagttcaaggaggaggagacccctattacacaggttggaataaaatatttaaatctcgtaaaaatgtaacccaaggctcttttagggtataaagaccattggccaccaggtcaaacacaacaacagtagtgtgttaaccccacactcctgtgtggccaggtcgtcacacacatcccgtgaagagctgtctgctaaacacacagcacggactgtcacagtcctggtcttgtggtcctggtgacctcacaagcctcacagatgcggtggcacctcccagttcttggcctgcccatgttcctgtgtccaggccccatccccacctgagagcaggccagggagccaccctaatctacaccacgcacatggcacccctgggctcctcacatagggaaagggttgctcacccaagcccttgggcctctgagtggccacacctggggctgctttggtgctgctggccgtggttctgcacctcaagccctatgagcacagcacaggtcccagagatgggtgt

SEQ ID NO: 34252 - DNA, 1336 bp, Homo sapiens
  misc_feature (20)..(20): n is a, c, g, or t
cgaagcgggggatgagcggncggacgtgggcggggcgtccgaggagagccaggccatgcaggccacgtgtctattatcctcccagtccacaacgctgaaccgtggctggacgaatgtttgaggtctgttttgcaacaggactttgaaggacaagtctggggctatcattgaaaaatggagagtgaagctggaagattctggtgtccacgtgatcattggggggcacgattctccctctcctagaggcgtcggatacgctaaaaatcaagcagttgcccagagctcagggtcttacctttgctttttggattcggatgacgtcatgatgccccagcgggtgaggctgcaacacgaggctgccgttcagcacccgtcgagcatcattggttgcagagtgaggagagatccccctaactccaccgaacgatacacacgttggatcaaccagctgacgccggagcagctcctaacccaggttttcacctcaaatggccccacggtgatcatgcccacctggttctgctcgcgagcgtggttctcccacgtgggcccctttaacgagggaggtcagggcgtcccggaggacctgctgttcttctacgagcacctcaggaagggcggcggcgtcatccgcgtggaccagagtctcctgctgtatcgccaccacccacaggcggccacgcactgcgtcctcgagacgaccatctggacccaccgcgtccgcttcctggaagagcaggccctgccccgctgggcggccttcaccatctggaacgctggcaagcaggggcgccggctgtaccgcagcttgactgccggcagccagcgcaaggtggtggcattctgtgacgtggacgagaacaagatcaggaaaggcttctattgccacgaggactctcaggaaagacccaagccccgaatccccatcctgcacttccgagccgcccggccacccttcgtcatctgcgtgaagctggacctcacagggggcgcctttgaggacaacctgaggtcactgcacttgcaggagggccaggacttccttcacttcagctgacggacccatggcagctgctcccagtgcatcccaggccagcaggagctttgtgagctgcaggcatggcgatggtgcgcctgttccacacccagcaggcgcaaccagagtctcgtgtgtgccgaccacaggagccaagccttttccactgtgtggactcatgtggccaaggctaggcctggtcacccaggaccctcaccacgtgaccccagccaatcgggacagttcaaggaggaggagacccctattacacaggttggaataaaatatttaaatctcgta

SEQ ID NO: 34253 - DNA, 1735 bp, Homo sapiens
  misc_feature (20)..(20): n is a, c, g, or t
cgaagcgggggatgagcggncggacgtgggcggggcgtccgaggagagccaggccatgcaggccacgtgtctattatcctcccagtccacaacgctgaaccgtggctggacgaatgtttgaggtctgttttgcaacaggactttgaaggacaagtctggggctatcattgaaaaatggagagtgaagctggaagattctggtgtccacgtgatcattggggggcacgattctccctctcctagaggcgtcggatacgctaaaaatcaagcagttgcccagagctcagggtcttacctttgctttttggattcggatgacgtcatgatgccccagcgggtgaggctgcaacacgaggctgccgttcagcacccgtcgagcatcattggttgcagagtgaggagagatccccctaactccaccgaacgatacacacgttggatcaaccagctgacgccggagcagctcctaacccaggttttcacctcaaatggccccacggtgatcatgcccacctggttctgctcgcgagcgtggttctcccacgtgggcccctttaacgagggaggtcagggcgtcccggaggacctgctgttcttctacgagcacctcaggaagggcggcggcgtcatccgcgtggaccagagtctcctgctgtatcgccaccacccacaggcggccacgcactgcgtcctcgagacgaccatctggacccaccgcgtccgcttcctggaagagcaggccctgccccgctgggcggccttcaccatctggaacgctggcaagcaggggcgccggctgtaccgcagcttgactgccggcagccagcgcaaggtggtggcattctgtgacgtggacgagaacaagatcaggaaaggcttctattgccacgaggactctcaggaaagacccaagccccgaatccccatcctgcacttccgagccgcccggccacccttcgtcatctgcgtgaagctggacctcacagggggcgcctttgaggacaacctgaggtcactgcacttgcaggagggccaggacttccttcacttcagctgacggacccatggcagctgctcccagtgcatcccaggccagcaggagctttgtgagctgcaggcatggcgatggtgcgcctgttccacacccatgtgtggactcatgtggccaaggctaggcctggtcacccaggaccctcaccacgtgaccccagccaatcgggacagttcaaggaggaggagacccctattacacaggttggaataaaatatttaaatctcgtaaaaatgtaacccaaggctcttttagggtataaagaccattggccaccaggtcaaacacaacaacagtagtgtgttaaccccacactcctgtgtggccaggtcgtcacacacatcccgtgaagagctgtctgctaaacacacagcacggactgtcacagtcctggtcttgtggtcctggtgacctcacaagcctcacagatgcggtggcacctcccagttcttggcctgcccatgttcctgtgtccaggccccatccccacctgagagcaggccagggagccaccctaatctacaccacgcacatggcacccctgggctcctcacatagggaaagggttgctcacccaagcccttgggcctctgagtggccacacctggggctgctttggtgctgctggccgtggttctgcacctcaagccctatgagcacagcacaggtcccagagatgggtgt

SEQ ID NO: 34254 - DNA, 1499 bp, Homo sapiens
acgtccctgttgagcctctagaccggtttctttgcaacaaaagccttttccaccggttcctggttggccggctgagcgcaggtgtagtgtgcatccggggcaggcacgcgtttctggggccccagtgatgcctctgcttctcccgccctgcagggcgtcccggaggacctgctgttcttctacgagcacctcaggaagggcggcggcgtcatccgcgtggaccagagtctcctgctgtatcgccaccacccacaggcggccacgcactgcgtcctcgaatccgggcagacagttccctccttagaactgtgaggacacagaggtctcggccacctgcctgccgcgtgccgcagcgttaagttggaaagcaggccgccgtccgaggcttgcgtctcggcccctacggacgaccatctggacccaccgcgtccgcttcctggaagagcaggccctgccccgctgggcggccttcaccatctggaacgctggcaagcaggggcgccggctgtaccgcagcttgactgccggcagccagcgcaaggtggtggcattctgtgacgtggacgagaacaagatcaggaaaggcttctattgccacgaggactctcaggaaagacccaagccccgaatccccatcctgcacttccgagccgcccggccacccttcgtcatctgcgtgaagctggacctcacagggggcgcctttgaggacaacctgaggtcactgcacttgcaggagggccaggacttccttcacttcagctgacggacccatggcagctgctcccagtgcatcccaggccagcaggagctttgtgagctgcaggcatggcgatggtgcgcctgttccacacccagcaggcgcaaccagagtctcgtgtgtgccgaccacaggagccaagccttttccactgtgtggactcatgtggccaaggctaggcctggtcacccaggaccctcaccacgtgaccccagccaatcgggacagttcaaggaggaggagacccctattacacaggttggaataaaatatttaaatctcgtaaaaatgtaacccaaggctcttttagggtataaagaccattggccaccaggtcaaacacaacaacagtagtgtgttaaccccacactcctgtgtggccaggtcgtcacacacatcccgtgaagagctgtctgctaaacacacagcacggactgtcacagtcctggtcttgtggtcctggtgacctcacaagcctcacagatgcggtggcacctcccagttcttggcctgcccatgttcctgtgtccaggccccatccccacctgagagcaggccagggagccaccctaatctacaccacgcacatggcacccctgggctcctcacatagggaaagggttgctcacccaagcccttgggcctctgagtggccacacctggggctgctttggtgctgctggccgtggttctgcacctcaagccctatgagcacagcacaggtcccagagatgggtgt

SEQ ID NO: 34255 - DNA, 2607 bp, Homo sapiens
  misc_feature (1349)..(1349): n is a, c, g, or t
ggataattgtcccaacatcgtttacatcactgcttttccaggaacgaaatgccgtctatgttggttgtgaacgtgcatttggcacctggcagggccaaccctcatggcgtgtgcgtgaacacatccctaaaccatagtctaatttatcctatttttgtagttcatgtgagcagaatccagtgtctgtgttctcgcatctggttttcactccacgtgtttggggtgtgtgcgtatcgctgtgcatggtgtggactttctccacgtcccgtgtgcaaacgccaccccacccagaggccacgccaggacccaggcctgtgggcagtggttcccggtttgcccttgcaaggacgctgtgtcctcctgcgtgagcatccctgcctcgggtctaatcctgggagtggaaggcaggtcgtgggtgtggctgcatcctcagcttctctggatgatgcccaggaacatgcccagagccagagggcccagctgctcggctccctcacactgggctgggcacttggtcgccagccgtttggggagtgtgttctcatggtggtttcaggtgtgagtctgaccaacaaccccccgtgcccgctggacactggagttccttcctctctggcggtgtttctcatcagggttccccaccggcctactgcacgctgcgtctctcctgacctgtaggagtcccctacacctctggctgctcgactttgttggtttaatgttttgcaaatgtcttcctccattttgtggtttgccttttcattctcctaatggaacatgttgctttacagaagcatctagttttaacagagtcttgtttaagacggtgtcaacacgcactgggctggcctggtccctgaactcaggtgtgtttcctttgcaaactctagagcagagagacaagggaggaaggacagatagcggcagagtgtgtggaaatgttttccaggaaggatggctttgagtgacagcatcatttgagtgacagcagtggtaggtggtgtaatggattctgatgtggtgggggtaaggggcgcagccaagctccgattcctcctgctgggcccaaggaccaaggactgtgacaggaatgcatagtccctcctctgtcctgccagaggccagagacttgtgtccaccactctgccgggctgtcttcaggaacttgttcaggaggtgctggggtgcagggcacgtctgaaaggcatttctggacacctgctgtggcctcatacaggagagtaggtgacctggccaaggccagcacacaggacaagattaagcatccagggacccggggtcacagccctcactccattgcaggggtggggatgacagaggccagaggngatcagacaggggcagctgttgatggttctgagatgcagtttctgtctgaggggcctcctcccactcctggcctgtgcagaggggtgggtgtgtggagggaaggtgggtctgccctggtcaaacagcagaggcattgcctgttagtctcattccattccgagtgcccccagggagagtcagccaccttatgtagagaggcaaggccagaaggcagggggggcctcccctctggtgaccaacagggcctgtggtacaagcagtgccggctgctgccctctctggcctttgtctccttccagcctctccgctattagcagaggagcagaacacttgacaggtggacacaggccacccccaacccctggccctggaggaggctccacagtggcctcctagagccaggagaccggactgagctgaatctgctgctcctgacaggacctgacctcacagggggcgcctttgaggacaacctgaggtcactgcacttgcaggagggccaggacttccttcacttcagctgacggacccatggcagctgctcccagtgcatcccaggccagcaggagctttgtgagctgcaggcatggcgatggtgcgcctgttccacacccagcaggcgcaaccagagtctcgtgtgtgccgaccacaggagccaagccttttccactgtgtggactcatgtggccaaggctaggcctggtcacccaggaccctcaccacgtgaccccagccaatcgggacagttcaaggaggaggagacccctattacacaggttggaataaaatatttaaatctcgtaaaaatgtaacccaaggctcttttagggtataaagaccattggccaccaggtcaaacacaacaacagtagtgtgttaaccccacactcctgtgtggccaggtcgtcacacacatcccgtgaagagctgtctgctaaacacacagcacggactgtcacagtcctggtcttgtggtcctggtgacctcacaagcctcacagatgcggtggcacctcccagttcttggcctgcccatgttcctgtgtccaggccccatccccacctgagagcaggccagggagccaccctaatctacaccacgcacatggcacccctgggctcctcacatagggaaagggttgctcacccaagcccttgggcctctgagtggccacacctggggctgctttggtgctgctggccgtggttctgcacctcaagccctatgagcacagcacaggtcccagagatgggtgt

SEQ ID NO: 34256 - DNA, 1848 bp, Homo sapiens
atccattgagcttttcatttcacttcttacatttctaggggctctgtttttttctaatctcttcttgatcatttctagcccttttcaaaaatgtactcatattatagcctacattctaccagagaggttttgtatttgcatcttctgcccttgtctgggaataccactggtcagggccaagtcaatcaaattttccactttaggagttttggggatcatacaggtagtattaattcaggccacttcaggggagatagattgagataagagtcttgctgctgttcctttgaaaaagacttatttagggtcccagctttatatagcggtccattagatctggccctgggccttaaattctctcatccattctgctatcaaaatagcgtgactagattccagggctcagcagaaaccctcaggatctccaaggtctctgctctcacatggagggtttctggttagcacctagaacgtgtttgtgggtacacaaatcccacatcagctccccggtcccagggatactggcttcttgctgctctctaaactcacaaagcttgctccacttctgggaccacaagcattctcttttctgccattggacacagtctggacctctgcccaaatgctgccccttcagagaggttttctgaacaccttctcggagtcaacacccaacatgccattccattgcccactttatctttgttcatagcactcagtgttgcctgccttgatggtgcttgcttgttcatttgctattgtctgccccagctatcatgtgagcaaggggttccttgccaaactctatcacctggaccctggtgggctccagaaacggctgctgaaagagggctttccaggccaccaggtgtctggtgagcacaagtgccccagtgatggatgggatccagtgggaaagaggcagtggccagtggagtgatccactttcctcgggttgctaagttagaccgacattaaaagaagaactgctttgccacatagtgtcactgatgggtctgggtgggtaatcgacctgcctccatgtcttaaaatgccatttatctggaatcttcttttaattgcactaagaacagttcatcatgtttttctcagaagccacttgttccttccatcctcagtgcatcccaggccagcaggagctttgtgagctgcaggcatggcgatggtgcgcctgttccacacccagcaggcgcaaccagagtctcgtgtgtgccgaccacaggagccaagccttttccactgtgtggactcatgtggccaaggctaggcctggtcacccaggaccctcaccacgtgaccccagccaatcgggacagttcaaggaggaggagacccctattacacaggttggaataaaatatttaaatctcgtaaaaatgtaacccaaggctcttttagggtataaagaccattggccaccaggtcaaacacaacaacagtagtgtgttaaccccacactcctgtgtggccaggtcgtcacacacatcccgtgaagagctgtctgctaaacacacagcacggactgtcacagtcctggtcttgtggtcctggtgacctcacaagcctcacagatgcggtggcacctcccagttcttggcctgcccatgttcctgtgtccaggccccatccccacctgagagcaggccagggagccaccctaatctacaccacgcacatggcacccctgggctcctcacatagggaaagggttgctcacccaagcccttgggcctctgagtggccacacctggggctgctttggtgctgctggccgtggttctgcacctcaagccctatgagcacagcacaggtcccagagatgggtgt

SEQ ID NO: 34257 - DNA, 526 bp, Homo sapiens
ctgccaaatctaaatgaaaaaccacccaattttgaatgcttactatatagagagcactatgctgccagttttacataaagtggatgattattaatgatgatggtaacaatagctaacatttcaacagcgtttttggtttactgtgctcctatgagactggtattaatcagctttccattttacaatagaggaaactgaagtgaggcaggttaagaaatttgtccaagttcacacaactattaaggggcagagctgggattcacacccagtcagtgtggtttgctcctcagcactctgcctttgcatgtatgttatggaggcatggaaccacacctctctgagacaatcatctatttggaaaagcaatgcatagaattaaaaacaaaaaatagactaccaagtaaatgtaaaatattgttcacattactgaaaacactagccgttacataaagtatacttgcttgaatcagatatttgaacacttaaaattgtcacatgctaagattagccaaaatctgaaaagctc

SEQ ID NO: 34258 - DNA, 503 bp, Homo sapiens
tagtcctttctccactgacttgacatatcattttaacagatactaaattctcagatatctgtgactttctggactatttgttttcattgattcatttgcctttttctgtgccaccatcacattgttttagttactgtagctttatgatattttgatcaacatttttttcttgattgagtactttgccatgaaatttagaaactagagattaaatgtaattataaaatgacagtctcacttctccattgctgcctaatggctgataagcaagatagagcatatttgaaggccaaaaaacaacctgttgaatttttaaatgatagcttgtgaacatgcttatttgtcttgattttattaatcaccaaattagtaaattgtgtctgtaacagagtaatttcccaaagctaattgttattacgtgttatttcttaaacattcttttaatgtaacaggactcttatagcaaataataaagcaattaaattatcaggtgaaacgttatt

SEQ ID NO: 34259 - DNA, 2292 bp, Homo sapiens
cgagggggagggcggagctgccggcggcccgggcgggctggcagctagagtgggtgcgatagccgcctccgcctctgcccgcctccgccgtcgcctcctccgcccgggccgttcgctgctgcgcggggagagcgaggcggggccgccggggccgccatggagcccgactcggtgattgaggacaagaccatcgagctcatgtgttctgtgccaaggtctttgtggctaggctgcgccaacctggtagagagcatgtgcgcactgagttgcctgcagagcatgcccagtgtcagatgtctccagataagtaatggaacatcatctgtgatcgtctccagaaagaggccatcagaaggaaactatcaaaaagaaaaagacttgtgtattaaatattttgaccagtggtctgaatcagatcaagtggaatttgtggaacatcttatttcacgaatgtgtcattatcagcatggacatattaactcttacctgaagcccatgttgcagcgggactttattaccgctttaccagagcaaggcttagatcacatagcagaaaacattctttcgtacctggatgccaggtctctgtgtgcagcagagctggtatgtaaagaatggcagcgagtgatctcagaaggaatgctttggaagaagctgattgaacgaatggtacgcactgatcccctatggaaaggactttcagaaagaagagggtgggatcagtacctgtttaaaaacagacccacagatggccctccaaattcattttataggtcattatacccaaagattatccaggatatagagactatagaatctaactggcggtgtggacgacacaacttgcagaggattcagtgccgctctgaaaatagtaaaggtgtctactgtttacagtacgatgatgaaaaaattatcagtggcctacgagataattctattaagatatgggataaaaccagcctggaatgtttgaaagtgttaacaggacacacaggctctgtcctctgtctgcagtatgatgagcgtgtcattgtaactggctcttcagattctacggtgagagtgtgggatgtgaacacgggtgaagttcttaacacattgatccaccacaatgaggctgtattgcacttacgcttcagcaatggactgatggtgacctgttccaaggaccgctccattgctgtgtgggacatggcttctgcgaccgacatcactttacgccgtgtcctggttggccaccgggctgccgtcaatgtagtagactttgacgacaagtacatcgtgtctgcctctggtgacaggaccatcaaagtctggagcacgagcacctgtgaatttgttcgtactctcaatgggcacaagcggggcattgcctgtctccagtacagggatcgcctggttgttagtggatcatcagataataccattaggctctgggatattgaatgtggtgcctgtttaagagtcctagagggacatgaagaattggtccgatgcatccggtttgataacaagaggattgtcagtggggcctatgatgggaaaattaaagtttgggacttgcaagctgctcttgaccctcgagccccagcaagcacattgtgtttgcgcacattggtggaacattctggacgtgtgtttcggctccagtttgatgagtttcagatcatcagcagctcccatgatgacactattttgatttgggatttcttaaatgtgcctcccagtgcccagaatgagacccattccccctccagaacatacacttacatctctagataacagtctgcactttcacccgtttccgggttttctagtcttgaactactggctacgtggctaccaaatgcctaagggagttcgttcacagctgagttatgaagctggaattggttctagacgctgggtagatgcaaagcagcctaactcttcaagtaccgacatttctcacctctgattccggctctcctttgagaaggagaccttagcttccccggcttgcaagtagaacagaagcccgtttccttccctcatcagtgaaaaaatctaatgtttcaaatgtaaattgttcatagaaaaggaacatagaatctgttttacagaagtaaatcgaccgtcaagagaagacttggcctctaatttatattgctttgcactttggtttgatattaagaaacagcattcttcttcagtgaaattttgggtgccaaacacctacccagaatgtccagggctttcattttcaaaagttagcattctccttttgaccgtccaagtcattatgaattc

SEQ ID NO: 34260 - DNA, 2252 bp, Homo sapiens
cgagggggagggcggagctgccggcggcccgggcgggctggcagctagagtgggtgcgatagccgcctccgcctctgcccgcctccgccgtcgcctcctccgcccgggccgttcgctgctgcgcggggagagcgaggcggggccgccggggccgccatggagcccgactcggtgattgaggacaagaccatcgagctcataacacttcagttctggaagatcaagatgaagataagtccccaaagaaaaatactccttggcagataagtaatggaacatcatctgtgatcgtctccagaaagaggccatcagaaggaaactatcaaaaagaaaaagacttgtgtattaaatattttgaccagtggtctgaatcagatcaagtggaatttgtggaacatcttatttcacgaatgtgtcattatcagcatggacatattaactcttacctgaagcccatgttgcagcgggactttattaccgctttaccagagcaaggcttagatcacatagcagaaaacattctttcgtacctggatgccaggtctctgtgtgcagcagagctggtatgtaaagaatggcagcgagtgatctcagaaggaatgctttggaagaagctgattgaacgaatggtacgcactgatcccctatggaaaggactttcagaaagaagagggtgggatcagtacctgtttaaaaacagacccacagatggccctccaaattcattttataggtcattatacccaaagattatccaggatatagagactatagaatctaactggcggtgtggacgacacaacttgcagaggattcagtgccgctctgaaaatagtaaaggtgtctactgtttacagtacgatgatgaaaaaattatcagtggcctacgagataattctattaagatatgggataaaaccagcctggaatgtttgaaagtgttaacaggacacacaggctctgtcctctgtctgcagtatgatgagcgtgtcattgtaactggctcttcagattctacggtgagagtgtgggatgtgaacacgggtgaagttcttaacacattgatccaccacaatgaggctgtattgcacttacgcttcagcaatggactgatggtgacctgttccaaggaccgctccattgctgtgtgggacatggcttctgcgaccgacatcactttacgccgtgtcctggttggccaccgggctgccgtcaatgtagtagactttgacgacaagtacatcgtgtctgcctctggtgacaggaccatcaaagtctggagcacgagcacctgtgaatttgttcgtactctcaatgggcacaagcggggcattgcctgtctccagtacagggatcgcctggttgttagtggatcatcagataataccattaggctctgggatattgaatgtggtgcctgtttaagagtcctagagggacatgaagaattggtccgatgcatccggtttgataacaagaggattgtcagtggggcctatgatgggaaaattaaagtttgggacttgcaagctgctcttgaccctcgagccccagcaagcacattgtgtttgcgcacattggtggaacattctggacgtgtgtttcggctccagtttgatgagtttcagatcatcagcagctcccatgatgacactattttgatttgggatttcttaaatgtgcctcccagtgcccagaatgagacccattccccctccagaacatacacttacatctctagataacagtctgcactttcacccgtttccgggttttctagtcttgaactactggctacgtggctaccaaatgcctaagggagttcgttcacagctgagttatgaagctggaattggttctagacgctgggtagatgcaaagcagcctaactcttcaagtaccgacatttctcacctctgattccggctctcctttgagaaggagaccttagcttccccggcttgcaagtagaacagaagcccgtttccttccctcatcagtgaaaaaatctaatgtttcaaatgtaaattgttcatagaaaaggaacatagaatctgttttacagaagtaaatcgaccgtcaagagaagacttggcctctaatttatattgctttgcactttggtttgatattaagaaacagcattcttcttcagtgaaattttgggtgccaaacacctacccagaatgtccagggctttcattttcaaaagttagcattctccttttgaccgtccaagtcattatgaattc

SEQ ID NO: 34261 - DNA, 2188 bp, Homo sapiens
cgagggggagggcggagctgccggcggcccgggcgggctggcagctagagtgggtgcgatagccgcctccgcctctgcccgcctccgccgtcgcctcctccgcccgggccgttcgctgctgcgcggggagagcgaggcggggccgccggggccgccatggagcccgactcggtgattgaggacaagaccatcgagctcaataagtaatggaacatcatctgtgatcgtctccagaaagaggccatcagaaggaaactatcaaaaagaaaaagacttgtgtattaaatattttgaccagtggtctgaatcagatcaagtggaatttgtggaacatcttatttcacgaatgtgtcattatcagcatggacatattaactcttacctgaagcccatgttgcagcgggactttattaccgctttaccagagcaaggcttagatcacatagcagaaaacattctttcgtacctggatgccaggtctctgtgtgcagcagagctggtatgtaaagaatggcagcgagtgatctcagaaggaatgctttggaagaagctgattgaacgaatggtacgcactgatcccctatggaaaggactttcagaaagaagagggtgggatcagtacctgtttaaaaacagacccacagatggccctccaaattcattttataggtcattatacccaaagattatccaggatatagagactatagaatctaactggcggtgtggacgacacaacttgcagaggattcagtgccgctctgaaaatagtaaaggtgtctactgtttacagtacgatgatgaaaaaattatcagtggcctacgagataattctattaagatatgggataaaaccagcctggaatgtttgaaagtgttaacaggacacacaggctctgtcctctgtctgcagtatgatgagcgtgtcattgtaactggctcttcagattctacggtgagagtgtgggatgtgaacacgggtgaagttcttaacacattgatccaccacaatgaggctgtattgcacttacgcttcagcaatggactgatggtgacctgttccaaggaccgctccattgctgtgtgggacatggcttctgcgaccgacatcactttacgccgtgtcctggttggccaccgggctgccgtcaatgtagtagactttgacgacaagtacatcgtgtctgcctctggtgacaggaccatcaaagtctggagcacgagcacctgtgaatttgttcgtactctcaatgggcacaagcggggcattgcctgtctccagtacagggatcgcctggttgttagtggatcatcagataataccattaggctctgggatattgaatgtggtgcctgtttaagagtcctagagggacatgaagaattggtccgatgcatccggtttgataacaagaggattgtcagtggggcctatgatgggaaaattaaagtttgggacttgcaagctgctcttgaccctcgagccccagcaagcacattgtgtttgcgcacattggtggaacattctggacgtgtgtttcggctccagtttgatgagtttcagatcatcagcagctcccatgatgacactattttgatttgggatttcttaaatgtgcctcccagtgcccagaatgagacccattccccctccagaacatacacttacatctctagataacagtctgcactttcacccgtttccgggttttctagtcttgaactactggctacgtggctaccaaatgcctaagggagttcgttcacagctgagttatgaagctggaattggttctagacgctgggtagatgcaaagcagcctaactcttcaagtaccgacatttctcacctctgattccggctctcctttgagaaggagaccttagcttccccggcttgcaagtagaacagaagcccgtttccttccctcatcagtgaaaaaatctaatgtttcaaatgtaaattgttcatagaaaaggaacatagaatctgttttacagaagtaaatcgaccgtcaagagaagacttggcctctaatttatattgctttgcactttggtttgatattaagaaacagcattcttcttcagtgaaattttgggtgccaaacacctacccagaatgtccagggctttcattttcaaaagttagcattctccttttgaccgtccaagtcattatgaattc

SEQ ID NO: 34262 - DNA, 310 bp, Homo sapiens
aaaaggggagtttccctgcacaagcttctctctctttgcttgctgccattgcacgtaagatgtgacctgctcctccttgccttctgccgtgattatgaggcctccccagccatgtggaactaacacttcagttctggaagatcaagatgaagataagtccccaaagaaaaatactccttggcagataagtaatggaacatcatctgtgatcgtctccagaaagaggccatcagaaggaaactatcaaaaagaaaaagacttgtgtattaaatattttgaccagtggtctgaatcagatcaagtggaattt

SEQ ID NO: 34263 - DNA, 338 bp, Homo sapiens
tgaggattcagactaattctgtcctctaattcatttgataatctatcactgtgactaaaatataatggagatgacagatgcttatggataactattttgtgatattcatgtccctgagttggtatcagcaaattgctttttattagtagctaaataatactttggttcttccacgaaatgattaatctaagtagagccaaatgtggacttgcctgtgatgcagagcaacgaggtaatggaaagctcaggacttctcattatggtcttatttgtaccatgactctgcaactcttttccaaatatcagttatttgagccctctatgttcttgttattggt

SEQ ID NO: 34264 - DNA, 370 bp, Homo sapiens
ggcttgatggcatgcacgtgtgatcccagcaatctggggggctgaggcaggggaattgcttgacctagggaggtggaggttgcagtgagccaagatggcaccactgcactccagcctgggcaacagagcgagactccgtctcaaaaaacaacaacaagaacaacaacaaaaaaagcattatagccttgagtacgactttgtgctgaattctgtgggtctcagggatccccaacacaacatcaaatttgagaacatcctgagcaggtaggtaccttatgaagattttgatctctttcctactatgatctttctctgacatcatgagaatgctcagcaaaatgataatttaatctgttgtattctagataca

SEQ ID NO: 34265 - DNA, 381 bp, Homo sapiens
ctcccccatatttcagtctgaatgagtgacatcagattttattaaattgtacaagccagaaacttgataatcattttgaattgttttatttatccctcatgtccaatcaattgtcaagttatatcagtttcacctctagtattctccaaagttttttatatacatgggtattactttaggttaagctaagtcagtctgtgttgctataacaaaatacctaaaactgggtaatttataatgaacagagactcatttcttacagtctggaagctggaaagtccaatatcaacgtgccagcatcttgcgagggctttcttgttgtgacatcatatggcggaaagtgagagggcaggagagagcaagaagggactgaacttgccc

SEQ ID NO: 34266 - DNA, 221 bp, Homo sapiens
attatttccctgtggaatgagaaaatgctgtttataaaattgcccataagtacattttactttattaatacagtacaaagtaaatatacacctttgttaatgtcaatttgtagctggtagttactgatagttggtatatgggttcaaggcagaggttgcagtgagctgagatcatgccactgcacactccagcctaagcaacagagtgagactccatctca

SEQ ID NO: 34267 - DNA, 306 bp, Homo sapiens
tgtgctgggcagtcaattgcatatgtggaatttaatatatgataactctggttccctgtcaaaaagacagttgagtgcctagtacatcaggaacctaaaggaacctttgtcgtgagccacagggatgaggactagtctctaggtactaggtgttttgcttctattaataattatcctgatgtctgctgacagagcatggacctcagttttaggttctacctaccctctgcatacagacctgaaagtgattttacctcttccgttctcatgttccctaaagcatgggttagatgatacttatttcag

SEQ ID NO: 34268 - DNA, 139 bp, Homo sapiens
agacaggcggtatccttccatacccttccttggctcccaggacccacacctgttaaacatatgatgtgtctcatatgtggattctacccaagatcctacagaggaaagatttgctgggactgaggtacggtcctaaaga

SEQ ID NO: 34269 - DNA, 386 bp, Homo sapiens
ccttaattaccctccaaaggcaccaagtccaaatgccatcatacagggattggggtttcaacataggaattttgggaggatacaagcattcagtctatagtggtacaaaatcttggaatggtaaatttatgacctatagactccaccctttccttcttccaccacagctgatggtactaattgatcatggcaacttttcctttctgaactgaatggtgatcatacaaatctttgtgacccagcattttgagcaagcactaatgatagctcagtgctgacaggaagctctgccctctcctgtctgctctatgatgacaatgcctctatcagtcaattaactgatgacaaaatatgatacatttggtaataatcttggaggagctgag

SEQ ID NO: 34270 - DNA, 905 bp, Homo sapiens
ggggtttcaccgtgttagccaggacggtctcgatctcctgatctcgtgatctgcccgcttcggcctcccagagtgctgggattacaggcgtgagccaccgcgccctgcccacatcaaaaggttttaaatgcatcaagtggtataatgtcaccaaaaatcatttagtttatttttgtgtcctatgatctgtgagatgatgattcctaaatttacatttctagcccaggcctctcttctcagctctagagttatagacaggcatgccctgtttttttggcttcccaaatggtatgttttttgacaaatcaaaggtttgtggcaagcctgttgagccccatctgttgacaccattttttcaacagcatgttctcactttgtatctgtgtgtcacattttggtaattgttgtaatatttcagagcttttcattattattttatctgttatggtgattcatgatcattgatctttgatattactattgtaattgttttggcgtgccatgaactgtgcccacgtaagatggtgagcttaattgataaatgtatgttctgtctgctctacctactggctggtctcctatcttcctccctcctcctcaagcctccttctttcttgggacacagcaatattgaaattaggccaattaaaaaccttacagtgggacaggcgcagtggctaatgcctgtaatcccaacactttaggaggctgaggtgggcagatcactttgaggtcaggagtttgggactagcctggccagcatggtgaaaccatatctccaccaaaagtacaaaaaatagccaggtgtggtggcgggcacctgtagtcccaactacactccagcctggacaacagagggagactgttttaaaaaaaaacagaggcaggaggattgcctgaacctg

SEQ ID NO: 34271 - DNA, 538 bp, Homo sapiens
cagataaggccagaggaatagaaaagtatgctggcttaatttacattgttaataatatattatggaggaagtcaggttagtaaaatgtatgttgattgatgacttatactcattgtagaactgtgctttcattcataatacagtttgcttccaccatttgcatatcccacttcattgttagctaagtgtgtaaatttggatttaaatttaggtgtcaaaagcaaaaattcatgagtagtgatataactgtggactaaaatatagccactaaaaatctttgttttctttttaagattatttgatgacatagttgcatgctcgtactatgttgttgggtacaagggctaggttacagagtagaaaatgtatcatctgagttttgtgtaaaaaaaatttacatgtgtttgttctttttgggttgtggtgtgtgtgtacttacgcgaatgagaaaaaaggatagaaataaatggataagatattcagtgtttctggacagttttcaggttgtttatagtgaacattttaaatcagaaaaaca

SEQ ID NO: 34272 - DNA, 396 bp, Homo sapiens
tttttttgtatttttagtagagatggggtttcaccatgttggtcaggctggtctcgaatattcagctttgcccgtatattacacactttttattgctgggaacaataccatactgtgctgaactgaaaatttaacaggcagtatctacctacattctaacctttccatgtttaagtttctattggtgagtctgctttttgattgattagttctccaatttgctcaataagccccagtgttattttcaagtacattacagaggcttgagagaatttgtgtcagctcctaggtcttttcccttattgtggtatgtgccaggtaacagtattacctcctggagatgatcctgtgtttattaatccattgttcaaaactacattgtaagctatgcttgct

SEQ ID NO: 34273 - DNA, 340 bp, Homo sapiens
atatttaatttacttaaagctgtcatgcccaccaccctcccatagtgaaaaaccaaagaaaaggctaggcccagtggctcatgcctgtaatcccaacactttggggagccgaggtgggcagatcacttgagatcaggagtttgagaccagcctggccaacatggtgaaacctgtttctactaaaaatacaaaaattagctaagcttggtggtgcgcacctataatcctagctcctcgggaggctgaagcaggaggattgcttgaacctgagaggcagagtttgcagtgagccgagatagtgccactgcacttaagccttggtgacagggcaagactgtga

SEQ ID NO: 34274 - DNA, 406 bp, Homo sapiens
gttatcaatgacaatggtgcccgaaacttcattagcaattttaatttcgcctgggtcctgtggtcctgtgatctcgccctgcctccacttgccttgtgatattctattaccctgttaagtacttgatgtctgtcacccacacctatttgcacactccctccccttttgaaaatccctaataaaaacttgctggtttttgtggcttgtggggcatcacagatcctaccaacgtgtgatgtctcccccagatgcccagctttaaaatttctctcttttgtacactgtccctttatttctcaagccagccgacacttaggaaaatagaaaagaacctacgtgattatcggggcaggtcccccagtaagagtgagaccttgtctcaaaaacaaacagacaataattatgt

SEQ ID NO: 34275 - DNA, 381 bp, Homo sapiens
aaaaatatttttttttagcaaacagaactagcaggttcagtgttaccacacagctatagggttaaaattaacgtagtaatctaagcctatattttaaagggtttttcttctttcagtatgcacaatatatttcttgagtgatgtgagtttttagtagcattcaaaaaaaaatacttgcaaaaattctaccaaactagattttctgtcatctgccacccagctttcaatgtattcctgacactgaaatctgctggccagccgtctgacagatttcacccataggtagattccctattgttactgccactagttgggaaagtattattagtcataagcaatgcagaatcagagtcagtcttgccaagaactggaaccagaaag

SEQ ID NO: 34276 - DNA, 133 bp, Homo sapiens
cctgtattttaaaatgctttatttaaaagagaaattttattattaaaaggaacttggtttatattgaaataattattctaagaatattctggcatcaataataagaaatatggacatggtggatccatcccaa

SEQ ID NO: 34277 - DNA, 559 bp, Homo sapiens
cgctagtcatcacatggtaacaagtgacataaaatcctagtgatttacattaataaaggttcacttctttttcatgatacacaacagctagggtcagctccagctctattccatgtcttcattccagccttcgggctaaaggagcagctcttttctagaatatgctcttcttgtggtggctgtgggacataggaaatagaaccacatgatagttcttaaaccctctgcttgaacgtgtccatagcacttttgcatgtatttcattgactaacacaagttcaatggccaatgctgacataaacaggacatggaagtataatccccctacacaaaggtcaggaaataactgaggaacaatacgacaatctgccacatcaagtatctgaaatataccatatttttaatagtatatatagaatactgtatatctatgcagtatatatagaataccatatatccatgcagtatatatagaataatacaactggatctataatatgtgtatttatgtgtggagagatagatagatggaaacagatcgtgaagacagaaaaaaaga

SEQ ID NO: 34278 - DNA, 399 bp, Homo sapiens
aaaccttcaaatagttgggcgctaaacaacacacttgtaggtgattcgtgggtcaaagaagacctaagataaataaaaattgacattgagctgaattaacatacatatgacaacctacacatatacatacataacatatacatacatattactacaatataccacactttgtgggaaacagataaagcagtgctaaaagggaaatttgcagtagtaaacaaatacattggagaagaaaagtctcacataaataatctaagcttctaccacaaaaacctggcaaaaaagaagagcaaaataaacccaaagtaagcagaaggaagatacaataaagagcagaaatcaatgaaattaaaaatccgttagaagatcttaaatgttgtgtaaaatttagccaag

SEQ ID NO: 34279 - DNA, 811 bp, Homo sapiens
atgaaaacaatggctagaagcttcctatttccaggtgccccagaatcactggcatcagaaacctgctctaggcagcaagccttttgcaggatgctgttcctcaggagctgagaaagatttttctgtgccattttgaagtcctgaggctggttctctcaccagctttgtgctatgctggctgtgcctctaagccctttctggcttaatgtgtaatgtcttttacttttctgtttgtttgtttgttttttccttctaagcttttataagttttataaaaagtatctgtatgactattgggacttctcttttagttgtcaacggtgcctaaaaggactctcctcattccacctcccagcttttactctgtgtcaagagggtgtcaaacacatgctctacactagatcatgttccttttaaaaatcaaatgcacatagtaaagtagggggagaataactatgtaacggatgccaggctacacatcaggcaagggatttctatgtaaaggtatctattacttatatagaatacctagcacacctctaggtcttttgcatatttttattgttaatccttattgcagtccagcgtgtcggatattatggtcctgattgtgtccaggaaataagcttttcaacagcttatatactttgcctaagatcatacagcttgtatgtagcttgctggaaattttgaattcaggtttcttttctttttctttttctctcttctttaaaaaaaaaacctacagctttacagttgatattctttctattattattttattgctttctttatacacagttgacttcct

SEQ ID NO: 34280 - DNA, 599 bp, Homo sapiens
gcttaaaagtttcagtggcatagtcctactgtccttgtctgagctttaggcccatttgttttacctactcagtgtttatattgtgatgtcttactgcatttcaaactggacttgtccaacatgatcccgttctctttctagtactgtacacatcttgtcagcaagtgtatgcttctgtacagggtgaagtctgattctcatttgtgtcttcaatcactagagcagttgctggcatgtagtgggcattcagtaagtgcttattcattgcatgcattgaaaaataattgaaaggtttctcagagaccactgaggtttcttttaatggtgacataatcttttcttctgtgtcctcaagtatctgcttagtttttgctagattaggaatttgttacctcttaaggcagtccattctgtttttcaattatttctgatagtttttcctcacacacagttgcttctttgcatctccccatcatatatcttttggtgtgtacactcaggagttacacaggacaaacataattcctcttctgtaggatgatcttgcgaatacttgaagttggttgttacccactctaaccccacagttgtctgtttta

SEQ ID NO: 34281 - DNA, 438 bp, Homo sapiens
  misc_feature (349)..(349): n is a, c, g, or t
  misc_feature (417)..(417): n is a, c, g, or t
  misc_feature (430)..(430): n is a, c, g, or t
gtaattgaaacttggttctaagtttccctcttgtcccttcctgtttaatgcagtcagctgtcctcgaatttattttttggtggtactttgaatcagccccctgtgtgagaattcaacaaaaacgcaactgatacaaagcatctgcactgagtgctgcaggaggcttctcacatgctttgggatatcttcagggaaatacgctcttaatagaaactgagaatttaagaaagtctgcctgggcggaggacacctgcacttgttaccctgagttgattcctggaaacttcgggacccctgggtatttaacagagggacttcagtggggagctcctgggtcaggagggacttnggatgtttgttcatttacatttctaagttgaggactgttcccacattcatcttaggggaaaatgggtnggcccctgttccnttaaaagg

SEQ ID NO: 34282 - DNA, 308 bp, Homo sapiens
aaaaatagttacatcttttaattgcatgaacactgtctatatttaacatgtccaactatttaaatgacctaatattttatatttgccaatgcaagcatagcaactgtcaggcaacaagtactttttttttgtatttttagtagagtcagggtttcgcaatgttggccagactggtcttgaactcctgacctcaggtgatccacctgcctcggcctcccaaaatgctgggattacaggcttgagcaccacgcccagctccactctattttttaatatccctgggtagggcccagaaaaaaaggtcgacg

SEQ ID NO: 34283 - DNA, 286 bp, Homo sapiens
gatacctactgttctatgccacagcacttaatgtcagtgttctatggcatggcacttaatgtcagttttccaccccatctgtgaacgtgtattcaatcattatactgtatttagcctgagaatgaatatggaaaagaaaacaacactttcttcaggctttttgcaactttttaaaagcaaaacaggctccaattccccctcccaggagttttgtttgtatccaaagagaggacatgctcattgccatggaatccttaaaggactgagagggaagtgatctgtggca

SEQ ID NO: 34284 - DNA, 229 bp, Homo sapiens
aatcaaccagaaactaaaaccaagctcttcataagtgcatatgtgtaatctatagtgaaaaaatgcaataaataaaacaaattcatctctgctcattattcctggcagttcttaaagagtacatgatccatattttaacaaagtttaaatgtcaacattggtttcaaatttaattactattaattaccacatcaccaccaccataaaaaagtattcttgaattgcagtt

SEQ ID NO: 34285 - DNA, 538 bp, Homo sapiens
  misc_feature (521)..(521): n is a, c, g, or t
caaagctgtgggcaagattgaagttagaaatacacaaaactctaggttaagaagaaggcaatggagagtttggctcctgcaaagtaaaggaaactaaaagggctcacagtgggacagggatcaggagccaggttcatagcttgaaaccaggcactatagtgagattcccgtgttcatgaaggaaggctgaaaaaatgctaccaacagctgccaggaacaagaacttatatagaactgttgataaatagaagcaaaagaaaacaggcaaggattgctggcaagatggccaaataggaacagctctggtctgcagctcccagcaagatcctcgcagaaggcagatgatttctgcatgtccaactgaggtacctggttcatctcattgggactggttggacagtgggtgcagcccatggaaggcgagccgaagcagggtggggggtcacctcacctgggaagcacaaagggtcagggaatgtttccccctacccaggggaagccatgagggactgagccccttntagtttcctttactttg

SEQ ID NO: 34286 - DNA, 461 bp, Homo sapiens
ctcccaagtaggagggactacaggtgcccatcaccacacccagctaaaccttgggttatttccataaactacttgtgtttcagatatttggaatattttccaagaacattttaaaaaataaagaatgatcctgtatgaaattactaggactattttgatgtgctgtttctcttgtttttatttttgacactgcaaaagatgtaactaaaggtatttaaattaaatcacgaataaaaactagatttttcctttgcctccatcttgctcaaatctgtttatccttttcagaaattagcagttttcccatgtcctgaagctgatttgtctcagaaatgtagatagctaataggctcatccactaaggaagagaattttgttttgttttgttttgagacagagtcttgctccgtcacccaggctggagttcaggtacagtggcagggtctcagctcactgcaacc

SEQ ID NO: 34287 - DNA, 250 bp, Homo sapiens
ttacttttacaccataaactccagctgcctcattacctcactcaagacaaaaagatcactggaaagaaatgtaaaagctttcaaggtactgttttctctgaagggtttgggactttccactttttggagttttttttttttatagtagtaactgatgcatcagatactatattaggtaaagaattataagaagaacataaaaaacgtgaaactctcagatgagagttctctagtagaaaattgttagctg

SEQ ID NO: 34288 - DNA, 999 bp, Homo sapiens
  misc_feature (307)..(307): n is a, c, g, or t
atggtgaactccacccaccgtgggatgcacacttctctgcacctctggaaccgcagcagttacagactgcacagcaatgccagtgagtcccttggaaaaggctactctgatggagggtgctacgagcaactttttgtctctcctgaggtgtttgtgactctgggtgtcatcagcttgttggagaatatcttagtgattgtggcaatagccaagaacaagaatctgcattcacccatgtactttttcatctgcagcttggctgtggctgatatgctggtgagcgtttcaaatggatcagaaaccattntcatcaccctattaaacagtacagatacggatgcacagagtttcacagtgaatattgataatgtcattgactcggtgatctgtagctccttgcttgcatccatttgcagcctgctttcaattgcagtggacaggtactttactatcttctatgctctccagtaccataacattatgacagttaagcgggttgggatcatcataagttgtatctgggcagcttgcacggtttcaggcattttgttcatcatttactcagatagtagtgctgtcatcatctgcctcatcaccatgttcttcaccatgctggctctcatggcttctctctatgtccacatgttcctgatggccaggcttcacattaagaggattgctgtcctccccggcactggtgccatccgccaaggtgccaatatgaagggagcgattaccttgaccatcctgattggcgtctttgttgtctgctgggccccattcttcctccacttaatattctacatctcttgtcctcagaatccatattgtgtgtgcttcatgtctcactttaacttgtatctcatactgatcatgtgtaattcaatcatcgatcctctgatttatgcactccggagtcaagaactgaggaaaaccttcaaagagatcatctgttgctatcccctgggaggcctttgtgacttgtctagcagatattaa

SEQ ID NO: 34289 - DNA, 929 bp, Homo sapiens
agctggtacatccatcaccactgacgggcctggcctggaaacctggtttgtcccctgtcttgatggcctacgagaggccaagttccactgggctgggaaaagtcactttgtctgtcttgttcacctggagcctgacacaccgtaggtactgagtacaaatagcttgatttggctaggcttggctgcagggggacgtgcctaaaagacattccgggcatttgcacttgggaaacttgcctcaccttcaggcttgtggggcctctctatgcccagtgagtccaggcagtcctagcaagtactcaggagagcaggggtgggtgtgacagaggctggctctggattgggggacaacagaaccagagtaactcctcgcctgttgctgctttgcaatgaatttcctttacctttctggaacacaagctgctgtgaaccaaactgatatcaagtgattagctcaccgggccttggttgcttttcaaagatccccttcagccccctgccagagtcactgccccataatcaccatgtcagaagggaccctagggcattcgtgtcctatttatcaatcttcagcaccacctctaagatctctgagagagggtggatcagcctctgtgtaaacaaaaagctgttaggacttgttgcctctcaaggtggactattctgttttctgccaggacactgccattcatgcattgtcagatatttattaaacagcagcaaagtgccagccaatttgtcctggaggaattcatagcctcatggggcaaaagtaaataaacagcttattacaattcaaaaaaaaaaagggggggctctaaattcccgggggccaaattacgtccccgtttgtaaagggccaaggggttaaaaagacgcgcgtaacacgatgggacggcctggttgggacccttggggatggcacccca

SEQ ID NO: 34290 - DNA, 3373 bp, Homo sapiens
tgggggaggacgaggggcgcgtggttttcccatctcatccctggaggaggggctggagcatccccggcagccaatcagggacaggctgggggggggaccgctttgaagaagtttgggggaaaaaagtttggaaaagtttctataataacgagggggcttctggagggaggcggcagcgacggaggagggggcttctcagagaaagggagggagggagccacccgggtgaagatacagcagcctcctgaactcccccctcccacccaggccgggacctgggggctcctgccggatccatgggggcggccagctgcgaggatgaggagctggaatttaagctggtgttcggggaggaaaaggaggcccccccgctgggcgcggggggattgggggaagaactggactcagaggatgccccgccatgctgccgtctggccttgggagagccccctccctatggcgctgcacctatcggtattccccgacctccaccccctcggcctggcatgcattcgccaccgccgcgaccagccccctcacctggcacctgggagagccagcccgccaggtcggtgaggctgggaggaccaggagggggtgctgggggtgctgggggtggccgtgttctcgagtgtcccagcatccgcatcacctccatctctcccacgccggagccgccagcagcgctggaggacaaccctgatgcctggggggacggctctcctagagattaccccccaccagaaggctttgggggctacagagaagcaggggcccagggtgggggggccttcttcagcccaagccctggcagcagcagcctgtcctcgtggagcttcttctccgatgcctctgacgaggcagccctgtatgcagcctgcgacgaggtggagtctgagctaaatgaggcggcctcccgctttggcctgggctccccgctgccctcgccccgggcctcccctcggccatggacccccgaagatccctggagcctgtatggtccaagccccggaggccgagggccagaggatagctggctactcctcagtgctcctgggcccaccccagcctccccgcggcctgcctctccatgtggcaagcggcgctattccagctcgggaaccccatcttcagcctccccagctctgtcccgccgtggcagcctgggggaagaggggtctgagccacctccaccacccccattgcctctggcccgggacccgggctcccctggtccctttgactatgtgggggccccaccagctgagagcatccctcagaagacacggcggacttccagcgagcaggcagtggctctgcctcggtctgaggagcctgcctcatgcaatgggaagctgcccttgggagcagaggagtctgtggctcctccaggaggttcccggaaggaggtggctggcatggactacctggcagtgccctccccactcgcttggtccaaggcccggattgggggacacagccctatcttcaggacctctgccctacccccactggactggcctctgcccagccaatatgagcagctggagctgaggatcgaggtacagcctagagcccaccaccgggcccactatgagacagaaggcagccgtggagctgtcaaagctgcccctggcggtcaccccgtagtcaagctcctaggctacagtgagaagccactgaccctacagatgttcatcggcactgcagatgaaaggaacctgcggcctcatgccttctatcaggtgcaccgtatcacaggcaagatggtggccacggccagctatgaagccgtagtcagtggcaccaaggtgttggagatgactctgctgcctgagaacaacatggcggccaacattgactgcgcgggaatcctgaagcttcggaattcagacattgagcttcggaagggtgagacggacatcgggcgcaaaaacacacgtgtacggctggtgttccgggtacacgtgccccagggcggcgggaaggtcgtctcagtacaggcagcatcggtgcccatcgagtgctcccagcgctcagcccaggagctgccccaggtggaggcctacagccccagtgcctgctctgtgagaggaggcgaggaactggtactgaccggctccaacttcctgccagactccaaggtggtgttcattgagaggggtcctgatgggaagctgcaatgggaggaggaggccacagtgaaccgactgcagagcaacgaggtgacgctgaccctgactgtccccgagtacagcaacaagagggtttcccggccagtccaggtctacttttatgtctccaatgggcggaggaaacgcagtcctacccagagtttcaggtttctgcctgtgatctgcaaagaggagcccctaccggactcatctctgcggggtttcccttcagcatcggcaaccccctttggcactgacatggacttctcaccacccaggcccccctacccctcctatccccatgaagaccctgcttgcgaaactccttacctatcagaaggcttcggctatggcatgccccctctgtacccccagacggggcccccaccatcctacagaccgggcctgcggatgttccctgagactaggggtaccacaggttgtgcccaaccacctgcagtttccttccttccccgccccttccctagtgacccgtatggagggcggggctcctctttccccctggggctgccattctctccgccagccccctttcggccgcctcctcttcctgcatccccaccgcttgaaggccccttcccttcccagagtgatgtgcatcccctacctgctgagggatacaataaggtagggccaggctatggccctggggagggggctccggagcaggagaaatccaggggtggctacagcagcggcttccgagacagtgtccctatccagggtatcacgctggaggaagtgagtgagatcattggccgagacctgagtggcttccctgcacctcctggagaagagcctcctgcctgaaccacgtgaactgtcatcacctggcaaccccagccccagcctcagccctgccccctttccctccttcctggagtggtggctacagaagcttggggccaaccctggctcctctttccccagcttctgtctgtctcactgtcttccctcccctcccccagctgaggtgtggccctcaggcctggtgctgccttggagggctgggggaaggagtgtgtggaggagggaggagggtgaagactgaggctaggtgccagaatggactggagtgaaggcgtgtctagagtgtgggctggctgttgtgctggaaagctggggacaggttgatggtaataaactgctcaatgaccagtgaaaaaaaaaaccagagc

SEQ ID NO: 34291 - DNA, 3056 bp, Homo sapiens
ggccacggttgcgatggcaactggggctcctgccagcgccgtttgggggtttgggaaccgctgctaattgggttcatgtaactggactcagaggatgccccgccatgctgccgtctggccttgggagagccccctccctatggcgctgcacctatcggtattccccgacctccaccccctcggcctggcatgcattcgccaccgccgcgaccagccccctcacctggcacctgggagagccagcccgccaggtcggtgaggctgggaggaccaggagggggtgctgggggtgctgggggtggccgtgttctcgagtgtcccagcatccgcatcacctccatctctcccacgccggagccgccagcagcgctggaggacaaccctgatgcctggggggacggctctcctagagattaccccccaccagaaggctttgggggctacagagaagcaggggcccagggtgggggggccttcttcagcccaagccctggcagcagcagcctgtcctcgtggagcttcttctccgatgcctctgacgaggcagccctgtatgcagcctgcgacgaggtggagtctgagctaaatgaggcggcctcccgctttggcctgggctccccgctgccctcgccccgggcctcccctcggccatggacccccgaagatccctggagcctgtatggtccaagccccggaggccgagggccagaggatagctggctactcctcagtgctcctgggcccaccccagcctccccgcggcctgcctctccatgtggcaagcggcgctattccagctcgggaaccccatcttcagcctccccagctctgtcccgccgtggcagcctgggggaagaggggtctgagccacctccaccacccccattgcctctggcccgggacccgggctcccctggtccctttgactatgtgggggccccaccagctgagagcatccctcagaagacacggcggacttccagcgagcaggcagtggctctgcctcggtctgaggagcctgcctcatgcaatgggaagctgcccttgggagcagaggagtctgtggctcctccaggaggttcccggaaggaggtggctggcatggactacctggcagtgccctccccactcgcttggtccaaggcccggattgggggacacagccctatcttcaggacctctgccctacccccactggactggcctctgcccagccaatatgagcagctggagctgaggatcgaggtacagcctagagcccaccaccgggcccactatgagacagaaggcagccgtggagctgtcaaagctgcccctggcggtcaccccgtagtcaagctcctaggctacagtgagaagccactgaccctacagatgttcatcggcactgcagatgaaaggaacctgcggcctcatgccttctatcaggtgcaccgtatcacaggcaagatggtggccacggccagctatgaagccgtagtcagtggcaccaaggtgttggagatgactctgctgcctgagaacaacatggcggccaacattgactgcgcgggaatcctgaagcttcggaattcagacattgagcttcggaagggtgagacggacatcgggcgcaaaaacacacgtgtacggctggtgttccgggtacacgtgccccagggcggcgggaaggtcgtctcagtacaggcagcatcggtgcccatcgagtgctcccagcgctcagcccaggagctgccccaggtggaggcctacagccccagtgcctgctctgtgagaggaggcgaggaactggtactgaccggctccaacttcctgccagactccaaggtggtgttcattgagaggggtcctgatgggaagctgcaatgggaggaggaggccacagtgaaccgactgcagagcaacgaggtgacgctgaccctgactgtccccgagtacagcaacaagagggtttcccggccagtccaggtctacttttatgtctccaatgggcggaggaaacgcagtcctacccagagtttcaggtttctgcctgtgatctgcaaagaggagcccctaccggactcatctctgcggggtttcccttcagcatcggcaaccccctttggcactgacatggacttctcaccacccaggcccccctacccctcctatccccatgaagaccctgcttgcgaaactccttacctatcagaaggcttcggctatggcatgccccctctgtacccccagacggggcccccaccatcctacagaccgggcctgcggatgttccctgagactaggggtaccacaggttgtgcccaaccacctgcagtttccttccttccccgccccttccctagtgacccgtatggagggcggggctcctctttccccctggggctgccattctctccgccagccccctttcggccgcctcctcttcctgcatccccaccgcttgaaggccccttcccttcccagagtgatgtgcatcccctacctgctgagggatacaataaggtagggccaggctatggccctggggagggggctccggagcaggagaaatccaggggtggctacagcagcggcttccgagacagtgtccctatccagggtatcacgctggaggaagtgagtgagatcattggccgagacctgagtggcttccctgcacctcctggagaagagcctcctgcctgaaccacgtgaactgtcatcacctggcaaccccagccccagcctcagccctgccccctttccctccttcctggagtggtggctacagaagcttggggccaaccctggctcctctttccccagcttctgtctgtctcactgtcttccctcccctcccccagctgaggtgtggccctcaggcctggtgctgccttggagggctgggggaaggagtgtgtggaggagggaggagggtgaagactgaggctaggtgccagaatggactggagtgaaggcgtgtctagagtgtgggctggctgttgtgctggaaagctggggacaggttgatggtaataaactgctcaatgaccagtgaaaaaaaaaaccagagc

SEQ ID NO: 34292 - DNA, 4132 bp, Homo sapiens
tgggggaggacgaggggcgcgtggttttcccatctcatccctggaggaggggctggagcatccccggcagccaatcagggacaggctgggggggggaccgctttgaagaagtttgggggaaaaaagtttggaaaagtttctataataacgagggggcttctggagggaggcggcagcgacggaggagggggcttctcagagaaagggagggagggagccacccgggtgaagatacagcagcctcctgaactcccccctcccacccaggccgggacctgggggctcctgccggatccatgggggcggccagctgcgaggatgaggagctggaatttaagctggtgttcggggaggaaaaggaggcccccccgctgggcgcggggggattgggggaagaactggactcagaggatgccccgccatgctgccgtctggccttgggagagccccctccctatggcgctgcacctatcggtattccccgacctccaccccctcggcctggcatgcattcgccaccgccgcgaccagccccctcacctggcacctgggagagccagcccgccaggtcggtgaggctgggaggaccaggagggggtgctgggggtgctgggggtggccgtgttctcgagtgtcccagcatccgcatcacctccatctctcccacgccggagccgccagcagcgctggaggacaaccctgatgcctggggggacggctctcctagagattaccccccaccagaaggctttgggggctacagagaagcaggggcccagggtgggggggccttcttcagcccaagccctggcagcagcagcctgtcctcgtggagcttcttctccgatgcctctgacgaggcagccctgtatgcagcctgcgacgaggtggagtctgagctaaatgaggcggcctcccgctttggcctgggctccccgctgccctcgccccgggcctcccctcggccatggacccccgaagatccctggagcctgtatggtccaagccccggaggccgagggccagaggatagctggctactcctcagtgctcctgggcccaccccagcctccccgcggcctgcctctccatgtggcaagcggcgctattccagctcgggaaccccatcttcagcctccccagctctgtcccgccgtggcagcctgggggaagaggggtctgagccacctccaccacccccattgcctctggcccgggacccgggctcccctggtccctttgactatgtgggggccccaccagctgagagcatccctcagaagacacggcggacttccagcgagcaggcagtggctctgcctcggtctgaggagcctgcctcatgcaatgggaagctgcccttgggagcagaggagtctgtggctcctccaggaggttcccggaaggaggtggctggcatggactacctggcagtgccctccccactcgcttggtccaaggcccggattgggggacacagccctatcttcaggacctctgccctacccccactggactggcctctgcccagccaatatgagcagctggagctgaggatcgaggtacagcctagagcccaccaccgggcccactatgagacagaaggcagccgtggagctgtcaaagctgcccctggcggtcaccccgtagtcaagctcctaggctacagtgagaagccactgaccctacagatgttcatcggcactgcagatgaaaggaacctgcggcctcatgccttctatcaggtgcaccgtatcacaggcaagatggtggccacggccagctatgaagccgtagtcagtggcaccaaggtgttggagatgactctgctgcctgagaacaacatggcggccaacattgactgcgcgggaatcctgaagcttcggaattcagacattgagcttcggaagggtgagacggacatcgggcgcaaaaacacacgtgtacggctggtgttccgggtacacgtgccccagggcggcgggaaggtcgtctcagtacaggcagcatcggtgcccatcgagtgctcccagcgctcagcccaggagctgccccaggtggaggcctacagccccagtgcctgctctgtgagaggaggcgaggaactggtactgaccggctccaacttcctgccagactccaaggtggtgttcattgagaggggtcctgatgggaagctgcaatgggaggaggaggccacagtgaaccgactgcagagcaacgaggtgacgctgaccctgactgtccccgagtacagcaacaagagggtttcccggccagtccaggtctacttttatgtctccaatgggcggaggaaacgcagtcctacccagagtttcaggtttctgcctgtgatctgcaaagaggagcccctaccggactcatctctgcggggtttcccttcagcatcggcaaccccctttggcactgacatggacttctcaccacccaggcccccctacccctcctatccccatgaagaccctgcttgcgaaactccttacctatcagaaggcttcggctatggcatgccccctctgtacccccagacggggcccccaccatcctacagaccgggcctgcggatgttccctgagactaggggtaccacaggttgtgcccaaccacctgcagtttccttccttccccgccccttccctagtgacccgtatggagggcggggctcctctttccccctggggctgccattctctccgccagccccctttcggccgcctcctcttcctgcatccccaccgcttgaaggccccttcccttcccagagtgatgtgcatcccctacctgctgagggatacaataaggtagggccaggctatggccctggggagggggctccggagcaggagaaatccaggggtggctacagcagcggcttccgagacagtgtccctatccagggtatcacgctggaggaaggtgggtgtgggactgggggctgtgagtgtgagtgtgtgcaagagattgctctgcatgtttgctgagggctggagctgggcttttcagagatcgggcatccctggtctctcagggccagttggaggttcccaggaggcatgttcttgatgcctgtggctgcctgaatccaattaactgaattctgaagagtgcatggggtaactgtctcagcctttctcctgtctctgcctctgtcctctgctccaaatcataaaatctcagagctagaagcactttcaagatcattccatccagcgcattcaatttgcaagtttaggcgttgagttccagagagggatggtagcttgctgaggtcccagtcaagcacacttgccattgcctcagctttcccctaaacacggtgtctgtggtcagggttggtgaggaggagctttcctgttttgcctctccttcttcccattggctacacccatctctggccctgctgataccgattcccctgacatttcaggctaagccagcaggaaagggctaggacgggtgcctgggagcccacatggagggagttgggcaagatttgattcggagcaggtgtcaagacgtgttggggaaactgaggcccagtggaatagaagccagtagaggaggaatctagaggcctcctagattaaggcctgcctggaatggattgggggtgggtctttggaaaaggaggggacccacctctagcccagtctctcaactgcccctcctttacagtgagtgagatcattggccgagacctgagtggcttccctgcacctcctggagaagagcctcctgcctgaaccacgtgaactgtcatcacctggcaaccccagccccagcctcagccctgccccctttccctccttcctggagtggtggctacagaagcttggggccaaccctggctcctctttccccagcttctgtctgtctcactgtcttccctcccctcccccagctgaggtgtggccctcaggcctggtgctgccttggagggctgggggaaggagtgtgtggaggagggaggagggtgaagactgaggctaggtgccagaatggactggagtgaaggcgtgtctagagtgtgggctggctgttgtgctggaaagctggggacaggttgatggtaataaactgctcaatgaccagtgaaaaaaaaaaccagagc

SEQ ID NO: 34293 - DNA, 3473 bp, Homo sapiens
tgggggaggacgaggggcgcgtggttttcccatctcatccctggaggaggggctggagcatccccggcagccaatcagggacaggctgggggggggaccgctttgaagaagtttgggggaaaaaagtttggaaaagtttctataataacgagggggcttctggagggaggcggcagcgacggaggagggggcttctcagagaaagggagggagggagccacccgggtgaagatacagcagcctcctgaactcccccctcccacccaggccgggacctgggggctcctgccggatccatgggggcggccagctgcgaggatgaggagctggagcctgtatggtccaagccccggaggccgagggccagaggatagctggctactcctcagtgctcctgggcccaccccagcctccccgcggcctgcctctccatgtggcaagcggcgctattccagctcgggaaccccatcttcagcctccccagctctgtcccgccgtggcagcctgggggaagaggggtctgagccacctccaccacccccattgcctctggcccgggacccgggctcccctggtccctttgactatgtgggggccccaccagctgagagcatccctcagaagacacggcggacttccagcgagcaggcagtggctctgcctcggtctgaggagcctgcctcatgcaatgggaagctgcccttgggagcagaggagtctgtggctcctccaggaggttcccggaaggaggtggctggcatggactacctggcagtgccctccccactcgcttggtccaaggcccggattgggggacacagccctatcttcaggacctctgccctacccccactggactggcctctgcccagccaatatgagcagctggagctgaggatcgaggtacagcctagagcccaccaccgggcccactatgagacagaaggcagccgtggagctgtcaaagctgcccctggcggtcaccccgtagtcaagctcctaggctacagtgagaagccactgaccctacagatgttcatcggcactgcagatgaaaggaacctgcggcctcatgccttctatcaggtgcaccgtatcacaggcaagatggtggccacggccagctatgaagccgtagtcagtggcaccaaggtgttggagatgactctgctgcctgagaacaacatggcggccaacattgactgcgcgggaatcctgaagcttcggaattcagacattgagcttcggaagggtgagacggacatcgggcgcaaaaacacacgtgtacggctggtgttccgggtacacgtgccccagggcggcgggaaggtcgtctcagtacaggcagcatcggtgcccatcgagtgctcccagcgctcagcccaggagctgccccaggtggaggcctacagccccagtgcctgctctgtgagaggaggcgaggaactggtactgaccggctccaacttcctgccagactccaaggtggtgttcattgagaggggtcctgatgggaagctgcaatgggaggaggaggccacagtgaaccgactgcagagcaacgaggtgacgctgaccctgactgtccccgagtacagcaacaagagggtttcccggccagtccaggtctacttttatgtctccaatgggcggaggaaacgcagtcctacccagagtttcaggtttctgcctgtgatctgcaaagaggagcccctaccggactcatctctgcggggtttcccttcagcatcggcaaccccctttggcactgacatggacttctcaccacccaggcccccctacccctcctatccccatgaagaccctgcttgcgaaactccttacctatcagaaggcttcggctatggcatgccccctctgtacccccagacggggcccccaccatcctacagaccgggcctgcggatgttccctgagactaggggtaccacaggttgtgcccaaccacctgcagtttccttccttccccgccccttccctagtgacccgtatggagggcggggctcctctttccccctggggctgccattctctccgccagccccctttcggccgcctcctcttcctgcatccccaccgcttgaaggccccttcccttcccagagtgatgtgcatcccctacctgctgagggatacaataaggtagggccaggctatggccctggggagggggctccggagcaggagaaatccaggggtggctacagcagcggcttccgagacagtgtccctatccagggtatcacgctggaggaaggtgggtgtgggactgggggctgtgagtgtgagtgtgtgcaagagattgctctgcatgtttgctgagggctggagctgggcttttcagagatcgggcatccctggtctctcagggccagttggaggttcccaggaggcatgttcttgatgcctgtggctgcctgaatccaattaactgaattctgaagagtgcatggggtaactgtctcagcctttctcctgtctctgcctctgtcctctgctccaaatcataaaatctcagagctagaagcactttcaagatcattccatccagcgcattcaatttgcaagtttaggcgttgagttccagagagggatggtagcttgctgaggtcccagtcaagcacacttgccattgcctcagctttcccctaaacacggtgtctgtggtcagggttggtgaggaggagctttcctgttttgcctctccttcttcccattggctacacccatctctggccctgctgataccgattcccctgacatttcaggctaagccagcaggaaagggctaggacgggtgcctgggagcccacatggagggagttgggcaagatttgattcggagcaggtgtcaagacgtgttggggaaactgaggcccagtggaatagaagccagtagaggaggaatctagaggcctcctagattaaggcctgcctggaatggattgggggtgggtctttggaaaaggaggggacccacctctagcccagtctctcaactgcccctcctttacagtgagtgagatcattggccgagacctgagtggcttccctgcacctcctggagaagagcctcctgcctgaaccacgtgaactgtcatcacctggcaaccccagccccagcctcagccctgccccctttccctccttcctggagtggtggctacagaagcttggggccaaccctggctcctctttccccagcttctgtctgtctcactgtcttccctcccctcccccagctgaggtgtggccctcaggcctggtgctgccttggagggctgggggaaggagtgtgtggaggagggaggagggtgaagactgaggctaggtgccagaatggactggagtgaaggcgtgtctagagtgtgggctggctgttgtgctggaaagctggggacaggttgatggtaataaactgctcaatgaccagtgaaaaaaaaaaccagagc

SEQ ID NO: 34294 - DNA, 2531 bp, Homo sapiens
aaaggatgagacggtggggatttcaatgaggtggccgctctctccctctgccagctcctaggctacagtgagaagccactgaccctacagatgttcatcggcactgcagatgaaaggaacctgcggcctcatgccttctatcaggtgcaccgtatcacaggcaagatggtggccacggccagctatgaagccgtagtcagtggcaccaaggtgttggagatgactctgctgcctgagaacaacatggcggccaacattgactgcgcgggaatcctgaagcttcggaattcagacattgagcttcggaagggtgagacggacatcgggcgcaaaaacacacgtgtacggctggtgttccgggtacacgtgccccagggcggcgggaaggtcgtctcagtacaggcagcatcggtgcccatcgagtgctcccagcgctcagcccaggagctgccccaggtggaggcctacagccccagtgcctgctctgtgagaggaggcgaggaactggtactgaccggctccaacttcctgccagactccaaggtggtgttcattgagaggggtcctgatgggaagctgcaatgggaggaggaggccacagtgaaccgactgcagagcaacgaggtgacgctgaccctgactgtccccgagtacagcaacaagagggtttcccggccagtccaggtctacttttatgtctccaatgggcggaggaaacgcagtcctacccagagtttcaggtttctgcctgtgatctgcaaagaggagcccctaccggactcatctctgcggggtttcccttcagcatcggcaaccccctttggcactgacatggacttctcaccacccaggcccccctacccctcctatccccatgaagaccctgcttgcgaaactccttacctatcagaaggcttcggctatggcatgccccctctgtacccccagacggggcccccaccatcctacagaccgggcctgcggatgttccctgagactaggggtaccacaggttgtgcccaaccacctgcagtttccttccttccccgccccttccctagtgacccgtatggagggcggggctcctctttccccctggggctgccattctctccgccagccccctttcggccgcctcctcttcctgcatccccaccgcttgaaggccccttcccttcccagagtgatgtgcatcccctacctgctgagggatacaataaggtagggccaggctatggccctggggagggggctccggagcaggagaaatccaggggtggctacagcagcggcttccgagacagtgtccctatccagggtatcacgctggaggaaggtgggtgtgggactgggggctgtgagtgtgagtgtgtgcaagagattgctctgcatgtttgctgagggctggagctgggcttttcagagatcgggcatccctggtctctcagggccagttggaggttcccaggaggcatgttcttgatgcctgtggctgcctgaatccaattaactgaattctgaagagtgcatggggtaactgtctcagcctttctcctgtctctgcctctgtcctctgctccaaatcataaaatctcagagctagaagcactttcaagatcattccatccagcgcattcaatttgcaagtttaggcgttgagttccagagagggatggtagcttgctgaggtcccagtcaagcacacttgccattgcctcagctttcccctaaacacggtgtctgtggtcagggttggtgaggaggagctttcctgttttgcctctccttcttcccattggctacacccatctctggccctgctgataccgattcccctgacatttcaggctaagccagcaggaaagggctaggacgggtgcctgggagcccacatggagggagttgggcaagatttgattcggagcaggtgtcaagacgtgttggggaaactgaggcccagtggaatagaagccagtagaggaggaatctagaggcctcctagattaaggcctgcctggaatggattgggggtgggtctttggaaaaggaggggacccacctctagcccagtctctcaactgcccctcctttacagtgagtgagatcattggccgagacctgagtggcttccctgcacctcctggagaagagcctcctgcctgaaccacgtgaactgtcatcacctggcaaccccagccccagcctcagccctgccccctttccctccttcctggagtggtggctacagaagcttggggccaaccctggctcctctttccccagcttctgtctgtctcactgtcttccctcccctcccccagctgaggtgtggccctcaggcctggtgctgccttggagggctgggggaaggagtgtgtggaggagggaggagggtgaagactgaggctaggtgccagaatggactggagtgaaggcgtgtctagagtgtgggctggctgttgtgctggaaagctggggacaggttgatggtaataaactgctcaatgaccagtgaaaaaaaaaaccagagc

SEQ ID NO: 34295 - DNA, 2307 bp, Homo sapiens
ctgtttaaccctctctctgctctgggagcggccccttacatggtgtatgtgactccatggatattactggtttatttgtgtgtctactgctgaggagggctccctcagagccctgtggcagttttcccaaagagggtggggacagaggaggccacccctccatgcccagcccagccagtcctcttccttgcactgctctgcagcccagcgctcagcccaggagctgccccaggtggaggcctacagccccagtgcctgctctgtgagaggaggcgaggaactggtactgaccggctccaacttcctgccagactccaaggtggtgttcattgagaggggtcctgatgggaagctgcaatgggaggaggaggccacagtgaaccgactgcagagcaacgaggtgacgctgaccctgactgtccccgagtacagcaacaagagggtttcccggccagtccaggtctacttttatgtctccaatgggcggaggaaacgcagtcctacccagagtttcaggtttctgcctgtgatctgcaaagaggagcccctaccggactcatctctgcggggtttcccttcagcatcggcaaccccctttggcactgacatggacttctcaccacccaggcccccctacccctcctatccccatgaagaccctgcttgcgaaactccttacctatcagaaggcttcggctatggcatgccccctctgtacccccagacggggcccccaccatcctacagaccgggcctgcggatgttccctgagactaggggtaccacaggttgtgcccaaccacctgcagtttccttccttccccgccccttccctagtgacccgtatggagggcggggctcctctttccccctggggctgccattctctccgccagccccctttcggccgcctcctcttcctgcatccccaccgcttgaaggccccttcccttcccagagtgatgtgcatcccctacctgctgagggatacaataaggtagggccaggctatggccctggggagggggctccggagcaggagaaatccaggggtggctacagcagcggcttccgagacagtgtccctatccagggtatcacgctggaggaaggtgggtgtgggactgggggctgtgagtgtgagtgtgtgcaagagattgctctgcatgtttgctgagggctggagctgggcttttcagagatcgggcatccctggtctctcagggccagttggaggttcccaggaggcatgttcttgatgcctgtggctgcctgaatccaattaactgaattctgaagagtgcatggggtaactgtctcagcctttctcctgtctctgcctctgtcctctgctccaaatcataaaatctcagagctagaagcactttcaagatcattccatccagcgcattcaatttgcaagtttaggcgttgagttccagagagggatggtagcttgctgaggtcccagtcaagcacacttgccattgcctcagctttcccctaaacacggtgtctgtggtcagggttggtgaggaggagctttcctgttttgcctctccttcttcccattggctacacccatctctggccctgctgataccgattcccctgacatttcaggctaagccagcaggaaagggctaggacgggtgcctgggagcccacatggagggagttgggcaagatttgattcggagcaggtgtcaagacgtgttggggaaactgaggcccagtggaatagaagccagtagaggaggaatctagaggcctcctagattaaggcctgcctggaatggattgggggtgggtctttggaaaaggaggggacccacctctagcccagtctctcaactgcccctcctttacagtgagtgagatcattggccgagacctgagtggcttccctgcacctcctggagaagagcctcctgcctgaaccacgtgaactgtcatcacctggcaaccccagccccagcctcagccctgccccctttccctccttcctggagtggtggctacagaagcttggggccaaccctggctcctctttccccagcttctgtctgtctcactgtcttccctcccctcccccagctgaggtgtggccctcaggcctggtgctgccttggagggctgggggaaggagtgtgtggaggagggaggagggtgaagactgaggctaggtgccagaatggactggagtgaaggcgtgtctagagtgtgggctggctgttgtgctggaaagctggggacaggttgatggtaataaactgctcaatgaccagtgaaaaaaaaaaccagagc

SEQ ID NO: 34296 - DNA, 3040 bp, Homo sapiens
tgggggaggacgaggggcgcgtggttttcccatctcatccctggaggaggggctggagcatccccggcagccaatcagggacaggctgggggggggaccgctttgaagaagtttgggggaaaaaagtttggaaaagtttctataataacgagggggcttctggagggaggcggcagcgacggaggagggggcttctcagagaaagggagggagggagccacccgggtgaagatacagcagcctcctgaactcccccctcccacccaggccgggacctgggggctcctgccggatccatgggggcggccagctgcgaggatgaggagctggaatttaagctggtgttcggggaggaaaaggaggcccccccgctgggcgcggggggattgggggaagaactggactcagaggatgccccgccatgctgccgtctggccttgggagagccccctccctatggcgctgcacctatcggtattccccgacctccaccccctcggcctggcatgcattcgccaccgccgcgaccagccccctcacctggcacctgggagagccagcccgccaggtcggtgaggctgggaggaccaggagggggtgctgggggtgctgggggtggccgtgttctcgagtgtcccagcatccgcatcacctccatctctcccacgccggagccgccagcagcgctggaggacaaccctgatgcctggggggacggctctcctagagattaccccccaccagaaggctttgggggctacagagaagcaggggcccagggtgggggggccttcttcagcccaagccctggcagcagcagcctgtcctcgtggagcttcttctccgatgcctctgacgaggcagccctgtatgcagcctgcgacgaggtggagtctgagctaaatgaggcggcctcccgctttggcctgggctccccgctgccctcgccccgggcctcccctcggccatggacccccgaagatccctggagcctgtatggtccaagccccggaggccgagggccagaggatagctggctactcctcagtgctcctgggcccaccccagcctccccgcggcctgcctctccatgtggcaagcggcgctattccagctcgggaaccccatcttcagcctccccagctctgtcccgccgtggcagcctgggggaagaggggtctgagccacctccaccacccccattgcctctggcccgggacccgggctcccctggtccctttgactatgtgggggccccaccagctgagagcatccctcagaagacacggcggacttccagcgagcaggcagtggctctgcctcggtctgaggagcctgcctcatgcaatgggaagctgcccttgggagcagaggagtctgtggctcctccaggaggttcccggaaggaggtggctggcatggactacctggcagtgccctccccactcgcttggtccaaggcccggattgggggacacagccctatcttcaggacctctgccctacccccactggactggcctctgcccagccaatatgagcagctggagctgaggatcgaggtacagcctagagcccaccaccgggcccactatgagacagaaggcagccgtggagctgtcaaagctgcccctggcggtcaccccgtagtcaagctcctaggctacagtgagaagccactgaccctacagatgttcatcggcactgcagatgaaaggaacctgcggcctcatgccttctatcaggtgcaccgtatcacaggcaagatggtggccacggccagctatgaagccgtagtcagtggcaccaaggtgttggagatgactctgctgcctgagaacaacatggcggccaacattgactgcgcgggaatcctgaagcttcggaattcagacattgagcttcggaagggtgagacggacatcgggcgcaaaaacacacgtgtacggctggtgttccgggtacacgtgccccagggcggcgggaaggtcgtctcagtacaggcagcatcggtgcccatcgagtgctcccagcgctcagcccaggagctgccccaggtggaggcctacagccccagtgcctgctctgtgagaggaggcgaggaactggtactgaccggctccaacttcctgccagactccaaggtggtgttcattgagaggggtcctgatgggaagctgcaatgggaggaggaggccacagtgaaccgactgcagagcaacgaggtgacgctgaccctgactgtccccgagtacagcaacaagagggtttcccggccagtccaggtctacttttatgtctccaatgggcggaggaaacgcagtcctacccagagtttcaggtttctgcctgtgatctgcaaagaggagcccctaccggactcatctctgcggggtttcccttcagcatcggcaaccccctttggcactgacatggacttctcaccacccaggcccccctacccctcctatccccatgaagaccctgcttgcgaaactccttacctatcagaaggcttcggctatggcatgccccctctgtacccccagacggggcccccaccatcctacagaccgggcctgcggatgttccctgagactagggtgagtgagatcattggccgagacctgagtggcttccctgcacctcctggagaagagcctcctgcctgaaccacgtgaactgtcatcacctggcaaccccagccccagcctcagccctgccccctttccctccttcctggagtggtggctacagaagcttggggccaaccctggctcctctttccccagcttctgtctgtctcactgtcttccctcccctcccccagctgaggtgtggccctcaggcctggtgctgccttggagggctgggggaaggagtgtgtggaggagggaggagggtgaagactgaggctaggtgccagaatggactggagtgaaggcgtgtctagagtgtgggctggctgttgtgctggaaagctggggacaggttgatggtaataaactgctcaatgaccagtgaaaaaaaaaaccagagc

SEQ ID NO: 34297 - DNA, 3862 bp, Homo sapiens
tgggggaggacgaggggcgcgtggttttcccatctcatccctggaggaggggctggagcatccccggcagccaatcagggacaggctgggggggggaccgctttgaagaagtttgggggaaaaaagtttggaaaagtttctataataacgagggggcttctggagggaggcggcagcgacggaggagggggcttctcagagaaagggagggagggagccacccgggtgaagatacagcagcctcctgaactcccccctcccacccaggccgggacctgggggctcctgccggatccatgggggcggccagctgcgaggatgaggagctggaatttaagctggtgttcggggaggaaaaggaggcccccccgctgggcgcggggggattgggggaagaactggactcagaggatgccccgccatgctgccgtctggccttgggagagccccctccctatggcgctgcacctatcggtattccccgacctccaccccctcggcctggcatgcattcgccaccgccgcgaccagccccctcacctggcacctgggagagccagcccgccaggtcggtgaggctgggaggaccaggagggggtgctgggggtgctgggggtggccgtgttctcgagtgtcccagcatccgcatcacctccatctctcccacgccggagccgccagcagcgctggaggacaaccctgatgcctggggggacggctctcctagagattaccccccaccagaaggctttgggggctacagagaagcaggggcccagggtgggggggccttcttcagcccaagccctggcagcagcagcctgtcctcgtggagcttcttctccgatgcctctgacgaggcagccctgtatgcagcctgcgacgaggtggagtctgagctaaatgaggcggcctcccgctttggcctgggctccccgctgccctcgccccgggcctcccctcggccatggacccccgaagatccctggagcctgtatggtccaagccccggaggccgagggccagaggatagctggctactcctcagtgctcctgggcccaccccagcctccccgcggcctgcctctccatgtggcaagcggcgctattccagctcgggaaccccatcttcagcctccccagctctgtcccgccgtggcagcctgggggaagaggggtctgagccacctccaccacccccattgcctctggcccgggacccgggctcccctggtccctttgactatgtgggggccccaccagctgagagcatccctcagaagacacggcggacttccagcgagcaggcagtggctctgcctcggtctgaggagcctgcctcatgcaatgggaagctgcccttgggagcagaggagtctgtggctcctccaggaggttcccggaaggaggtggctggcatggactacctggcagtgccctccccactcgcttggtccaaggcccggattgggggacacagccctatcttcaggacctctgccctacccccactggactggcctctgcccagccaatatgagcagctggagctgaggatcgaggtacagcctagagcccaccaccgggcccactatgagacagaaggcagccgtggagctgtcaaagctgcccctggcggtcaccccgtagtcaagctcctaggctacagtgagaagccactgaccctacagatgttcatcggcactgcagatgaaaggaacctgcggcctcatgccttctatcaggtgcaccgtatcacaggcaagatggtggccacggccagctatgaagccgtagtcagtggcaccaaggtgttggagatgactctgctgcctgagaacaacatggcggccaacattgactgcgcgggaatcctgaagcttcggaattcagacattgagcttcggaagggtgagacggacatcgggcgcaaaaacacacgtgtacggctggtgttccgggtacacgtgccccagggcggcgggaaggtcgtctcagtacaggcagcatcggtgcccatcgagtgctcccagcgctcagcccaggagctgccccaggtggaggcctacagccccagtgcctgctctgtgagaggaggcgaggaactggtactgaccggctccaacttcctgccagactccaaggtggtgttcattgagaggggtcctgatgggaagctgcaatgggaggaggaggccacagtgaaccgactgcagagcaacgaggtgacgctgaccctgactgtccccgagtacagcaacaagagggtttcccggccagtccaggtctacttttatgtctccaatgggcggaggaaacgcagtcctacccagagtttcaggtttctgcctgtgatctgcaaagaggagcccctaccggactcatctctgcggggtttcccttcagcatcggcaaccccctttggcactgacatggacttctcaccacccaggcccccctacccctcctatccccatgaagaccctgcttgcgaaactccttacctatcagaaggcttcggctatggcatgccccctctgtacccccagacggggcccccaccatcctacagaccgggcctgcggatgttccctgagactaggggtaccacaggttgtgcccaaccacctgcagtttccttccttccccgccccttccctagtgacccgtatggagggcggggctcctctttccccctggggctgccattctctccgccagccccctttcggccgcctcctcttcctgcatccccaccgcttgaaggccccttcccttcccagagtgatgtgcatcccctacctgctgagggatacaataaggtagggccaggctatggccctggggagggggctccggagcaggagaaatccaggggtggctacagcagcggcttccgagacagtgtccctatccagggtatcacgctggaggaaggtgggtgtgggactgggggctgtgagtgtgagtgtgtgcaagagattgctctgcatgtttgctgagggctggagctgggcttttcagagatcgggcatccctggtctctcagggccagttggaggttcccaggaggcatgttcttgatgcctgtggctgcctgaatccaattaactgaattctgaagagtgcatggggtaactgtctcagcctttctcctgtctctgcctctgtcctctgctccaaatcataaaatctcagagctagaagcactttcaagatcattccatccagcgcattcaatttgcaagtttaggcgttgagttccagagagggatggtagcttgctgaggtcccagtcaagcacacttgccattgcctcagctttcccctaaacacggtgtctgtggtcagggttggtgaggaggagctttcctgttttgcctctccttcttcccattggctacacccatctctggccctgctgataccgattcccctgacatttcaggctaagccagcaggaaagggctaggacgggtgcctgggagcccacatggagggagttgggcaagatttgattcggagcaggtgtcaagacgtgttggggaaactgaggcccagtggaatagaagccagtagaggaggaatctagaggcctcctagattaaggcctgcctggaatggattgggggtgggtctttggaaaaggaggggacccacctctagcccagtctctcaactgcccctcctttacagtgagtgagatcattggccgagacctgagtggcttccctgcacctcctggagaagagcctcctgcctgaaccacgtgaactgtcatcactggctgttgtgctggaaagctggggacaggttgatggtaataaactgctcaatgaccagtgaaaaaaaaaaccagagc

SEQ ID NO: 34298 - DNA, 2788 bp, Homo sapiens
tgggggaggacgaggggcgcgtggttttcccatctcatccctggaggaggggctggagcatccccggcagccaatcagggacaggctgggggggggaccgctttgaagaagtttgggggaaaaaagtttggaaaagtttctataataacgagggggcttctggagggaggcggcagcgacggaggagggggcttctcagagaaagggagggagggagccacccgggtgaagatacagcagcctcctgaactcccccctcccacccaggccgggacctgggggctcctgccggatccatgggggcggccagctgcgaggatgaggagctggaatttaagctggtgttcggggaggaaaaggaggcccccccgctgggcgcggggggattgggggaagaactggactcagaggatgccccgccatgctgccgtctggccttgggagagccccctccctatggcgctgcacctatcggtattccccgacctccaccccctcggcctggcatgcattcgccaccgccgcgaccagccccctcacctggcacctgggagagccagcccgccaggtcggtgaggctgggaggaccaggagggggtgctgggggtgctgggggtggccgtgttctcgagtgtcccagcatccgcatcacctccatctctcccacgccggagccgccagcagcgctggaggacaaccctgatgcctggggggacggctctcctagagattaccccccaccagaaggctttgggggctacagagaagcaggggcccagggtgggggggccttcttcagcccaagccctggcagcagcagcctgtcctcgtggagcttcttctccgatgcctctgacgaggcagccctgtatgcagcctgcgacgaggtggagtctgagctaaatgaggcggcctcccgctttggcctgggctccccgctgccctcgccccgggcctcccctcggccatggacccccgaagatccctggagcctgtatggtccaagccccggaggccgagggccagaggatagctggctactcctcagtgctcctgggcccaccccagcctccccgcggcctgcctctccatgtggcaagcggcgctattccagctcgggaaccccatcttcagcctccccagctctgtcccgccgtggcagcctgggggaagaggggtctgagccacctccaccacccccattgcctctggcccgggacccgggctcccctggtccctttgactatgtgggggccccaccagctgagagcatccctcagaagacacggcggacttccagcgagcaggcagtggctctgcctcggtctgaggagcctgcctcatgcaatgggaagctgcccttgggagcagaggagtctgtggctcctccaggaggttcccggaaggaggtggctggcatggactacctggcagtgccctccccactcgcttggtccaaggcccggattgggggacacagccctatcttcaggacctctgccctacccccactggactggcctctgcccagccaatatgagcagctggagctgaggatcgaggtacagcctagagcccaccaccgggcccactatgagacagaaggcagccgtggagctgtcaaagctgcccctggcggtcaccccgtagtcaagctcctaggctacagtgagaagccactgaccctacagatgttcatcggcactgcagatgaaaggaacctgcggcctcatgccttctatcaggtgcaccgtatcacaggcaagatggtggccacggccagctatgaagccgtagtcagtggcaccaaggtgttggagatgactctgctgcctgagaacaacatggcggccaacattgactgcgcgggaatcctgaagcttcggaattcagacattgagcttcggaagggtgagacggacatcgggcgcaaaaacacacgtgtacggctggtgttccgggtacacgtgccccagggcggcgggaaggtcgtctcagtacaggcagcatcggtgcccatcgagtgctcccagcgctcagcccaggagctgccccaggtggaggcctacagccccagtgcctgctctgtgagaggaggcgaggaactggtactgaccggctccaacttcctgccagactccaaggtggtgttcattgagaggggtcctgatgggaagctgcaatgggaggaggaggccacagtgaaccgactgcagagcaacgaggtgacgctgaccctgactgtccccgagtacagcaacaagagggtttcccggccagtccaggtctacttttatgtctccaatgggcggaggaaacgcagtcctacccagagtttcaggtttctgcctgtgagtgagatcattggccgagacctgagtggcttccctgcacctcctggagaagagcctcctgcctgaaccacgtgaactgtcatcacctggcaaccccagccccagcctcagccctgccccctttccctccttcctggagtggtggctacagaagcttggggccaaccctggctcctctttccccagcttctgtctgtctcactgtcttccctcccctcccccagctgaggtgtggccctcaggcctggtgctgccttggagggctgggggaaggagtgtgtggaggagggaggagggtgaagactgaggctaggtgccagaatggactggagtgaaggcgtgtctagagtgtgggctggctgttgtgctggaaagctggggacaggttgatggtaataaactgctcaatgaccagtgaaaaaaaaaaccagagc

SEQ ID NO: 34299 - DNA, 2607 bp, Homo sapiens
tgggggaggacgaggggcgcgtggttttcccatctcatccctggaggaggggctggagcatccccggcagccaatcagggacaggctgggggggggaccgctttgaagaagtttgggggaaaaaagtttggaaaagtttctataataacgagggggcttctggagggaggcggcagcgacggaggagggggcttctcagagaaagggagggagggagccacccgggtgaagatacagcagcctcctgaactcccccctcccacccaggccgggacctgggggctcctgccggatccatgggggcggccagctgcgaggatgaggagctggaatttaagctggtgttcggggaggaaaaggaggcccccccgctgggcgcggggggattgggggaagaactggactcagaggatgccccgccatgctgccgtctggccttgggagagccccctccctatggcgctgcacctatcggtattccccgacctccaccccctcggcctggcatgcattcgccaccgccgcgaccagccccctcacctggcacctgggagagccagcccgccaggtcggtgaggctgggaggaccaggagggggtgctgggggtgctgggggtggccgtgttctcgagtgtcccagcatccgcatcacctccatctctcccacgccggagccgccagcagcgctggaggacaaccctgatgcctggggggacggctctcctagagattaccccccaccagaaggctttgggggctacagagaagcaggggcccagggtgggggggccttcttcagcccaagccctggcagcagcagcctgtcctcgtggagcttcttctccgatgcctctgacgaggcagccctgtatgcagcctgcgacgaggtggagtctgagctaaatgaggcggcctcccgctttggcctgggctccccgctgccctcgccccgggcctcccctcggccatggacccccgaagatccctggagcctgtatggtccaagccccggaggccgagggccagaggatagctggctactcctcagtgctcctgggcccaccccagcctccccgcggcctgcctctccatgtggcaagcggcgctattccagctcgggaaccccatcttcagcctccccagctctgtcccgccgtggcagcctgggggaagaggggtctgagccacctccaccacccccattgcctctggcccgggacccgggctcccctggtccctttgactatgtgggggccccaccagctgagagcatccctcagaagacacggcggacttccagcgagcaggcagtggctctgcctcggtctgaggagcctgcctcatgcaatgggaagctgcccttgggagcagaggagtctgtggctcctccaggaggttcccggaaggaggtggctggcatggactacctggcagtgccctccccactcgcttggtccaaggcccggattgggggacacagccctatcttcaggacctctgccctacccccactggactggcctctgcccagccaatatgagcagctggagctgaggatcgaggtacagcctagagcccaccaccgggcccactatgagacagaaggcagccgtggagctgtcaaagctgcccctggcggtcaccccgtagtcaagctcctaggctacagtgagaagccactgaccctacagatgttcatcggcactgcagatgaaaggaacctgcggcctcatgccttctatcaggtgcaccgtatcacaggcaagatggtggccacggccagctatgaagccgtagtcagtggcaccaaggtgttggagatgactctgctgcctgagaacaacatggcggccaacattgactgcgcgggaatcctgaagcttcggaattcagacattgagcttcggaagggtgagacggacatcgggcgcaaaaacacacgtgtacggctggtgttccgggtacacgtgccccagggcggcgggaaggtcgtctcagtacaggcagcatcggtgcccatcgagtgctcccagcgctcagcccaggagctgccccaggtggaggcctacagccccagtgcctgctctgtgagaggaggcgaggaactggtactgaccggctccaacttcctgccagactccaaggtggtgttcattgagaggggtcctgatgggaagctgcaatgggaggaggaggccacagtgaaccgactgcagagcaacgagagcctcctgcctgaaccacgtgaactgtcatcacctggcaaccccagccccagcctcagccctgccccctttccctccttcctggagtggtggctacagaagcttggggccaaccctggctcctctttccccagcttctgtctgtctcactgtcttccctcccctcccccagctgaggtgtggccctcaggcctggtgctgccttggagggctgggggaaggagtgtgtggaggagggaggagggtgaagactgaggctaggtgccagaatggactggagtgaaggcgtgtctagagtgtgggctggctgttgtgctggaaagctggggacaggttgatggtaataaactgctcaatgaccagtgaaaaaaaaaaccagagc

SEQ ID NO: 34300 - DNA, 1662 bp, Homo sapiens
tgggggaggacgaggggcgcgtggttttcccatctcatccctggaggaggggctggagcatccccggcagccaatcagggacaggctgggggggggaccgctttgaagaagtttgggggaaaaaagtttggaaaagtttctataataacgagggggcttctggagggaggcggcagcgacggaggagggggcttctcagagaaagggagggagggagccacccgggtgaagatacagcagcctcctgaactcccccctcccacccaggccgggacctgggggctcctgccggatccatgggggcggccagctgcgaggatgaggagctggaatttaagctggtgttcggggaggaaaaggaggcccccccgctgggcgcggggggattgggggaagaactggactcagaggatgccccgccatgctgccgtctggccttgggagagccccctccctatggcgctgcacctatcggtattccccgacctccaccccctcggcctggcatgcattcgccaccgccgcgaccagccccctcacctggcacctgggagagccagcccgccaggtcggtgaggctgggaggaccaggagggggtgctgggggtgctgggggtggccgtgttctcgagtgtcccagcatccgcatcacctccatctctcccacgccggagccgccagcagcgctggaggacaaccctgatgcctggggggacggctctcctagagattaccccccaccagaaggctttgggggctacagagaagcaggggcccagggtgggggggccttcttcagcccaagccctggcagcagcagcctgtcctcgtggagcttcttctccgatgcctctgacgaggcagccctgtatgcagcctgcgacgaggtggagtctgagctaaatgaggcggcctcccgctttggcctgggctccccgctgccctcgccccgggcctcccctcggccatggacccccgaagatccctggagcctgtatggtccaagccccggaggccgagggccagaggatagctggctactcctcagtgctcctgggcccaccccagcctccccgcggcctgcctctccatgtggcaagcggcgctattccagctcgggaaccccatcttcagcctccccagctctgtcccgccgtggcagcctgggggaagaggggtctgagccacctccaccacccccattgcctctggcccgggacccgggctcccctggtccctttgactatgtgggggccccaccagctgagagcatccctcagaagacacggcggacttccagcgagcaggcagtggctctgcctcggtctgaggagcctgcctcatgcaatgggaagctgcccttgggagcagaggagtctgtggctcctccaggaggttcccggaaggaggtggactgccattcatgcattgtcagatatttattaaacagcagcaaagtgccagccaatttgtcctggaggaattcatagcctcatggggcaaaagtaaataaacagcttattacaattcaaaaaaaaaaagggggggctctaaattcccgggggccaaattacgtccccgtttgtaaagggccaaggggttaaaaagacgcgcgtaacacgatgggacggcctggttgggacccttggggatggcacccca

SEQ ID NO: 34301 - DNA, 590 bp, Homo sapiens
atgaactttgcctttcggccggaaccgccatcttccagtaattcgccaaaatgacgaacacaaagggaaagaggagaggcacccgatatatgttctctaggccttttagaaaacatggagttgttcctttggccacatatatgcgaatctataagaaaggtgatattgtagacatcaagggaatgggtactgttcaaaaaggaatgccccacaagtgttaccatggcaaaactggaagagtctacaatgttacccagcatgctgttggcattgttgtaaacaaacaagttaagggcaagattcttgccaagagaattaatgtgcgtattgagcacattaagcactctaagagccgagatagcttcctgaaacgtgtgaaggaaaatgatcagaaaaagaaagaagccaaagagaaaggtacctgggttcaactaaagcgccagcctgctccacccagagaagcacactttgtgagaaccaatgggaaggagcctgagctgctggaacctattccctatgaattcatggcataataggtgttaaaaaaaaaaataaaggacctctgggctacaaaaaaaaaaaaaaaaaaa

SEQ ID NO: 34302 - DNA, 719 bp, Homo sapiens
  misc_feature (611)..(611): n is a, c, g, or t
  misc_feature (616)..(617): n is a, c, g, or t
  misc_feature (620)..(620): n is a, c, g, or t
  misc_feature (622)..(622): n is a, c, g, or t
atgaactttgcctttcggccggaaccgccatcttccagtaattcgccaaaatgacgaacacaaagggaaagaggagaggcacccgatatatgttctctaggccttttagaaaacatggagttgttcctttggccacatatatgcgaatctataagaaaggtgatattgtagacatcaagggaatgggtactgttcaaaaaggaatgccccacaagtgttaccatggcaaaactggaagagtctacaatgttacccagcatgctgttggcattgttgtaaacaaacaagttaagggcaagattcttgccaagagaattaatgtgcgtattgagcacattaagcactctaagagccgagatagcttcctgaaacgtgtgaaggaaaatgatcagaaaaagaaagaagccaaagagaaaggtacctgggttcaactaaagcgccagcctgctccacccagagaagcacactttgtgagaaccaatgggaaggagcctgagctgctggaacctattccctatgaattcatggcataataggtgttaaaaaaaaaaataaaggacctctgggctacaaaaaaaaaaaaaaaaaaaaaaaaaaaatgttcgggggcnacggnnccngnaaaaggttcaaaccccctcgggggggacgggcccccaggtagggaaccgggccaagcgggcccaaggaaccggaagacacggcgggtcccccgaaaa

SEQ ID NO: 34303 - DNA, 445 bp, Homo sapiens
gccgcctactactactaaattcgcggccgcgtcgacaattgatgtggtaatattaaatagcatttactgtgttataccaagacatatatgtttatagagaggaaacataaagaaagtgcaaggggcatgaatgtacatggcatatatccttgaatgctgagtagtgtggtgtcaccagacaatgggttatgtggggaagactgctgagaggtgccaaagggatttgtatatgaagcaaagcggcttgggggttgggcttcattttacaggcctccaacatataaggcaaaacttattgaatggtaaatgagtatagcaaggatgaattttattgtatgtaaattatacctcagtgaacctgacctttaaaagaaagaaaacaatgaggttgaagaatggattttggaagctaacaattcagaagtgtttggtgactttggcaaaa

SEQ ID NO: 34304 - DNA, 368 bp, Homo sapiens
aaaaaggaaattagaaaagcagcagggtgtttaactgtttagctatattctagctggggtcagcaatcactaggctaataagcagtggacttgtgtcaaaataatttttagatattgaattcagtttgtaaaggagaaaagcttgctttctcgcccttcagaaatgtaattagactgtgtaagtaagtagctgtctttctctaggtattttttctctctagagtaaaacatttagagtcaaaacaagtgagctgttattgttttttttttaagttaggaaacatgatagatatccttaatatggaacaattcagagttcatatgacaccatctttcatttttatcagaactaaaaactgaggttttgt

SEQ ID NO: 34305 - DNA, 1151 bp, Homo sapiens
ttaagtggtctgcccttccactgaaagtgtagctttttgacagtctcagccatataaacaggatctcagtttcatccttccatccatccattagaggcacaaggtctcatctcttttccttttgggcattaaaaccaaagttcatacattattgagacaggccgactctgctaaggcagcctgtttggcctttaagttttattgcttattttttgagtatgtatttatttttttgattattattattttttttttgagctttaagccttcaagtttcctttttattcttgacccctagacatttcctttgcttgtggactcgggtatttgtttttaggtaatattttttttccctatgacacagccctcaggagatcctgagaacatgtgccctcatttttaggtaattttaattaggaagggttttaggttgtctgatctgccttgttgctagaaacagaaattctcctattgattgatttttcaaaccacttcttagtggcctctacaactactccagtcaggtcaagaatggctctcacattgccaagtcagtgggtatttttagtcttcatcttagatgacctttatgcacatttgtctttgtctaggaacttctgttggaaacatcttctattttaatgttattttaaatttttttgcttttgtaacattatgcttagcatgtgtgtccaactctttgacaatttctttttagttttctggtggcttccctttatccaaatttagtattgaaattcctcgagccgctgcttttctcactccataattctggccagaatttggtacttaaaatattttgtctaaaatattacaatagctacttaagtcatctccctgactccactctgttgtctttcagggcgtcgtccacactgtagccaaagtgatcttataaaaacataattctaatcatggcactcttctgcttaaaaatgttttaatggctttccgttaggttaaaatttaaaagtcctttgtagcctgtgagactctacatgagttgactccctagcttcatctttgagcatcttatttctttacttattataccatcagttagagttgattgttatataatccacagaagtgaattctgtccgatttaagcaaaaaaaaaaaaaaaaaaa

SEQ ID NO: 34306 - DNA, 443 bp, Homo sapiens
gacagacatagtactcatcctcagaggagattatgactagagaggattaattagcaaagtaaccaatatctttaagaaatttctttattaaatctcttttgactcatttgttcattcatttggccattcgacaagtgcgtactatgctgacagaggcctgataaactattgacacattttggaaaatgcaaatttactcatgttttaagtctgggagcatgaagtgggagaagtaagagatgaaactgaagagaaaggcataaacaagatcatggtgaccctatgggtcttacaaaagaactgggactttctcttcaggcatcagtaaggcattgaatgcctgaaatggtcagatatttattctagtaaaattactatggaggcaatgtcaagactaaatttgaagggtacaggctacaaacaggaagactacttagtttttg

SEQ ID NO: 34307 - DNA, 286 bp, Homo sapiens
gacattacgtatttagccctagtacacagtcactgagtgatggggtcaggactcaaacccaaatccattggggttctcgtgactgtgttgcgttaccctgggatagagaaagaaaaagaagggcatgcaggccttagaactctactttttgccccctgagatgcatgtgaatggagtttgacaataagtgatttaacaatgataaattacgggcagagctgggaatttcatatggggaactggggttgagaaataataaatccttacctagtcttttcaacaaagt

SEQ ID NO: 34308 - DNA, 724 bp, Homo sapiens
agacatatgggatactataaagccaccacatatttgaatcatttgggtcccagaagacagagaacaaaaggattggaaaactcatctatttttttgttattaaataatagatgaaaacttcccaaatctatcaaatgatttagatatccagaaacaggaggctccaagatccgcaaacatatacaatgcaagaaagtcttctccttggcacattatagtcaaactatctaaagtcaaagacagaattctgaaaaaggcaagagaaaagtgcctagtcagttgtaaagaaaaccttatcaggctaatagtgaatttctcagcagaaaccttacaagccaggaaagaatgatacattcaaagtactgaatgaaaaaaatgctatccaagggatactatatctagcaaaaatattctttgtaactgaaggagaaataaagtcttccccagaaattgcttaagggagtcctaatcctgggagcaaaatgactacatttaccatcatgaaaacttatgaatgtgtaaaacctgctaataaagcaatcacacaaaggaataagggaaagtaattaaatggtacctgtacggaaaaccaccaaaccaaaattagaaaaaataagtgaaaaagaaaggaatgaagagtatataaaaccagaaaacaataacaatataataggaacaaaacctcacatgttaataataatcttgaatgtggaaggattgaatt

SEQ ID NO: 34309 - DNA, 338 bp, Homo sapiens
gtagagaaggggtttcaccatgttggcgaagatgatctcgatctcctgacctagtgatccgcccacctccgcctcccaaagtgctgggattacaggcataagccaccgtgccttgctggaaatttaaggcttttgtatttgtttttaccttctaagttctaggaaatgcttagcatgtattttccaaaacagtgtgtgggcaggtaggaggaagatttaaccacttactattagagctgtggttctaatttgctatcgttactaagtcagaaatatattttatctcttttgttctaaatgcagacccaaaggtttatgttcttttaaaaaaaaaaatt

SEQ ID NO: 34310 - DNA, 1284 bp, Homo sapiens
tttaggaggctgaggtgggaggattgcttgaagccaggagtttgcagcaagcttaggcaacatggctagactctgtctatattaaaaaaaacaaaaggccgcgcgcggtggctcacatctttggatgtgagcactttgggaggccgaggtgggtggatcacgaggtcagaagattgagaccagcctggctaatatggtgaaaccctgtctctactaatgatacaaaaattagctggtcatggtatggtggtgtgtgcctgtagtcccagctactcgggaggctgaggcagaagaatcacttgaacccgggagacggaggttgcagtgagctgagatcgtgctactgcacgtcagcctattcaacagagtgggactctgttttaaaaaaaataaaaaaaaaatagcaccactgcactccagcccacggtgacagagtgagactctgagtcttaaaaaaaaaaaaaaaaaaggaggttgaatacagtattaaggttggattcagggaacagttcgaggctggagacaaacatttgagaatcatgagcttattgatgataaagccatgagactggatgagattatgttgaaagtgagtgtgtgtggagaaaataaggctcctacactgggtcttgaagcactccaatatttaaagatttaactgaaagattaaaggcgatgaggaagtatcagcaggaagattggcatggagagaccactgggataggagaaaaccaagggagtggtgctctggaggcaaaggaagaagatgttttaagttggaaggatggattatctaatgttcaaggagcattgaatttagctatatggagcccactggaggacgtcgataacagtagtttggtagagaaaaagccttacttgagaaagttcaagggagaaaggggaagaggaattacagacaactccttcaagggattttgatacaaaagggagcacagaaatagaatgttcagacggggagaaactgagattaagaaagtttaattttttatttatgtatttttttttaagatggagtctcactctgtcacccaggttggagtgcagtggtgcgatcttggctcactgaaacctccacttctggggttcaactgattcccttgcctcagcctcccgagtagctgggattacaggcatgcaccaccacacctggctaattttttatttttagtagagacgaggtttcaccatgttggtcaggcttgtctcaaactcctgacctcaagtgatctgcctgcctctgcccctcaaagtgctgggatt

SEQ ID NO: 34311 - DNA, 270 bp, Homo sapiens
gtctgtaaaaacaggctatgggccatagtttgctaatccctattttatatcatgatagaagtctagattgtaggggtccttttatcaaaattatagagaaatgatatgggcatttcaacgtgtgtaactgtacctaaaaatacagaattgaaaattaataataaccaccaccaaattagggatgtgagaaatgggtgaaggtatagatgaaaaaatacaggatagtgatgattgttgaaggtgagttttggacacataaatgttatacta

SEQ ID NO: 34312 - DNA, 4400 bp, Homo sapiens
  misc_feature (3406)..(3406): n is a, c, g, or t
attatgttcgtgtgatggatatggggcttttggagttaaccataactgcagtgaagtctgattctgatggagagcaaactgagccccgctttgagttacactgttccagcgatgttgtccatatcagaacgtgctcagactcttgtgctgcgttaatgaatctcattcagtacattgcaagctatggtgacttgcagacacctaacaaggcagatatgaagcctggagcctttcaaagaaggtctaaggtagattccagtggtcgatcatcctcacgtggtccagtacttcctgaagcagatcaacaaatgttacgagatctgatgagtgatgctatggaggagatcgacatgcaacaaggcacctcgtcagtaaaaccacaggctaatggtgttttggatgaaaaatctcaaattcaggagccatgttgttcagacctcttcctgtttcctgacgagagtgggaatgtatcccaggagtccggccccacctatgcctcattctctcaccatttcatcagtgatgcaatgacaggtgtgcccactgagaatgatgacttttgcattctttttgcaccaaaagcagccatgcaggagaaggaagaagaaccagttataaaaatcatggttgatgatgcaattgtgataagagacaattatttcagtctgcccgttaataagaccgatacgagcaaagcccccttacactttcccattcctgtgattcgctatgtggtgaaggaggtctctcttgtctggcatctttatggaggaaaggattttggaacagtccctcccacttctccggctaaaagttatattagtccccacagttcgccttctcacacacccacgagacatggacgtaatacagtatgtgggggaaaaggaaggaaccatgactttttaatggaaatacagctaagcaaggtgaagtttcagcatgaagtctacccgccatgcaaacctgattgtgattccagcctctcagaacacccagtctcccggcaggtgttcattgttcaggatcttgagattcgagatcgtttggcaacatcacaaatgaataaatttttatacctgtattgcagtaaagaaatgcctcgaaaagctcactccaacatgttgacagtgaaagccttacacgtgtgtccagaatctggcaggtccccacaggagtgctgcttgagagtgtcgctgatgccgctccgcctcaatattgaccaggatgctttgttcttcctgaaggatttcttcacaagtctttctgcagaagtagagcttcaaatgactccagatccagaagttaaaaagtctcctggagctgatgtcacctgcagtttgccaaggcatttgagtacctcaaaggagccaaatctggttatttctttctctgggccaaaacagccttcccaaaatgatagtgccaattcagtggaagtggttaatggcatggaagagaagaacttctctgctgaagaagcatcttttagggatcagcctgtgttttttagagaatttagattcacgtcagaagttcccattcgacttgattatcatggcaaacatgtatcaatggatcagggtacgctagctgggattttgattggtctggctcagttaaactgctctgaactaaagctcaagaggctttcctatcgacatggtttactaggcgttgacaaattattctcatatgcaatcactgagtggcttaatgacattaagaagaaccagctaccaggaatcctgggaggtgttggacctatgcattcactagtacaattagtacaaggcctaaaggacttggtctggctcccaatagagcagtaccggaaggatggccgcattgtcagagggtttcagagaggcgctgcttcctttggtacctcgacagcgatggctgctctagaactcacaaacagaatggttcaaaccatacaggcagctgcagagactgcttatgatatggtgtctcctggtaccctttctatcgagcccaagaagaccaaaaggtttcctcatcaccggttagcccaccagccagtagacctgagggaaggtgtggccaaggcctacagtgttgtgaaagagggaatcacagacacggctcagaccatttatgaaactgcggctcgagaacacgagagcagaggggtgactggtgccgtgggcgaggttctgcgccagattcctccggcagtggtgaaacctctgattgttgccacagaagcaacgtcaaacgtgctgggtggcatgagaaaccaaattaggccagatgtccggcaagacgagtcacagaaatggcgccacggggatgactgatggcttggaactgacagtgtgaagataaggagagtggaaccaggagctcagagtcctgacagcagcttcagaggaagctcgtttaattttattgtgctcatctcaggaacaaaagcattttttagttaaataatttaacatcaaaacaacatgcaaccaaaaacttctgacatttatagttgatacttgcctatagaaatgtttggtggctggtgtcaaaggtccttaaagcatttgctgccaagttagtggaaggctcacttttgttaagatgactgtaattctccttgttaccgacgagagatcattggaagctgccttctaacactttgtgtagctctgtggagttggattttcttaaggtttaaaaagaatcacagcttcggaacttttaactgaaaatgagagacagaagccacaggggaagcaaagcaaataggattttcaatataaatatcagtgtggaaaaataacctattctgttgaatttagtgttcatgcacttgagaacaacattatttccatttactccgaaaatccttctgtgggggtttgagaaagtgaatgttgcagacatgttctgttgtgttgcactttatcctgtgtttatgtgtatgtgtttttagattaattcaagttgtgtgctatatttcttgtataatttacaaagttacacaaaatataaagagcagtaaacttgtctgaaagtttttggcaaaggaaggtaacttcaatgtaatagcttcctttaagagtacaggaaaatgcattctgtaatgaagtggggcccatgtaattgtttatattttcagttttaagcaggtatagtgcaggcttgttaggaatgtgtggaagggaagattggaagtgatttttcctcttttaaaagtaaacaaaattcttcaaatatgccctagttaactatttcagcataccatttttacttggttaacagtgtacattttgataacctatcaggaatgaataaagtatttttatttaaaggtgatattgttttatgcttccatgaatattttgcttttcttagagcatattcatagatgcagtactgtgatttaccncaagataattgggaacactttctcaaaatcgattttggttaatatcaggtaaatcattacctaggagtaagagggaaattgttgtcaattcctgactttagattgatccagcagaaagaaaaggtggaactttgtatatatccactgttgaaagttgcatgacctgacttcctgttttctaaagttgggggaatattattgaacttcaatttcagaactgcatttcaatttggggcttggaaaatgtagttaaatcaatttcgttctctaaattttctaagcaggaaagcaatgtaaaccaaaaatcaaaatgtttagaatttataaaaatggggttatatagcttttaattttagtttcctttttactgccaaaaaacttaaaaagacaacagcgtaaccacctgtttaagcaccgtgggaccatctcttattcgggtagagcctggtcctggcgacacactaacaggaaggcgtgctgtgttaccgggaaggcgcctctggctgtggggtgcgttctgaccaccccgctcagatgccagcattttccatttgcccttaaggaaacttgctatgtgtgttaacccagttatgattagtcaaactggaaaacacttgatcaaacttaaaattgtaaaatctgtctaacttttaaatatactttccacagttgtacttaagttcaattaactacagtatagagaaaaataattattctcttctttgcacccggagttgcaaacaaattaagtttacaaatctcatttaaacatatatctttgtaatgtaatctccgcggttctttctttgttctaccctcctgcacctgttgtcgatgtaatcattttgggaacagaaacgttgtgtctcaaaaagattcgttgtcagttcagccaagatgttctttacctgagattctggaaagatgtttatctatatcggaacacttctacattattaaatgtccttaagctttttcttttataaaaaaatct

SEQ ID NO: 34313 - DNA, 3086 bp, Homo sapiens
  misc_feature (2092)..(2092): n is a, c, g, or t
attatgctcatccattcttatgctcatctcatccttatgctcatccctccttatgctcatccctccttatgctcatccctccttatgctcatccctccttatgctcatccctccttatgctcatccctccttatgctcatccctccttatgctcatccctccttatgttcatccctccattatgctcatccctccttagagaatttagattcacgtcagaagttcccattcgacttgattatcatggcaaacatgtatcaatggatcagggtacgctagctgggattttgattggtctggctcagttaaactgctctgaactaaagctcaagaggctttcctatcgacatggtttactaggcgttgacaaattattctcatatgcaatcactgagtggcttaatgacattaagaagaaccagctaccaggaatcctgggaggtgttggacctatgcattcactagtacaattagtacaaggcctaaaggacttggtctggctcccaatagagcagtaccggaaggatggccgcattgtcagagggtttcagagaggcgctgcttcctttggtacctcgacagcgatggctgctctagaactcacaaacagaatggttcaaaccatacaggcagctgcagagactgcttatgatatggtgtctcctggtaccctttctatcgagcccaagaagaccaaaaggtttcctcatcaccggttagcccaccagccagtagacctgagggaaggtgtggccaaggcctacagtgttgtgaaagagggaatcacagacacggctcagaccatttatgaaactgcggctcgagaacacgagagcagaggggtgactggtgccgtgggcgaggttctgcgccagattcctccggcagtggtgaaacctctgattgttgccacagaagcaacgtcaaacgtgctgggtggcatgagaaaccaaattaggccagatgtccggcaagacgagtcacagaaatggcgccacggggatgactgatggcttggaactgacagtgtgaagataaggagagtggaaccaggagctcagagtcctgacagcagcttcagaggaagctcgtttaattttattgtgctcatctcaggaacaaaagcattttttagttaaataatttaacatcaaaacaacatgcaaccaaaaacttctgacatttatagttgatacttgcctatagaaatgtttggtggctggtgtcaaaggtccttaaagcatttgctgccaagttagtggaaggctcacttttgttaagatgactgtaattctccttgttaccgacgagagatcattggaagctgccttctaacactttgtgtagctctgtggagttggattttcttaaggtttaaaaagaatcacagcttcggaacttttaactgaaaatgagagacagaagccacaggggaagcaaagcaaataggattttcaatataaatatcagtgtggaaaaataacctattctgttgaatttagtgttcatgcacttgagaacaacattatttccatttactccgaaaatccttctgtgggggtttgagaaagtgaatgttgcagacatgttctgttgtgttgcactttatcctgtgtttatgtgtatgtgtttttagattaattcaagttgtgtgctatatttcttgtataatttacaaagttacacaaaatataaagagcagtaaacttgtctgaaagtttttggcaaaggaaggtaacttcaatgtaatagcttcctttaagagtacaggaaaatgcattctgtaatgaagtggggcccatgtaattgtttatattttcagttttaagcaggtatagtgcaggcttgttaggaatgtgtggaagggaagattggaagtgatttttcctcttttaaaagtaaacaaaattcttcaaatatgccctagttaactatttcagcataccatttttacttggttaacagtgtacattttgataacctatcaggaatgaataaagtatttttatttaaaggtgatattgttttatgcttccatgaatattttgcttttcttagagcatattcatagatgcagtactgtgatttaccncaagataattgggaacactttctcaaaatcgattttggttaatatcaggtaaatcattacctaggagtaagagggaaattgttgtcaattcctgactttagattgatccagcagaaagaaaaggtggaactttgtatatatccactgttgaaagttgcatgacctgacttcctgttttctaaagttgggggaatattattgaacttcaatttcagaactgcatttcaatttggggcttggaaaatgtagttaaatcaatttcgttctctaaattttctaagcaggaaagcaatgtaaaccaaaaatcaaaatgtttagaatttataaaaatggggttatatagcttttaattttagtttcctttttactgccaaaaaacttaaaaagacaacagcgtaaccacctgtttaagcaccgtgggaccatctcttattcgggtagagcctggtcctggcgacacactaacaggaaggcgtgctgtgttaccgggaaggcgcctctggctgtggggtgcgttctgaccaccccgctcagatgccagcattttccatttgcccttaaggaaacttgctatgtgtgttaacccagttatgattagtcaaactggaaaacacttgatcaaacttaaaattgtaaaatctgtctaacttttaaatatactttccacagttgtacttaagttcaattaactacagtatagagaaaaataattattctcttctttgcacccggagttgcaaacaaattaagtttacaaatctcatttaaacatatatctttgtaatgtaatctccgcggttctttctttgttctaccctcctgcacctgttgtcgatgtaatcattttgggaacagaaacgttgtgtctcaaaaagattcgttgtcagttcagccaagatgttctttacctgagattctggaaagatgtttatctatatcggaacacttctacattattaaatgtccttaagctttttcttttataaaaaaatct

SEQ ID NO: 34314 - DNA, 3446 bp, Homo sapiens
attatgttcgtgtgatggatatggggcttttggagttaaccataactgcagtgaagtctgattctgatggagagcaaactgagccccgctttgagttacactgttccagcgatgttgtccatatcagaacgtgctcagactcttgtgctgcgttaatgaatctcattcagtacattgcaagctatggtgacttgcagacacctaacaaggcagatatgaagcctggagcctttcaaagaaggtctaaggtagattccagtggtcgatcatcctcacgtggtccagtacttcctgaagcagatcaacaaatgttacgagatctgatgagtgatgctatggaggagatcgacatgcaacaaggcacctcgtcagtaaaaccacaggctaatggtgttttggatgaaaaatctcaaattcaggagccatgttgttcagacctcttcctgtttcctgacgagagtgggaatgtatcccaggagtccggccccacctatgcctcattctctcaccatttcatcagtgatgcaatgacaggtgtgcccactgagaatgatgacttttgcattctttttgcaccaaaagcagccatgcaggagaaggaagaagaaccagttataaaaatcatggttgatgatgcaattgtgataagagacaattatttcagtctgcccgttaataagaccgatacgagcaaagcccccttacactttcccattcctgtgattcgctatgtggtgaaggaggtctctcttgtctggcatctttatggaggaaaggattttggaacagtccctcccacttctccggctaaaagttatattagtccccacagttcgccttctcacacacccacgagacatggacgtaatacagtatgtgggggaaaaggaaggaaccatgactttttaatggaaatacagctaagcaaggtgaagtttcagcatgaagtctacccgccatgcaaacctgattgtgattccagcctctcagaacacccagtctcccggcaggtgttcattgttcaggatcttgagattcgagatcgtttggcaacatcacaaatgaataaatttttatacctgtattgcagtaaagaaatgcctcgaaaagctcactccaacatgttgacagtgaaagccttacacgtgtgtccagaatctggcaggtccccacaggagtgctgcttgagagtgtcgctgatgccgctccgcctcaatattgaccaggatgctttgttcttcctgaaggatttcttcacaagtctttctgcagaagtagagcttcaaatgactccagatccagaagttaaaaagtctcctggagctgatgtcacctgcagtttgccaaggcatttgagtacctcaaaggagccaaatctggttatttctttctctgggccaaaacagccttcccaaaatgatagtgccaattcagtggaagtggttaatggcatggaagagaagaacttctctgctgaagaagcatcttttagggatcagcctgtgttttttagagaatttagattcacgtcagaagttcccattcgacttgattatcatggcaaacatgtatcaatggatcagggtacgctagctgggattttgattggtctggctcagttaaactgctctgaactaaagctcaagaggctttcctatcgacatggtttactaggcgttgacaaattattctcatatgcaatcactgagtggcttaatgacattaagaagaaccagctaccaggaatcctgggaggtgttggacctatgcattcactagtacaattagtacaaggcctaaaggacttggtctggctcccaatagagcagtaccggaaggatggccgcattgtcagagggtttcagagaggcgctgcttcctttggtacctcgacagcgatggctgctctagaactcacaaacagaatggttcaaaccatacaggcagctgcagagactgcttatgatatggtgtctcctggtaccctttctatcgagcccaagaagaccaaaaggtttcctcatcaccggttagcccaccagccagtagacctgagggaaggtgtggccaaggcctacagtgttgtgaaagagggaatcacagacacggctcagaccatttatgaaactgcggctcgagaacacgagagcagaggggtgactggtgccgtgggcgaggttctgcgccagattcctccggcagtggtgaaacctctgattgttgccacagaagcaacgtcaaacgtgctgggtggcatgagaaaccaaattaggccagatgtccggcaagacgagtcacagaaatggcgccacggggatgactgatggcttggaactgacagtgtgaagataaggagagtggaaccaggagctcagagtcctgacagcagcttcagaggaagctcgtttaattttattgtgctcatctcaggaacaaaagcattttttagttaaataatttaacatcaaaacaacatgcaaccaaaaacttctgacatttatagttgatacttgcctatagaaatgtttggtggctggtgtcaaaggtccttaaagcatttgctgccaagttagtggaaggctcacttttgttaagatgactgtaattctccttgttaccgacgagagatcattggaagctgccttctaacactttgtgtagctctgtggagttggattttcttaaggtttaaaaagaatcacagcttcggaacttttaactgaaaatgagagacagaagccacaggggaagcaaagcaaataggattttcaatataaatatcagtgtggaaaaataacctattctgttgaatttagtgttcatgcacttgagaacaacattatttccatttactccgaaaatccttctgtgggggtttgagaaagtgaatgttgcagacatgttctgttgtgttgcactttatcctgtgtttatgtgtatgtgtttttagattaattcaagttgtgtgctatatttcttgtataatttacaaagttacacaaaatataaagagcagtaaacttgtctgaaagtttttggcaaaggaaggtaacttcaatgtaatagcttcctttaagagtacaggaaaatgcattctgtaatgaagtggggcccatgtaattgtttatattttcagttttaagcaggtatagtgcaggcttgttaggaatgtgtggaagggaagattggaagtgatttttcctcttttaaaagtaaacaaaattcttcaaatatgccctagttaactatttcagcataccatttttacttggttaacagtgtacattttgataacctatcaggaatgaataaagtatttttatgtagaaatggcggtcgctcggtcccgctgaggaggcgaagccggcggagtgtctgtgtgccggtctgcagcaccgcccccgcttcccgcacgccgcctctcacgccgacttcccttcctctgc

SEQ ID NO: 34315 - DNA, 2254 bp, Homo sapiens
attatgttcgtgtgatggatatggggcttttggagttaaccataactgcagtgaagtctgattctgatggagagcaaactgagccccgctttgagttacactgttccagcgatgttgtccatatcagaacgtgctcagactcttgtgctgcgttaatgaatctcattcagtacattgcaagctatggtgacttgcagacacctaacaaggcagatatgaagcctggagcctttcaaagaaggtctaaggtagattccagtggtcgatcatcctcacgtggtccagtacttcctgaagcagatcaacaaatgttacgagatctgatgagtgatgctatggaggagatcgacatgcaacaaggcacctcgtcagtaaaaccacaggctaatggtgttttggatgaaaaatctcaaattcaggagccatgttgttcagacctcttcctgtttcctgacgagagtgggaatgtatcccaggagtccggccccacctatgcctcattctctcaccatttcatcagtgatgcaatgacaggtgtgcccactgagaatgatgacttttgcattctttttgcaccaaaagcagccatgcaggagaaggaagaagaaccagttataaaaatcatggttgatgatgcaattgtgataagagacaattatttcagtctgcccgttaataagaccgatacgagcaaagcccccttacactttcccattcctgtgattcgctatgtggtgaaggaggtctctcttgtctggcatctttatggaggaaaggattttggaacagtccctcccacttctccggctaaaagttatattagtccccacagttcgccttctcacacacccacgagacatggacgtaatacagtatgtgggggaaaaggaaggaaccatgactttttaatggaaatacagctaagcaaggtgaagtttcagcatgaagtctacccgccatgcaaacctgattgtgattccagcctctcagaacacccagtctcccggcaggtgttcattgttcaggatcttgagattcgagatcgtttggcaacatcacaaatgaataaatttttatacctgtattgcagtaaagaaatgcctcgaaaagctcactccaacatgttgacagtgaaagccttacacgtgtgtccagaatctggcaggtccccacaggagtgctgcttgagagtgtcgctgatgccgctccgcctcaatattgaccaggatgctttgttcttcctgaaggatttcttcacaagtctttctgcagaagtagagcttcaaatgactccagatccagaagttaaaaagtctcctggagctgatgtcacctgcagtttgccaaggcatttgagtacctcaaaggagccaaatctggttatttctttctctgggccaaaacagccttcccaaaatgatagtgccaattcagtggaagtggttaatggcatggaagagaagaacttctctgctgaagaagcatcttttagggatcagcctgtgttttttagagaatttagattcacgtcagaagttcccattcgacttgattatcatggcaaacatgtatcaatggatcagggtacgctagctgggattttgattggtctggctcagttaaactgctctgaactaaagctcaagaggctttcctatcgacatggtttactaggcgttgacaaattattctcatatgcaatcactgagtggcttaatgacattaagaagaaccagctaccaggaatcctgggaggtgttggacctatgcattcactagtacaattagtacaaggcctaaaggacttggtctggctcccaatagagcagtaccggaaggatggccgcattgtcagagggtttcagagaggcgctgcttcctttggtacctcgacagcgatggctgctctagaactcacaaacagaatggttcaaaccatacaggcagctgcagagactgcttatgatatggtgtctcctggtaccctttctatcgagcccaagaagaccaaaaggtttcctcatcaccggttagcccaccagccagtagacctgagggaaggtgtggccaaggcctacagtgttgtgaaagaggtaactgaatacttgggtggacacatcagaacccttctgtgcgctttcccaactttcacctaaagagcatttaatggcttaaatgtattctgtagaaatccctgggagcagaatggcaactgccactaataacatgtgcccatatctgtgtgaggtgatgg

SEQ ID NO: 34316 - DNA, 1969 bp, Homo sapiens
attatgttcgtgtgatggatatggggcttttggagttaaccataactgcagtgaagtctgattctgatggagagcaaactgagccccgctttgagttacactgttccagcgatgttgtccatatcagaacgtgctcagactcttgtgctgcgttaatgaatctcattcagtacattgcaagctatggtgacttgcagacacctaacaaggcagatatgaagcctggagcctttcaaagaaggtctaaggtagattccagtggtcgatcatcctcacgtggtccagtacttcctgaagcagatcaacaaatgttacgagatctgatgagtgatgctatggaggagatcgacatgcaacaaggcacctcgtcagtaaaaccacaggctaatggtgttttggatgaaaaatctcaaattcaggagccatgttgttcagacctcttcctgtttcctgacgagagtgggaatgtatcccaggagtccggccccacctatgcctcattctctcaccatttcatcagtgatgcaatgacaggtgtgcccactgagaatgatgacttttgcattctttttgcaccaaaagcagccatgcaggagaaggaagaagaaccagttataaaaatcatggttgatgatgcaattgtgataagagacaattatttcagtctgcccgttaataagaccgatacgagcaaagcccccttacactttcccattcctgtgattcgctatgtggtgaaggaggtctctcttgtctggcatctttatggaggaaaggattttggaacagtccctcccacttctccggctaaaagttatattagtccccacagttcgccttctcacacacccacgagacatggacgtaatacagtatgtgggggaaaaggaaggaaccatgactttttaatggaaatacagctaagcaaggtgaagtttcagcatgaagtctacccgccatgcaaacctgattgtgattccagcctctcagaacacccagtctcccggcaggtgttcattgttcaggatcttgagattcgagatcgtttggcaacatcacaaatgaataaatttttatacctgtattgcagtaaagaaatgcctcgaaaagctcactccaacatgttgacagtgaaagccttacacgtgtgtccagaatctggcaggtccccacaggagtgctgcttgagagtgtcgctgatgccgctccgcctcaatattgaccaggatgctttgttcttcctgaaggatttcttcacaagtctttctgcagaagtagagcttcaaatgactccagatccagaagttaaaaagtctcctggagctgatgtcacctgcagtttgccaaggcatttgagtacctcaaaggagccaaatctggttatttctttctctgggccaaaacagccttcccaaaatgatagtgccaattcagtggaagtggttaatggcatggaagagaagaacttctctgctgaagaagcatcttttagggatcagcctgtgttttttagagaatttagattcacgtcagaagttcccattcgacttgattatcatggcaaacatgtatcaatggatcagggtacgctagctgggattttgattggtctggctcagttaaactgctctgaactaaagctcaagaggctttcctatcgacatggtttactaggcgttgacaaattattctcatatgcaatcactgagtggcttaatgacattaagaagaaccagctaccaggaatcctgggaggtgttggacctatgcattcactagtacaattagtacaaggcctaaaggacttggtctggctcccaatagagcagtaccggaaggatggccgcattgtcagagggtttcagagaggcgctgcttcctttggtacctcgacagcgatggctgctctagaactcacaaacagaatggttcaaaccatacaggtatctttttagactgccttagtcta

SEQ ID NO: 34317 - DNA, 1749 bp, Homo sapiens
attatgttcgtgtgatggatatggggcttttggagttaaccataactgcagtgaagtctgattctgatggagagcaaactgagccccgctttgagttacactgttccagcgatgttgtccatatcagaacgtgctcagactcttgtgctgcgttaatgaatctcattcagtacattgcaagctatggtgacttgcagacacctaacaaggcagatatgaagcctggagcctttcaaagaaggtctaaggtagattccagtggtcgatcatcctcacgtggtccagtacttcctgaagcagatcaacaaatgttacgagatctgatgagtgatgctatggaggagatcgacatgcaacaaggcacctcgtcagtaaaaccacaggctaatggtgttttggatgaaaaatctcaaattcaggagccatgttgttcagacctcttcctgtttcctgacgagagtgggaatgtatcccaggagtccggccccacctatgcctcattctctcaccatttcatcagtgatgcaatgacaggtgtgcccactgagaatgatgacttttgcattctttttgcaccaaaagcagccatgcaggagaaggaagaagaaccagttataaaaatcatggttgatgatgcaattgtgataagagacaattatttcagtctgcccgttaataagaccgatacgagcaaagcccccttacactttcccattcctgtgattcgctatgtggtgaaggaggtctctcttgtctggcatctttatggaggaaaggattttggaacagtccctcccacttctccggctaaaagttatattagtccccacagttcgccttctcacacacccacgagacatggacgtaatacagtatgtgggggaaaaggaaggaaccatgactttttaatggaaatacagctaagcaaggtgaagtttcagcatgaagtctacccgccatgcaaacctgattgtgattccagcctctcagaacacccagtctcccggcaggtgttcattgttcaggatcttgagattcgagatcgtttggcaacatcacaaatgaataaatttttatacctgtattgcagtaaagaaatgcctcgaaaagctcactccaacatgttgacagtgaaagccttacacgtgtgtccagaatctggcaggtccccacaggagtgctgcttgagagtgtcgctgatgccgctccgcctcaatattgaccaggatgctttgttcttcctgaaggatttcttcacaagtctttctgcagaagtagagcttcaaatgactccagatccagaagttaaaaagtctcctggagctgatgtcacctgcagtttgccaaggcatttgagtacctcaaaggagccaaatctggttatttctttctctgggccaaaacagccttcccaaaatgatagtgccaattcagtggaagtggttaatggcatggaagagaagaacttctctgctgaagaagcatcttttagggatcagcctgtgttttttaggcgcagtggactttggtgagatggcttaggatgtaaccaccaacattaattctgtgggaaaactgtgtttcaagttccaaacattgtttgcagccaacttttggaagccagatcattttgttagatgtgtaccatcagtgtacaaccagccctctatatctggaattctacatctgagattcaaccaaaatattaattaaaaaaggcaataaaaataatacaaattaaaaatacaa

SEQ ID NO: 34318 - DNA, 332 bp, Homo sapiens
gagaaaggagagtattggagggcactggcccgacagccaagtggagctgagtattcaggggatgggcgtgacctggggtctgaggcttctggtagtgattggtgtaaatatagcatctccattttgttgtaggcgcagtggactttggtgagatggcttaggatgtaaccaccaacattaattctgtgggaaaactgtgtttcaagttccaaacattgtttgcagccaacttttggaagccagatcattttgttagatgtgtaccatcagtgtacaaccagccctctatatctggaattctacatctgagattcaaccaaaatattaattaa

SEQ ID NO: 34319 - DNA, 808 bp, Homo sapiens
aatgcaacggggatggtgcagcctctctgatggggtttttgggaagatacaaatagataatataagtgcctggcatgatgtctggcatgtagtaaatgctcgatacatgtggatttctttcccttgttgaggggtggggaccacacgggagtaggaagcagttggggaggggtcagcagcctgtccctgcccctgccctcagctgagctcgggctcacgtgagagccctctgcccaatggggctgcgtctccaggtacagggccctgccagtcccatgctggctacttgcagcacccctctctcacccctagggaagcgctgcgaaggcagctgatggctgcagaacaggaggatgacgtggagggtgtgtgcaagcctctgtcctgcggctgggagatcacagacaccctgtgcgtgggccctgtcttcaccccagcgagcatcatgtgagtgggcctcgttccccccggagaatcccagcggggcctcagagatgcatctgggagaggtggggaagatggcaggcaagggtacccttggccaggactctggtgcccaccctgccacccccgcgctccacctgcagtgtttctgccctgtaaataggaccagtcttacactcgctgtagttcaagtatgcaacataaatcctgttccttccagctgtgtctgcctcctctgcagtgcaaggggcctggtcagccaggtgtgggggtgttcttggggtctcctttggtctccttcccacctttgtaaatataatgcaaataaataaatatttaggtttttaaaaactgaaaaggaatc

SEQ ID NO: 34320 - DNA, 2124 bp, Homo sapiens
ggcggggcctgggcggggttatataagccagcggcgggcggaaggcggggcgtgggggtctgtggctgctgggctggcggggcgcaggccgcgggacccgagcccggggaagcgagagagcggaggcgccgaggatccgattcactccctggggagacctatgggccgaagccgtgtaaatgcgttttaagcagaggcctcggctccgcaactgccactcctcctcggggtgttgcacaagtttcgaggtcaccggcgaccccccctagcagcgcgcctggctctggcccccgcgaaggaggacggagtttgtgtgttgcatactttctaaggcggcggctgcagcagcggctccatccagcccgtcagctcctcctgcaaggcatggctggctacctgagtgaatcggactttgtgatggtggaggagggcttcagtacccgagacctgctgaaggaactcactctgggggcctcacaggccaccacggacgaggtagctgccttcttcgtggctgacctgggtgccatagtgaggaagcacttttgctttctgaagtgcctgccacgagtccggcccttttatgctgtcaagtgcaacagcagcccaggtgtgctgaaggttctggcccagctggggctgggctttagctgtgccaacaaggcagagatggagttggtccagcatattggaatccctgccagtaagatcatctgcgccaacccctgtaagcaaattgcacagatcaaatatgctgccaagcatgggatccagctgctgagctttgacaatgagatggagctggcaaaggtggtaaagagccaccccagtgccaagatggttctgtgcattgctaccgatgactcccactccctgagctgcctgagcctaaagtttggagtgtcactgaaatcctgcagacacctgcttgaaaatgcgaagaagcaccatgtggaggtggtgggtgtgagttttcacattggcagtggctgtcctgaccctcaggcctatgctcagtccatcgcagacgcccggctcgtgtttgaaatgggcaccgagctgggtcacaagatgcacgttctggaccttggtggtggcttccctggcacagaaggggccaaagtgagatttgaagagattgcttccgtgatcaactcagccttggacctgtacttcccagagggctgtggcgtggacatctttgctgagctggggcgctactacgtgacctcggccttcactgtggcagtcagcatcattgccaagaaggaggttctgctagaccagcctggcagggaggaggaaaatggttccacctccaagaccatcgtgtaccaccttgatgagggcgtgtatgggatcttcaactcagtcctgtttgacaacatctgccctacccccatcctgcagaagaaaccatccacggagcagcccctgtacagcagcagcctgtggggcccggcggttgatggctgtgattgcgtggctgagggcctgtggctgccgcaactacacgtaggggactggctggtctttgacaacatgggcgcctacactgtgggcatgggttcccccttttgggggacccaggcctgccacatcacctatgccatgtcccgggtggcctgggaagcgctgcgaaggcagctgatggctgcagaacaggaggatgacgtggagggtgtgtgcaagcctctgtcctgcggctgggagatcacagacaccctgtgcgtgggccctgtcttcaccccagcgagcatcatgtgagtgggcctcgttccccccggagaatcccagcggggcctcagagatgcatctgggagaggtggggaagatggcaggcaagggtacccttggccaggactctggtgcccaccctgccacccccgcgctccacctgcagtgtttctgccctgtaaataggaccagtcttacactcgctgtagttcaagtatgcaacataaatcctgttccttccagctgtgtctgcctcctctgcagtgcaaggggcctggtcagccaggtgtgggggtgttcttggggtctcctttggtctccttcccacctttgtaaatataatgcaaataaataaatatttaggtttttaaaaactgaaaaggaatc

SEQ ID NO: 34321 - DNA, 831 bp, Homo sapiens
  misc_feature (789)..(789): n is a, c, g, or t
  misc_feature (795)..(795): n is a, c, g, or t
ggcggggcctgggcggggttatataagccagcggcgggcggaaggcggggcgtgggggtctgtggctgctgggctggcggggcgcaggccgcgggacccgagcccggggaagcgagagagcggaggcgccgaggatccgattcactccctggggagacctatgggccgaagccgtgtaaatgcgttttaagcagaggcctcggctccgcaactgccactcctcctcggggtgttgcacaagtttcgaggtcaccggcgaccccccctagcagcgcgcctggctctggcccccgcgaaggaggacggagtttggcagagatggagttggtccagcatattggaatccctgccagtaagatcatctgcgccaacccctgtaagcaaattgcacagatcaaatatgctgccaagcatgggatccagctgctgagctttgacaatgagatggagctggcaaaggtggtaaagagccaccccagtgccaagatggttctgtgcattgctaccgatgactcccactccctgagctgcctgagcctaaagtttggagtgtcactgaaatcctgcagacacctgcttgaaaatgcgaagaagcaccatgtggaggtggtgggtgtgagttttcacattggcagtggctgtcctgaccctcaggcctatgctcagtccatcgcagacgcccggctcgtgtttgaaatgggcaccgagctgggtcacaagatgcacgttctggaccttggtggtggcttccctggcacagaaggggccaaagtgagatttgaagagatngcttcngtgatcaagctcagactctccgggatcctctagact

SEQ ID NO: 34322 - DNA, 447 bp, Homo sapiens
ttgttttgtaacctgctttttccatttatatggggtgtagctctttccatgccattaactgatctttgacaacatgcttttgtattttaaccaatctaactctagtggttggctatttggtttcctctttttgagcactgtgaatatatgttgaggtttcagctctgtggtaaattcctggaagtagaaacagttcatatacagtgggtttttctgtaataacaggggaacaggaatacataaaacattcctcctagcctgtggaacccagcccagggcctccagcaattttaatgggcatctttgagaggataaagaaaaccagacatcattttatcttccgcatagcaatgccgtcagtttgttaattcatttaccagttgatggacaatggagttgttgctcacgagcctgggctgtgaagtgggactctgtaacaaaaaaaag

SEQ ID NO: 34323 - DNA, 2184 bp, Homo sapiens
ggcggggcctgggcggggttatataagccagcggcgggcggaaggcggggcgtgggggtctgtggctgctgggctggcggggcgcaggccgcgggacccgagcccggggaagcgagagagcggaggcgccgaggatccgattcactccctggggagacctatgggccgaagccgtgtaaatgcgttttaagcagaggcctcggctccgcaactgccactcctcctcggggtgttgcacaagtttcgaggtcaccggcgaccccccctagcagcgcgcctggctctggcccccgcgaaggaggacggagtttgtgtgttgcatactttctaaggcggcggctgcagcagcggctccatccagcccgtcagctcctcctgcaaggcatggctggctacctgagtgaatcggactttgtgatggtggaggagggcttcagtacccgagacctgctgaaggaactcactctgggggcctcacaggccaccacggacgaggtagctgccttcttcgtggctgacctgggtgccatagtgaggaagcacttttgctttctgaagtgcctgccacgagtccggcccttttatgctgtcaagtgcaacagcagcccaggtgtgctgaaggttctggcccagctggggctgggctttagctgtgccaacaaggcagagatggagttggtccagcatattggaatccctgccagtaagatcatctgcgccaacccctgtaagcaaattgcacagatcaaatatgctgccaagcatgggatccagctgctgagctttgacaatgagatggagctggcaaaggtggtaaagagccaccccagtgccaagatggttctgtgcattgctaccgatgactcccactccctgagctgcctgagcctaaagtttggagtgtcactgaaatcctgcagacacctgcttgaaaatgcgaagaagcaccatgtggaggtggtgggtgtgagttttcacattggcagtggctgtcctgaccctcaggcctatgctcagtccatcgcagacgcccggctcgtgtttgaaatgggcaccgagctgggtcacaagatgcacgttctggaccttggtggtggcttccctggcacagaaggggccaaagtgagatttgaagagattgcttccgtgatcaactcagccttggacctgtacttcccagagggctgtggcgtggacatctttgctgagctggggcgctactacgtgacctcggccttcactgtggcagtcagcatcattgccaagaaggaggttctgctagaccagcctggcagggaggccccactaccaccccctcacattgctacttgtgctgcctctgaaccctcccctcctgcagaggaaaatggttccacctccaagaccatcgtgtaccaccttgatgagggcgtgtatgggatcttcaactcagtcctgtttgacaacatctgccctacccccatcctgcagaagaaaccatccacggagcagcccctgtacagcagcagcctgtggggcccggcggttgatggctgtgattgcgtggctgagggcctgtggctgccgcaactacacgtaggggactggctggtctttgacaacatgggcgcctacactgtgggcatgggttcccccttttgggggacccaggcctgccacatcacctatgccatgtcccgggtggcctgggaagcgctgcgaaggcagctgatggctgcagaacaggaggatgacgtggagggtgtgtgcaagcctctgtcctgcggctgggagatcacagacaccctgtgcgtgggccctgtcttcaccccagcgagcatcatgtgagtgggcctcgttccccccggagaatcccagcggggcctcagagatgcatctgggagaggtggggaagatggcaggcaagggtacccttggccaggactctggtgcccaccctgccacccccgcgctccacctgcagtgtttctgccctgtaaataggaccagtcttacactcgctgtagttcaagtatgcaacataaatcctgttccttccagctgtgtctgcctcctctgcagtgcaaggggcctggtcagccaggtgtgggggtgttcttggggtctcctttggtctccttcccacctttgtaaatataatgcaaataaataaatatttaggtttttaaaaactgaaaaggaatc

SEQ ID NO: 34324 - DNA, 2217 bp, Homo sapiens
ggcggggcctgggcggggttatataagccagcggcgggcggaaggcggggcgtgggggtctgtggctgctgggctggcggggcgcaggccgcgggacccgagcccggggaagcgagagagcggaggcgccgaggatccgattcactccctggggagacctatgggccgaagccgtgtaaatgcgttttaaggcgagtgcggaaagtggcctggggagcctcggggagcggacgccctccgccctggtgctgacctgcctccctgccccttctgcctcctgtcagcagaggcctcggctccgcaactgccactcctcctcggggtgttgcacaagtttcgaggtcaccggcgaccccccctagcagcgcgcctggctctggcccccgcgaaggaggacggagtttgtgtgttgcatactttctaaggcggcggctgcagcagcggctccatccagcccgtcagctcctcctgcaaggcatggctggctacctgagtgaatcggactttgtgatggtggaggagggcttcagtacccgagacctgctgaaggaactcactctgggggcctcacaggccaccacggacgaggtagctgccttcttcgtggctgacctgggtgccatagtgaggaagcacttttgctttctgaagtgcctgccacgagtccggcccttttatgctgtcaagtgcaacagcagcccaggtgtgctgaaggttctggcccagctggggctgggctttagctgtgccaacaaggcagagatggagttggtccagcatattggaatccctgccagtaagatcatctgcgccaacccctgtaagcaaattgcacagatcaaatatgctgccaagcatgggatccagctgctgagctttgacaatgagatggagctggcaaaggtggtaaagagccaccccagtgccaagatggttctgtgcattgctaccgatgactcccactccctgagctgcctgagcctaaagtttggagtgtcactgaaatcctgcagacacctgcttgaaaatgcgaagaagcaccatgtggaggtggtgggtgtgagttttcacattggcagtggctgtcctgaccctcaggcctatgctcagtccatcgcagacgcccggctcgtgtttgaaatgggcaccgagctgggtcacaagatgcacgttctggaccttggtggtggcttccctggcacagaaggggccaaagtgagatttgaagagattgcttccgtgatcaactcagccttggacctgtacttcccagagggctgtggcgtggacatctttgctgagctggggcgctactacgtgacctcggccttcactgtggcagtcagcatcattgccaagaaggaggttctgctagaccagcctggcagggaggaggaaaatggttccacctccaagaccatcgtgtaccaccttgatgagggcgtgtatgggatcttcaactcagtcctgtttgacaacatctgccctacccccatcctgcagaagaaaccatccacggagcagcccctgtacagcagcagcctgtggggcccggcggttgatggctgtgattgcgtggctgagggcctgtggctgccgcaactacacgtaggggactggctggtctttgacaacatgggcgcctacactgtgggcatgggttcccccttttgggggacccaggcctgccacatcacctatgccatgtcccgggtggcctgggaagcgctgcgaaggcagctgatggctgcagaacaggaggatgacgtggagggtgtgtgcaagcctctgtcctgcggctgggagatcacagacaccctgtgcgtgggccctgtcttcaccccagcgagcatcatgtgagtgggcctcgttccccccggagaatcccagcggggcctcagagatgcatctgggagaggtggggaagatggcaggcaagggtacccttggccaggactctggtgcccaccctgccacccccgcgctccacctgcagtgtttctgccctgtaaataggaccagtcttacactcgctgtagttcaagtatgcaacataaatcctgttccttccagctgtgtctgcctcctctgcagtgcaaggggcctggtcagccaggtgtgggggtgttcttggggtctcctttggtctccttcccacctttgtaaatataatgcaaataaataaatatttaggtttttaaaaactgaaaaggaatc

SEQ ID NO: 34325 - DNA, 2336 bp, Homo sapiens
ggcggggcctgggcggggttatataagccagcggcgggcggaaggcggggcgtgggggtctgtggctgctgggctggcggggcgcaggccgcgggacccgagcccggggaagcgagagagcggaggcgccgaggatccgattcactccctggggagacctatgggccgaagccgtgtaaatgcgttttaagcagaggcctcggctccgcaactgccactcctcctcggggtgttgcacaagtttcgaggtcaccggcgaccccccctagcagcgcgcctggctctggcccccgcgaaggaggacggagtttggagcttgcggcccccacccaccgcgtggcgtccccaggcacgcctagaattctagcacctcaggatcagtccagcccccatttacaattggggaaactgcggctccgaaagggtcagagggtacccgaggtcaagcagtagagagcggactcgaacttaagctcttgctcttaggctgagacgccttgatgtggccaccggctaccctctagtgtgttgcatactttctaaggcggcggctgcagcagcggctccatccagcccgtcagctcctcctgcaaggcatggctggctacctgagtgaatcggactttgtgatggtggaggagggcttcagtacccgagacctgctgaaggaactcactctgggggcctcacaggccaccacggacgaggtagctgccttcttcgtggctgacctgggtgccatagtgaggaagcacttttgctttctgaagtgcctgccacgagtccggcccttttatgctgtcaagtgcaacagcagcccaggtgtgctgaaggttctggcccagctggggctgggctttagctgtgccaacaaggcagagatggagttggtccagcatattggaatccctgccagtaagatcatctgcgccaacccctgtaagcaaattgcacagatcaaatatgctgccaagcatgggatccagctgctgagctttgacaatgagatggagctggcaaaggtggtaaagagccaccccagtgccaagatggttctgtgcattgctaccgatgactcccactccctgagctgcctgagcctaaagtttggagtgtcactgaaatcctgcagacacctgcttgaaaatgcgaagaagcaccatgtggaggtggtgggtgtgagttttcacattggcagtggctgtcctgaccctcaggcctatgctcagtccatcgcagacgcccggctcgtgtttgaaatgggcaccgagctgggtcacaagatgcacgttctggaccttggtggtggcttccctggcacagaaggggccaaagtgagatttgaagagattgcttccgtgatcaactcagccttggacctgtacttcccagagggctgtggcgtggacatctttgctgagctggggcgctactacgtgacctcggccttcactgtggcagtcagcatcattgccaagaaggaggttctgctagaccagcctggcagggaggaggaaaatggttccacctccaagaccatcgtgtaccaccttgatgagggcgtgtatgggatcttcaactcagtcctgtttgacaacatctgccctacccccatcctgcagaagaaaccatccacggagcagcccctgtacagcagcagcctgtggggcccggcggttgatggctgtgattgcgtggctgagggcctgtggctgccgcaactacacgtaggggactggctggtctttgacaacatgggcgcctacactgtgggcatgggttcccccttttgggggacccaggcctgccacatcacctatgccatgtcccgggtggcctgggaagcgctgcgaaggcagctgatggctgcagaacaggaggatgacgtggagggtgtgtgcaagcctctgtcctgcggctgggagatcacagacaccctgtgcgtgggccctgtcttcaccccagcgagcatcatgtgagtgggcctcgttccccccggagaatcccagcggggcctcagagatgcatctgggagaggtggggaagatggcaggcaagggtacccttggccaggactctggtgcccaccctgccacccccgcgctccacctgcagtgtttctgccctgtaaataggaccagtcttacactcgctgtagttcaagtatgcaacataaatcctgttccttccagctgtgtctgcctcctctgcagtgcaaggggcctggtcagccaggtgtgggggtgttcttggggtctcctttggtctccttcccacctttgtaaatataatgcaaataaataaatatttaggtttttaaaaactgaaaaggaatc

SEQ ID NO: 34326 - DNA, 2161 bp, Homo sapiens
ggcggggcctgggcggggttatataagccagcggcgggcggaaggcggggcgtgggggtctgtggctgctgggctggcggggcgcaggccgcgggacccgagcccggggaagcgagagagcggaggcgccgaggatccgattcactccctggggagacctatgggccgaagccgtgtaaatgcgttttaagcagaggcctcggctccgcaactgccactcctcctcggggtgttgcacaagtttcgaggtcaccggcgaccccccctagcagcgcgcctggctctggcccccgcgaaggaggacggagtttgtgtgttgcatactttctaaggcggcggctgcagcagcggctccatccagcccgtcagctcctcctgcaaggcatggctggctacctgagtgaatcggactttgtgatggtggaggagggcttcagtacccgagacctgctgaaggaactcactctgggggcctcacaggccaccacggacgaggtagctgccttcttcgtggctgacctgggtgccatagtgaggaagcacttttgctttctgaagtgcctgccacgagtccggcccttttatgctgtcaagtgcaacagcagcccaggtgtgctgaaggttctggcccagctggggctgggctttagctgtgccaacaaggcagagatggagttggtccagcatattggaatccctgccagtaagatcatctgcgccaacccctgtaagcaaattgcacagatcaaatatgctgccaagcatgggatccagctgctgagctttgacaatgagatggagctggcaaaggtggtaaagagccaccccagtgccaaggtttgtccagcagaggggcactgcgtgtctcatcaggatggttctgtgcattgctaccgatgactcccactccctgagctgcctgagcctaaagtttggagtgtcactgaaatcctgcagacacctgcttgaaaatgcgaagaagcaccatgtggaggtggtgggtgtgagttttcacattggcagtggctgtcctgaccctcaggcctatgctcagtccatcgcagacgcccggctcgtgtttgaaatgggcaccgagctgggtcacaagatgcacgttctggaccttggtggtggcttccctggcacagaaggggccaaagtgagatttgaagagattgcttccgtgatcaactcagccttggacctgtacttcccagagggctgtggcgtggacatctttgctgagctggggcgctactacgtgacctcggccttcactgtggcagtcagcatcattgccaagaaggaggttctgctagaccagcctggcagggaggaggaaaatggttccacctccaagaccatcgtgtaccaccttgatgagggcgtgtatgggatcttcaactcagtcctgtttgacaacatctgccctacccccatcctgcagaagaaaccatccacggagcagcccctgtacagcagcagcctgtggggcccggcggttgatggctgtgattgcgtggctgagggcctgtggctgccgcaactacacgtaggggactggctggtctttgacaacatgggcgcctacactgtgggcatgggttcccccttttgggggacccaggcctgccacatcacctatgccatgtcccgggtggcctgggaagcgctgcgaaggcagctgatggctgcagaacaggaggatgacgtggagggtgtgtgcaagcctctgtcctgcggctgggagatcacagacaccctgtgcgtgggccctgtcttcaccccagcgagcatcatgtgagtgggcctcgttccccccggagaatcccagcggggcctcagagatgcatctgggagaggtggggaagatggcaggcaagggtacccttggccaggactctggtgcccaccctgccacccccgcgctccacctgcagtgtttctgccctgtaaataggaccagtcttacactcgctgtagttcaagtatgcaacataaatcctgttccttccagctgtgtctgcctcctctgcagtgcaaggggcctggtcagccaggtgtgggggtgttcttggggtctcctttggtctccttcccacctttgtaaatataatgcaaataaataaatatttaggtttttaaaaactgaaaaggaatc

SEQ ID NO: 34327 - DNA, 2204 bp, Homo sapiens
ggcggggcctgggcggggttatataagccagcggcgggcggaaggcggggcgtgggggtctgtggctgctgggctggcggggcgcaggccgcgggacccgagcccggggaagcgagagagcggaggcgccgaggatccgattcactccctggggagacctatgggccgaagccgtgtaaatgcgttttaagcagaggcctcggctccgcaactgccactcctcctcggggtgttgcacaagtttcgaggtcaccggcgaccccccctagcagcgcgcctggctctggcccccgcgaaggaggacggagtttgtgtgttgcatactttctaaggcggcggctgcagcagcggctccatccagcccgtcagctcctcctgcaaggcatggctggctacctgagtgaatcggactttgtgatggtggaggagggcttcagtacccgagacctgctgaaggaactcactctgggggcctcacaggccaccacggcagattttctattttctttctccatgcccctgcattgcaccttgtagaaactgccatctaacatctgctgaatggacttgacgaggtagctgccttcttcgtggctgacctgggtgccatagtgaggaagcacttttgctttctgaagtgcctgccacgagtccggcccttttatgctgtcaagtgcaacagcagcccaggtgtgctgaaggttctggcccagctggggctgggctttagctgtgccaacaaggcagagatggagttggtccagcatattggaatccctgccagtaagatcatctgcgccaacccctgtaagcaaattgcacagatcaaatatgctgccaagcatgggatccagctgctgagctttgacaatgagatggagctggcaaaggtggtaaagagccaccccagtgccaagatggttctgtgcattgctaccgatgactcccactccctgagctgcctgagcctaaagtttggagtgtcactgaaatcctgcagacacctgcttgaaaatgcgaagaagcaccatgtggaggtggtgggtgtgagttttcacattggcagtggctgtcctgaccctcaggcctatgctcagtccatcgcagacgcccggctcgtgtttgaaatgggcaccgagctgggtcacaagatgcacgttctggaccttggtggtggcttccctggcacagaaggggccaaagtgagatttgaagagattgcttccgtgatcaactcagccttggacctgtacttcccagagggctgtggcgtggacatctttgctgagctggggcgctactacgtgacctcggccttcactgtggcagtcagcatcattgccaagaaggaggttctgctagaccagcctggcagggaggaggaaaatggttccacctccaagaccatcgtgtaccaccttgatgagggcgtgtatgggatcttcaactcagtcctgtttgacaacatctgccctacccccatcctgcagaagaaaccatccacggagcagcccctgtacagcagcagcctgtggggcccggcggttgatggctgtgattgcgtggctgagggcctgtggctgccgcaactacacgtaggggactggctggtctttgacaacatgggcgcctacactgtgggcatgggttcccccttttgggggacccaggcctgccacatcacctatgccatgtcccgggtggcctgggaagcgctgcgaaggcagctgatggctgcagaacaggaggatgacgtggagggtgtgtgcaagcctctgtcctgcggctgggagatcacagacaccctgtgcgtgggccctgtcttcaccccagcgagcatcatgtgagtgggcctcgttccccccggagaatcccagcggggcctcagagatgcatctgggagaggtggggaagatggcaggcaagggtacccttggccaggactctggtgcccaccctgccacccccgcgctccacctgcagtgtttctgccctgtaaataggaccagtcttacactcgctgtagttcaagtatgcaacataaatcctgttccttccagctgtgtctgcctcctctgcagtgcaaggggcctggtcagccaggtgtgggggtgttcttggggtctcctttggtctccttcccacctttgtaaatataatgcaaataaataaatatttaggtttttaaaaactgaaaaggaatc

SEQ ID NO: 34328 - DNA, 2249 bp, Homo sapiens
ggcggggcctgggcggggttatataagccagcggcgggcggaaggcggggcgtgggggtctgtggctgctgggctggcggggcgcaggccgcgggacccgagcccggggaagcgagagagcggaggcgccgaggatccgattcactccctggggagacctatgggccgaagccgtgtaaatgcgttttaagcagaggcctcggctccgcaactgccactcctcctcggggtgttgcacaagtttcgaggtcaccggcgaccccccctagcagcgcgcctggctctggcccccgcgaaggaggacggagtttgtgtgttgcatactttctaaggcggcggctgcagcagcggctccatccagcccgtcagctcctcctgcaaggcatggctggctacctgagtgaatcggactttgtgatggtggaggagggcttcagtacccgagacctgctgaaggaactcactctgggggcctcacaggccaccacgtcattccttgcttctcatcagtgttgcctttcctgatcgccccaggcagattttctattttctttctccatgcccctgcattgcaccttgtagaaactgccatctaacatctgctgaatggacttgacgaggtagctgccttcttcgtggctgacctgggtgccatagtgaggaagcacttttgctttctgaagtgcctgccacgagtccggcccttttatgctgtcaagtgcaacagcagcccaggtgtgctgaaggttctggcccagctggggctgggctttagctgtgccaacaaggcagagatggagttggtccagcatattggaatccctgccagtaagatcatctgcgccaacccctgtaagcaaattgcacagatcaaatatgctgccaagcatgggatccagctgctgagctttgacaatgagatggagctggcaaaggtggtaaagagccaccccagtgccaagatggttctgtgcattgctaccgatgactcccactccctgagctgcctgagcctaaagtttggagtgtcactgaaatcctgcagacacctgcttgaaaatgcgaagaagcaccatgtggaggtggtgggtgtgagttttcacattggcagtggctgtcctgaccctcaggcctatgctcagtccatcgcagacgcccggctcgtgtttgaaatgggcaccgagctgggtcacaagatgcacgttctggaccttggtggtggcttccctggcacagaaggggccaaagtgagatttgaagagattgcttccgtgatcaactcagccttggacctgtacttcccagagggctgtggcgtggacatctttgctgagctggggcgctactacgtgacctcggccttcactgtggcagtcagcatcattgccaagaaggaggttctgctagaccagcctggcagggaggaggaaaatggttccacctccaagaccatcgtgtaccaccttgatgagggcgtgtatgggatcttcaactcagtcctgtttgacaacatctgccctacccccatcctgcagaagaaaccatccacggagcagcccctgtacagcagcagcctgtggggcccggcggttgatggctgtgattgcgtggctgagggcctgtggctgccgcaactacacgtaggggactggctggtctttgacaacatgggcgcctacactgtgggcatgggttcccccttttgggggacccaggcctgccacatcacctatgccatgtcccgggtggcctgggaagcgctgcgaaggcagctgatggctgcagaacaggaggatgacgtggagggtgtgtgcaagcctctgtcctgcggctgggagatcacagacaccctgtgcgtgggccctgtcttcaccccagcgagcatcatgtgagtgggcctcgttccccccggagaatcccagcggggcctcagagatgcatctgggagaggtggggaagatggcaggcaagggtacccttggccaggactctggtgcccaccctgccacccccgcgctccacctgcagtgtttctgccctgtaaataggaccagtcttacactcgctgtagttcaagtatgcaacataaatcctgttccttccagctgtgtctgcctcctctgcagtgcaaggggcctggtcagccaggtgtgggggtgttcttggggtctcctttggtctccttcccacctttgtaaatataatgcaaataaataaatatttaggtttttaaaaactgaaaaggaatc

SEQ ID NO: 34329 - DNA, 1473 bp, Homo sapiens
ggcggggcctgggcggggttatataagccagcggcgggcggaaggcggggcgtgggggtctgtggctgctgggctggcggggcgcaggccgcgggacccgagcccggggaagcgagagagcggaggcgccgaggatccgattcactccctggggagacctatgggccgaagccgtgtaaatgcgttttaagcagaggcctcggctccgcaactgccactcctcctcggggtgttgcacaagtttcgaggtcaccggcgaccccccctagcagcgcgcctggctctggcccccgcgaaggaggacggagtttgtgtgttgcatactttctaaggcggcggctgcagcagcggctccatccagcccgtcagctcctcctgcaaggcatggctggctacctgagtgaatcggactttgtgatggtggaggagggcttcagtacccgagacctgctgaaggaactcactctgggggcctcacaggccaccacggacgaggtagctgccttcttcgtggctgacctgggtgccatagtgaggaagcacttttgctttctgaagtgcctgccacgagtccggcccttttatgctgtcaagtgcaacagcagcccaggtgtgctgaaggttctggcccagctggggctgggctttagctgtgccaacaaggcagagatggagttggtccagcatattggaatccctgccagtaagatcatctgcgccaacccctgtaagcaaattgcacagatcaaatatgctgccaagcatgggatccagctgctgagctttgacaatgagatggagctggcaaaggtggtaaagagccaccccagtgccaagatggttctgtgcattgctaccgatgactcccactccctgagctgcctgagcctaaagtttggagtgtcactgaaatcctgcagacacctgcttgaaaatgcgaagaagcaccatgtggaggtggtgggtgtgagttttcacattggcagtggctgtcctgaccctcaggcctatgctcagtccatcgcagacgcccggctcgtgtttgaaatgggcaccgagctgggtcacaagatgcacgttctggaccttggtggtggcttccctggcacagaaggggccaaagtgagatttgaagagattgcttccgtgatcaactcagccttggacctgtacttcccagagggctgtggcgtggacatctttgctgagctggggcgctactacgtgacctcggccttcactgtggcagtcagcatcattgccaagaaggaggttctgctagaccagcctggcagggaggaggaaaatggttccacctccaagaccatcgtgtaccaccttgatgagggcgtgtatgggatcttcaactcagtcctgtttgacaacatctgccctacccccatcctgcagaagtctaagaaccactcaccctgctacatgtctctagagtccattcatttcattgccgtgtag

SEQ ID NO: 34330 - DNA, 1950 bp, Homo sapiens
ggcggggcctgggcggggttatataagccagcggcgggcggaaggcggggcgtgggggtctgtggctgctgggctggcggggcgcaggccgcgggacccgagcccggggaagcgagagagcggaggcgccgaggatccgattcactccctggggagacctatgggccgaagccgtgtaaatgcgttttaagcagaggcctcggctccgcaactgccactcctcctcggggtgttgcacaagtttcgaggtcaccggcgaccccccctagcagcgcgcctggctctggcccccgcgaaggaggacggagtttgtgtgttgcatactttctaaggcggcggctgcagcagcggctccatccagcccgtcagctcctcctgcaaggcatggctggctacctgagtgaatcggactttgtgatggtggaggagggcttcagtacccgagacctgctgaaggaactcactctgggggcctcacaggccaccacggcagagatggagttggtccagcatattggaatccctgccagtaagatcatctgcgccaacccctgtaagcaaattgcacagatcaaatatgctgccaagcatgggatccagctgctgagctttgacaatgagatggagctggcaaaggtggtaaagagccaccccagtgccaagatggttctgtgcattgctaccgatgactcccactccctgagctgcctgagcctaaagtttggagtgtcactgaaatcctgcagacacctgcttgaaaatgcgaagaagcaccatgtggaggtggtgggtgtgagttttcacattggcagtggctgtcctgaccctcaggcctatgctcagtccatcgcagacgcccggctcgtgtttgaaatgggcaccgagctgggtcacaagatgcacgttctggaccttggtggtggcttccctggcacagaaggggccaaagtgagatttgaagagattgcttccgtgatcaactcagccttggacctgtacttcccagagggctgtggcgtggacatctttgctgagctggggcgctactacgtgacctcggccttcactgtggcagtcagcatcattgccaagaaggaggttctgctagaccagcctggcagggaggaggaaaatggttccacctccaagaccatcgtgtaccaccttgatgagggcgtgtatgggatcttcaactcagtcctgtttgacaacatctgccctacccccatcctgcagaagaaaccatccacggagcagcccctgtacagcagcagcctgtggggcccggcggttgatggctgtgattgcgtggctgagggcctgtggctgccgcaactacacgtaggggactggctggtctttgacaacatgggcgcctacactgtgggcatgggttcccccttttgggggacccaggcctgccacatcacctatgccatgtcccgggtggcctgggaagcgctgcgaaggcagctgatggctgcagaacaggaggatgacgtggagggtgtgtgcaagcctctgtcctgcggctgggagatcacagacaccctgtgcgtgggccctgtcttcaccccagcgagcatcatgtgagtgggcctcgttccccccggagaatcccagcggggcctcagagatgcatctgggagaggtggggaagatggcaggcaagggtacccttggccaggactctggtgcccaccctgccacccccgcgctccacctgcagtgtttctgccctgtaaataggaccagtcttacactcgctgtagttcaagtatgcaacataaatcctgttccttccagctgtgtctgcctcctctgcagtgcaaggggcctggtcagccaggtgtgggggtgttcttggggtctcctttggtctccttcccacctttgtaaatataatgcaaataaataaatatttaggtttttaaaaactgaaaaggaatc

SEQ ID NO: 34331 - DNA, 1947 bp, Homo sapiens
ggcggggcctgggcggggttatataagccagcggcgggcggaaggcggggcgtgggggtctgtggctgctgggctggcggggcgcaggccgcgggacccgagcccggggaagcgagagagcggaggcgccgaggatccgattcactccctggggagacctatgggccgaagccgtgtaaatgcgttttaagcagaggcctcggctccgcaactgccactcctcctcggggtgttgcacaagtttcgaggtcaccggcgaccccccctagcagcgcgcctggctctggcccccgcgaaggaggacggagtttggacgaggtagctgccttcttcgtggctgacctgggtgccatagtgaggaagcacttttgctttctgaagtgcctgccacgagtccggcccttttatgctgtcaagtgcaacagcagcccaggtgtgctgaaggttctggcccagctggggctgggctttagctgtgccaacaaggcagagatggagttggtccagcatattggaatccctgccagtaagatcatctgcgccaacccctgtaagcaaattgcacagatcaaatatgctgccaagcatgggatccagctgctgagctttgacaatgagatggagctggcaaaggtggtaaagagccaccccagtgccaagatggttctgtgcattgctaccgatgactcccactccctgagctgcctgagcctaaagtttggagtgtcactgaaatcctgcagacacctgcttgaaaatgcgaagaagcaccatgtggaggtggtgggtgtgagttttcacattggcagtggctgtcctgaccctcaggcctatgctcagtccatcgcagacgcccggctcgtgtttgaaatgggcaccgagctgggtcacaagatgcacgttctggaccttggtggtggcttccctggcacagaaggggccaaagtgagatttgaagagattgcttccgtgatcaactcagccttggacctgtacttcccagagggctgtggcgtggacatctttgctgagctggggcgctactacgtgacctcggccttcactgtggcagtcagcatcattgccaagaaggaggttctgctagaccagcctggcagggaggaggaaaatggttccacctccaagaccatcgtgtaccaccttgatgagggcgtgtatgggatcttcaactcagtcctgtttgacaacatctgccctacccccatcctgcagaagaaaccatccacggagcagcccctgtacagcagcagcctgtggggcccggcggttgatggctgtgattgcgtggctgagggcctgtggctgccgcaactacacgtaggggactggctggtctttgacaacatgggcgcctacactgtgggcatgggttcccccttttgggggacccaggcctgccacatcacctatgccatgtcccgggtggcctgggaagcgctgcgaaggcagctgatggctgcagaacaggaggatgacgtggagggtgtgtgcaagcctctgtcctgcggctgggagatcacagacaccctgtgcgtgggccctgtcttcaccccagcgagcatcatgtgagtgggcctcgttccccccggagaatcccagcggggcctcagagatgcatctgggagaggtggggaagatggcaggcaagggtacccttggccaggactctggtgcccaccctgccacccccgcgctccacctgcagtgtttctgccctgtaaataggaccagtcttacactcgctgtagttcaagtatgcaacataaatcctgttccttccagctgtgtctgcctcctctgcagtgcaaggggcctggtcagccaggtgtgggggtgttcttggggtctcctttggtctccttcccacctttgtaaatataatgcaaataaataaatatttaggtttttaaaaactgaaaaggaatc

SEQ ID NO: 34332 - DNA, 1600 bp, Homo sapiens
ggcggggcctgggcggggttatataagccagcggcgggcggaaggcggggcgtgggggtctgtggctgctgggctggcggggcgcaggccgcgggacccgagcccggggaagcgagagagcggaggcgccgaggatccgattcactccctggggagacctatgggccgaagccgtgtaaatgcgttttaagcagaggcctcggctccgcaactgccactcctcctcggggtgttgcacaagtttcgaggtcaccggcgaccccccctagcagcgcgcctggctctggcccccgcgaaggaggacggagtttggatggttctgtgcattgctaccgatgactcccactccctgagctgcctgagcctaaagtttggagtgtcactgaaatcctgcagacacctgcttgaaaatgcgaagaagcaccatgtggaggtggtgggtgtgagttttcacattggcagtggctgtcctgaccctcaggcctatgctcagtccatcgcagacgcccggctcgtgtttgaaatgggcaccgagctgggtcacaagatgcacgttctggaccttggtggtggcttccctggcacagaaggggccaaagtgagatttgaagagattgcttccgtgatcaactcagccttggacctgtacttcccagagggctgtggcgtggacatctttgctgagctggggcgctactacgtgacctcggccttcactgtggcagtcagcatcattgccaagaaggaggttctgctagaccagcctggcagggaggaggaaaatggttccacctccaagaccatcgtgtaccaccttgatgagggcgtgtatgggatcttcaactcagtcctgtttgacaacatctgccctacccccatcctgcagaagaaaccatccacggagcagcccctgtacagcagcagcctgtggggcccggcggttgatggctgtgattgcgtggctgagggcctgtggctgccgcaactacacgtaggggactggctggtctttgacaacatgggcgcctacactgtgggcatgggttcccccttttgggggacccaggcctgccacatcacctatgccatgtcccgggtggcctgggaagcgctgcgaaggcagctgatggctgcagaacaggaggatgacgtggagggtgtgtgcaagcctctgtcctgcggctgggagatcacagacaccctgtgcgtgggccctgtcttcaccccagcgagcatcatgtgagtgggcctcgttccccccggagaatcccagcggggcctcagagatgcatctgggagaggtggggaagatggcaggcaagggtacccttggccaggactctggtgcccaccctgccacccccgcgctccacctgcagtgtttctgccctgtaaataggaccagtcttacactcgctgtagttcaagtatgcaacataaatcctgttccttccagctgtgtctgcctcctctgcagtgcaaggggcctggtcagccaggtgtgggggtgttcttggggtctcctttggtctccttcccacctttgtaaatataatgcaaataaataaatatttaggtttttaaaaactgaaaaggaatc

SEQ ID NO: 34333 - DNA, 1510 bp, Homo sapiens
ggcggggcctgggcggggttatataagccagcggcgggcggaaggcggggcgtgggggtctgtggctgctgggctggcggggcgcaggccgcgggacccgagcccggggaagcgagagagcggaggcgccgaggatccgattcactccctggggagacctatgggccgaagccgtgtaaatgcgttttaagcagaggcctcggctccgcaactgccactcctcctcggggtgttgcacaagtttcgaggtcaccggcgaccccccctagcagcgcgcctggctctggcccccgcgaaggaggacggagtttgtgtgttgcatactttctaaggcggcggctgcagcagcggctccatccagcccgtcagctcctcctgcaaggcatggctggctacctgagtgaatcggactttgtgatggtggaggagggcttcagtacccgagacctgctgaaggaactcactctgggggcctcacaggccaccacggacgaggtagctgccttcttcgtggctgacctgggtgccatagtgaggaagcacttttgctttctgaagtgcctgccacgagtccggcccttttatgctgtcaagtgcaacagcagcccaggtgtgctgaaggttctggcccagctggggctgggctttagctgtgccaacaaggcagagatggagttggtccagcatattggaatccctgccagtaagatcatctgcgccaacccctgtaagcaaattgcacagatcaaatatgctgccaagcatgggatccagctgctgagctttgacaatgagatggagctggcaaaggtggtaaagagccaccccagtgccaaggtttgtccagcagaggggcactgcgtgtctcatcaggatggttctgtgcattgctaccgatgactcccactccctgagctgcctgagcctaaagtttggagtgtcactgaaatcctgcagacacctgcttgaaaatgcgaagaagcaccatgtggaggtggtgggtgtgagttttcacattggcagtggctgtcctgaccctcaggcctatgctcagtccatcgcagacgcccggctcgtgtttgaaatgggcaccgagctgggtcacaagatgcacgttctggaccttggtggtggcttccctggcacagaaggggccaaagtgagatttgaagagattgcttccgtgatcaactcagccttggacctgtacttcccagagggctgtggcgtggacatctttgctgagctggggcgctactacgtgacctcggccttcactgtggcagtcagcatcattgccaagaaggaggttctgctagaccagcctggcagggaggaggaaaatggttccacctccaagaccatcgtgtaccaccttgatgagggcgtgtatgggatcttcaactcagtcctgtttgacaacatctgccctacccccatcctgcagaagtctaagaaccactcaccctgctacatgtctctagagtccattcatttcattgccgtgtag

SEQ ID NO: 34334 - DNA, 1182 bp, Homo sapiens
  misc_feature (1140)..(1140): n is a, c, g, or t
  misc_feature (1146)..(1146): n is a, c, g, or t
ggcggggcctgggcggggttatataagccagcggcgggcggaaggcggggcgtgggggtctgtggctgctgggctggcggggcgcaggccgcgggacccgagcccggggaagcgagagagcggaggcgccgaggatccgattcactccctggggagacctatgggccgaagccgtgtaaatgcgttttaagcagaggcctcggctccgcaactgccactcctcctcggggtgttgcacaagtttcgaggtcaccggcgaccccccctagcagcgcgcctggctctggcccccgcgaaggaggacggagtttgtgtgttgcatactttctaaggcggcggctgcagcagcggctccatccagcccgtcagctcctcctgcaaggcatggctggctacctgagtgaatcggactttgtgatggtggaggagggcttcagtacccgagacctgctgaaggaactcactctgggggcctcacaggccaccacggacgaggtagctgccttcttcgtggctgacctgggtgccatagtgaggaagcacttttgctttctgaagtgcctgccacgagtccggcccttttatgctgtcaagtgcaacagcagcccaggtgtgctgaaggttctggcccagctggggctgggctttagctgtgccaacaaggcagagatggagttggtccagcatattggaatccctgccagtaagatcatctgcgccaacccctgtaagcaaattgcacagatcaaatatgctgccaagcatgggatccagctgctgagctttgacaatgagatggagctggcaaaggtggtaaagagccaccccagtgccaagatggttctgtgcattgctaccgatgactcccactccctgagctgcctgagcctaaagtttggagtgtcactgaaatcctgcagacacctgcttgaaaatgcgaagaagcaccatgtggaggtggtgggtgtgagttttcacattggcagtggctgtcctgaccctcaggcctatgctcagtccatcgcagacgcccggctcgtgtttgaaatgggcaccgagctgggtcacaagatgcacgttctggaccttggtggtggcttccctggcacagaaggggccaaagtgagatttgaagagatngcttcngtgatcaagctcagactctccgggatcctctagact

SEQ ID NO: 34335 - DNA, 1412 bp, Homo sapiens
ggcggggcctgggcggggttatataagccagcggcgggcggaaggcggggcgtgggggtctgtggctgctgggctggcggggcgcaggccgcgggacccgagcccggggaagcgagagagcggaggcgccgaggatccgattcactccctggggagacctatgggccgaagccgtgtaaatgcgttttaagcagaggcctcggctccgcaactgccactcctcctcggggtgttgcacaagtttcgaggtcaccggcgaccccccctagcagcgcgcctggctctggcccccgcgaaggaggacggagtttgtgtgttgcatactttctaaggcggcggctgcagcagcggctccatccagcccgtcagctcctcctgcaaggcatggctggctacctgagtgaatcggactttgtgatggtggaggagggcttcagtacccgagacctgctgaaggaactcactctgggggcctcacaggccaccacggacgaggtagctgccttcttcgtggctgacctgggtgccatagtgaggaagcacttttgctttctgaagtgcctgccacgagtccggcccttttatgctgtcaagtgcaacagcagcccaggtgtgctgaaggttctggcccagctggggctgggctttagctgtgccaacaaggcagagatggagttggtccagcatattggaatccctgccagtaagatcatctgcgccaacccctgtaagcaaattgcacagatcaaatatgctgccaagcatgggatccagctgctgagctttgacaatgagatggagctggcaaaggtggtaaagagccaccccagtgccaagatggttctgtgcattgctaccgatgactcccactccctgagctgcctgagcctaaagtttggagtgtcactgaaatcctgcagacacctgcttgaaaatgcgaagaagcaccatgtggaggtggtgggtgtgagttttcacattggcagtggctgtcctgaccctcaggcctatgctcagtccatcgcagacgcccggctcgtgtttgaaatgggcaccgagctgggtcacaagatgcacgttctggaccttggtggtggcttccctggcacagaaggggccaaagtgagatttgaagagattgcttccgtgatcaactcagccttggacctgtacttcccagagggctgtggcgtggacatctttgctgagctggggcgctactacgtgacctcggccttcactgtggcagtcagcatcattgccaagaaggaggttctgctagaccagcctggcagggagggtaggtgccaggtgggcagtggagccctgttctcccctgaagcttcagatagtggttggctgagcaggatctggttttagacccagtggcagaggatgggggaatctggaga

SEQ ID NO: 34336 - DNA, 999 bp, Homo sapiens
ggcggggcctgggcggggttatataagccagcggcgggcggaaggcggggcgtgggggtctgtggctgctgggctggcggggcgcaggccgcgggacccgagcccggggaagcgagagagcggaggcgccgaggatccgattcactccctggggagacctatgggccgaagccgtgtaaatgcgttttaagcagaggcctcggctccgcaactgccactcctcctcggggtgttgcacaagtttcgaggtcaccggcgaccccccctagcagcgcgcctggctctggcccccgcgaaggaggacggagtttgtgtgttgcatactttctaaggcggcggctgcagcagcggctccatccagcccgtcagctcctcctgcaaggcatggctggctacctgagtgaatcggactttgtgatggtggaggagggcttcagtacccgagacctgctgaaggaactcactctgggggcctcacaggccaccacggacgaggtagctgccttcttcgtggctgacctgggtgccatagtgaggaagcacttttgctttctgaagtgcctgccacgagtccggcccttttatgctgtcaagtgcaacagcagcccaggtgtgctgaaggttctggcccagctggggctgggctttagctgtgccaacaagattgcttccgtgatcaactcagccttggacctgtacttcccagagggctgtggcgtggacatctttgctgagctggggcgctactacgtgacctcggccttcactgtggcagtcagcatcattgccaagaaggaggttctgctagaccagcctggcagggaggaggaaaatggttccacctccaagaccatcgtgtaccaccttgatgagggcgtgtatgggatcttcaactcagtcctgtttgacaacatctgccctacccccatcctgcagaagtctaagaaccactcaccctgctacatgtctctagagtccattcatttcattgccgtgtag

SEQ ID NO: 34337 - DNA, 372 bp, Homo sapiens
acaagcacgaggctctctacccagctctgtccccctcctaccttcttggccagctgtccacagttatcagctggggccttagcagctgccaaatccttcttccggaaatcaaagcagctttcaagaaatagacttggagctgtagcaagtcttcagcataaagcccacatttcaaacacataattgtctccccattctcctcctaccagattgcttccgtgatcaactcagccttggacctgtacttcccagagggctgtggcgtggacatctttgctgagctggggcgctactacgtgacctcggccttcactgtggcagtcagcatcattgccaagaaggaggttctgctagaccagcctggcagggagg

SEQ ID NO: 34338 - DNA, 877 bp, Homo sapiens
tcctttcctgctgccccctctccctcaccgcccacatctaggcattaccaagctctgtgaattctgcctccttaaataagcctccagtgtgcttatgtggaacctcgctttctagttcagtcttcctctctccaaaggccccctgatctcccggtctcatgccaccccctccaaaggtatcatagtcctgttcaaaatctgaatttggcaattctccactgcctacaggatcaagtcagagcttccctgcctccatagccccattcccagctttccccacagtatatattatgctccttcggagctgaatgactcaatttgcatttcccaatgatgctgtgtgcccaatgatgctattaccatgcctttgcccaggctgttccttctgcctgcagcatccttctctcagcctctcccctctttacccctttctagtcattccttgcttctcatcagtgttgcctttcctgatcgccccaggcagattttctattttctttctccatgcccctgcattgcaccttgtagaaactgccatctaacatctgctgaatggacttgtaagtacttaaggggttccttttcttccagacccaagctccttcagaacaacagtactgtttggtcatctctgtcccttagcataacgtttggcaccaagtgggcatgagtaaaaaagtgttgcatgaaagggaaactgagtcccagggaagcaactctggaagggtcccttccacatttaagtaatgtggtctcacccacagcctcatacatgtttggcctttagcacatctacaatgaacagttgtccatagggataggttgcagtgtcagtgggactagcttaaggcttcattgagcacctgtgtttggaagg

SEQ ID NO: 34339 - DNA, 718 bp, Homo sapiens
tgaaccctcccctcctgcagaggaaaatggttccacctccaagaccatcgtgtaccaccttgatgagggcgtgtatgggatcttcaactcagtcctgtttgacaacatctgccctacccccatcctgcagaaggtgagcttaccccacgtgggcctgttttcagttgtgtgtgtgtatttcaataacatttgttgtgtttttatctaatttttaaaaagtcaaacatatttattgtcgataatagacaacaaggatgacgaaggttatcacccataatcccaccacactctttgagcattacatattttaaaaaatgccttatacttttttcatgacattggaatcatattgttttgtaacctgctttttccatttatatggggtgtagctctttccatgccattaactgatctttgacaacatgcttttgtattttaaccaatctaactctagtggttggctatttggtttcctctttttgagcactgtgaatatatgttgaggtttcagctctgtggtaaattcctggaagtagaaacagttcatatacagtgggtttttctgtaataacaggggaacaggaatacataaaacattcctcctagcctgtggaacccagcccagggcctccagcaattttaatgggcatctttgagaggataaagaaaaccagacatcattttatcttcccctctccattgtgtcttcctatctctc

SEQ ID NO: 34340 - DNA, 1001 bp, Homo sapiens
  misc_feature (6)..(6): n is a, c, g, or t
  misc_feature (8)..(8): n is a, c, g, or t
  misc_feature (10)..(10): n is a, c, g, or t
  misc_feature (18)..(18): n is a, c, g, or t
  misc_feature (23)..(23): n is a, c, g, or t
cctcgncnanttcggcanaggtnagagagctgcagacttagacaggcactgagttctgggtcacaggagtaggacttctcaggatgtctctgaggaaacctttaatgatctgggcccagtacttgttccagcctctcctctagtggtagagagtttttttttctattcccactccttaaatacagttgattttcaacagccccgcccagcccccttcccctccccaaggcagggaggatttgttttacttccttcaacaatttaaggcctttgattccaggagagatagggagagaaagatccagataggggttgtgtgcttttccagcagggagctgccccctttccaaggaactccatctcaagagagggttttcttagtatctttcacagttgtttttttctggaacatgtggacaaggtctttggagacaagcctacaagtggatgcaagttctccttgtgtctgcaggtcacaggagttatgtattttctggttagcctgattctttaaatattttagctaaattctatttatttgcccagcagcgtctacttcaggtcagcaagttcttactttccatctgtctttggaggtgcctgcctttccttagattttaggttagtttgttgctctacaaccttagctaaatgatgaaagtattactttctaatattttattgttgtgaactcattgtgaggtgatctgaaacttaaataatgaaccactacactttgaatatagaattgaatcaggtattgaacccataaggactcaagcagattagccagtctgtccacctgttctattcatagcacttggccactgggggacactcgcaaactgagaagttgtataccttttctagagaagacacatcttgttgagactacttgtaagaagtgggaagaatgatttctgatctctttagagtagtgacatcacaaatagttggattttacaattcttgttttcaagtgcccttgatacatctttaaa

SEQ ID NO: 34341 - DNA, 363 bp, Homo sapiens
ggcctacctgcagggtcttactcttgttttctcatccctttctttttcatatacttcctgtgaaaagccatgattatgaatctgtgtttttatgagatggctaatcccagggttaccatgtgcagctgcacaggttgtgcactgcacaactccaggaagcactcttcaccctaggttacagaactgatgataccccatgtgttgtgcagtacattaaccatggtgcaacccctgacacatttatgatttgtacacactaaagattgagcaactttctttcgggattccttgaccgcattcgcttggtgtctttgggattaatgacgtgtccctaataaatgaatatttcagacatattatgca

SEQ ID NO: 34342 - DNA, 469 bp, Homo sapiens
ctttgctttctatgtatatggatatatgtgtaagatacatacattacatatatataaaactaggagctgctgtaccattgcatcctttccaaacactcccctttccatgtttgcaaaacttctgccttgtttattccattgcttttagttgattaaagtgggtggattagaaaagtatcttttcggccgggtgcggtggctcacgcctgtaatcccagctctttgggaggctgaggcaggtggatcacgaggtcaggagatcgagaccatcctggctaatatggtgaaaccccgtctctactaaaaatacaaaaaattagccaggcgtggtggcaggcgcctgtagtcccagctacttgggaggctgaggcaggagaatgacataaacccgggaggcggaagttgcagtgagctgagatcgcgccactgcactccagcctgggcgacagagcaagactccgtctcaaaa

SEQ ID NO: 34343 - DNA, 514 bp, Homo sapiens
tatggcctggttatacagactttagcaaagttctgctatgctaaaagtttctgacgaattcgcattttagaagttccctgtattttctgatgacagtgaactttttctcagtttttctgaactatgtcactttattttgggatattaaaacatgataaaagagtaaaatgtttctgactaaaattagttagagatgtatagtcagacagaccgacagacatatagacagtggcagaataatgtttatgcatgtgtatgtaatcaaaccagagttcgagcaattttaaacctaattatctcagagcctaatctaatttctgtttatttcattagctcttaatctttccagatatgataggatgaatgctatgtaatggattctttttaattatccggagacagtgaaaattagagctagagagcctagtcatcaagtttgcccgttggaatgggtaacttgaaagcctgtgtagaaaagccaggacattcagattcatctccctggcctcccagt

SEQ ID NO: 34344 - DNA, 253 bp, Homo sapiens
cggaggctgagggggagtgaagcagaggatgctggaatcaggagcccagaaactgagaggatggggttggactagaaggtctgtaggtgacagcaaccaagaggagcaaagagtggtataaggaggtagtacaggctacaagaggattccaatggtgtgaaagcagcaacgcagaccaaacagatgagggacaggcattgtaaagggcagagttttctttctttctgttttttttctcttttctaggtagaag

SEQ ID NO: 34345 - DNA, 2968 bp, Homo sapiens
ttttttttttttttttgaggaactgcattgccacaaagacacttgtcatcgctgctctgttaatttgaaaagaaaaagcaaaacccaggaaattggtattttacagtcacctgggggtgaatatcctttttgtttttttctatttaaaaattcctgctgccttccaagtcaagattcatcaggattcgctgaagatctgattcttaaaaagccttcgtcacattttaacgcatcgctgttagacacttttacaggctcacacagatgggctgagcagggacgagcaaaacctaacagaataatgggtttcagaaagttcatttgacgatttgaaggaactggattggatttacctttggcacaaatgcagattgcgggggatgggaaggtgaaaaatcaaaggttggaaggaaatatctgggaaggtagaaaaaggaaatttgagaattgattggctatagtgtgctgtcagcgggtggatgtcgtttttttcttctttttttccttttttttcttctgctacaggaagtgatttgcagtgctcaccgagcctttgttgagaagggtctcctctcagagtgagtcatgcttttgctgtgagcagccccaagcagctgggcgctccatcagaggcaactatgacttttgcaaagcaaacgtgcaaccccaagcagcggtctcccgggccggggctgcgcggcgccgctgtgctggcttttaacggtgggagggcaccatcctcttgctctgctctcgttctccagaaggctgtcccggggcccccactctccgtcccgctccggggacagtggctcgcctgctatgcgcggcagcccgcgccggggccggcaccagcagcgcccgggcggatgcagcgagcccacggaggggcatgcttccacgcaccaagtataaccgcttcaggaatgactcggtgacatcggtcgatgaccttctccacagcctgtcggtgagcggcggcggaggcaaggtttcggcggcgcgcgcgaccccggcggcggctccctacttggtgtccggcgaggcgctgcgcaaggcgcccgacgatgggcccggcagcctgggccacctgctccacaaggtgtcccacctgaaactctccagctcgggcctccgcggcctgtcgtcggccgcccgggagcgggcgggcgcgcggctctcgggcagctgcagcgcgcccagcctggccgccccggacggcagtgcgccctcggcgccccgcgccccggccatgagcgccgccaggaagggccggcccggcgacgagccgctgcccaggccccctcggggggcgccgcacgccagcgaccaggtgctggggcccggagtcacctacgtggtcaagtacttggggtgcattgaagttctgcgctcaatgaggtctcttgacttcagtacaagaacacaaattaccagggaagccatcagccgcgtctgtgaagctgtgcctggtgcgaagggagccttcaagaagagaaagcctccaagcaaaatgctgtccagcatcttgggaaagagcaacctccagtttgcgggaatgagcatctctctgaccatctccacggccagtctgaacctgcgaactccggactccaaacagatcatagcgaatcaccacatgcggtccatctccttcgcctctgggggagacccggacacaactgactatgttgcatatgtggctaaggaccctgttaatcgcagagcttgtcacattttggaatgctgtgatgggctggcccaggatgtcatcggctccatcggacaagcctttgagctccggtttaagcaatatttacagtgtcctaccaagattcccgctctccatgatcgaatgcagagtctggatgagccatggacggaagaggagggagatggctcagaccacccatactacaacagcatcccaagcaagatgcctcctccagggggctttcttgatactagactgaaacccagaccccatgctcctgacacagcccagtttgcaggaaaagagcagacttattaccagggaagacacttaggagacacttttggcgaagactggcagcaaacacctttaaggcaagggtcctcggacatctacagcacgccagaagggaaactgcacgtggcccccacgggagaagcacccacctacgtcaacactcagcagatcccaccacaggcctggccggctgcggtcagcagtgctgagagcagcccaaggaaagacctctttgacatgaaaccttttgaagatgctctcaagaaccagcccttggggcccgtgttaagcaaggcagcctccgtggagtgcatcagccctgtgtcacctagagccccagatgccaagatgctggaggaactgcaagccgagacttggtaccaaggagagatgagcaggaaggaggcagaggggctgctggagaaagacggagacttcctggtcaggaagagcaccaccaacccgggctcctttgtcctcacgggcatgcacaatggccaggccaagcacctgctgctcgtggacccagaaggcacgatccggacaaaggacagagtctttgacagtatcagccacctcatcaaccaccacctagaaagcagcctgcccattgtctctgcagggagtgagctgtgtctccagcagccagtggagaggaagcagtgacctggccagcactgctcccagcactgcgcaccaggtcaggaggacctggagtggactagaatcggggctgctggaactgggacagctgcctgtggctcagagccttcttcaaaagcttcaaaaggaaggcttcctttaaggtcaagtttcataaacttggttctgaatttctcatatgcatattaaaggtgtacatacctatacatcctgtacaaattatccctctatatttatattttttaagactaagaaagatgtaagactaatgttctgtgctgtatgtttttaatg

SEQ ID NO: 34346 - DNA, 2709 bp, Homo sapiens
ttttttttttttttttgaggaactgcattgccacaaagacacttgtcatcgctgctctgttaatttgaaaagaaaaagcaaaacccaggaaattggtattttacagtcacctgggggtgaatatcctttttgtttttttctatttaaaaattcctgctgccttccaagtcaagattcatcaggattcgctgaagatctgattcttaaaaagccttcgtcacattttaacgcatcgctgttagacacttttacaggctcacacagatgggctgagcagggacgagcaaaacctaacagaataatgggtttcagaaagttcatttgacgatttgaaggaactggattggatttacctttggcacaaatgcagattgcgggggatgggaaggtgaaaaatcaaaggttggaaggaaatatctgggaaggtagaaaaaggaaatttgagaattgattggctatagtgtgctgtcagcgggtggatgtcgtttttttcttctttttttccttttttttcttctgctacaggaagtgatttgcagtgctcaccgagcctttgttgagaagggtctcctctcagagtgagtcatgcttttgctgtgagcagccccaagcagctgggcgctccatcagaggcaactatgacttttgcaaagcaaacgtgcaaccccaagcagcggtctcccgggccggggctgcgcggcgccgctgtgctggcttttaacggtgggagggcaccatcctcttgctctgctctcgttctccagaaggctgtcccggggcccccactctccgtcccgctccggggacagtggctcgcctgctatgcgcggcagcccgcgccggggccggcaccagcagcgcccgggcggatgcagcgagcccacggaggggcatgcttccacgcaccaagtataaccgcttcaggaatgactcggtgacatcggtcgatgaccttctccacagcctgtcggtgagcggcggcggaggcaaggtttcggcggcgcgcgcgaccccggcggcggctccctacttggtgtccggcgaggcgctgcgcaaggcgcccgacgatgggcccggcagcctgggccacctgctccacaaggtgtcccacctgaaactctccagctcgggcctccgcggcctgtcgtcggccgcccgggagcgggcgggcgcgcggctctcgggcagctgcagcgcgcccagcctggccgccccggacggcagtgcgccctcggcgccccgcgccccggccatgagcgccgccaggaagggccggcccggcgacgagccgctgcccaggccccctcggggggcgccgcacgccagcgaccaggtgctggggcccggagtcacctacgtggtcaagtacttggggtgcattgaagttctgcgctcaatgaggtctcttgacttcagtacaagaacacaaattaccagggaagccatcagccgcgtctgtgaagctgtgcctggtgcgaagggagccttcaagaagagaaagcctccaagcaaaatgctgtccagcatcttgggaaagagcaacctccagtttgcgggaatgagcatctctctgaccatctccacggccagtctgaacctgcgaactccggactccaaacagatcatagcgaatcaccacatgcggtccatctccttcgcctctgggggagacccggacacaactgactatgttgcatatgtggctaaggaccctgttaatcgcagagcttgtcacattttggaatgctgtgatgggctggcccaggatgtcatcggctccatcggacaagcctttgagctccggtttaagcaatatttacagtgtcctaccaagattcccgctctccatgatcgaatgcagagtctggatgagccatggacggaagaggagggagatggctcagaccacccatactacaacagcatcccaagcaagatgcctcctccagggggctttcttgatactagactgaaacccagaccccatgctcctgacacagcccagtttgcaggaaaagagcagacttattaccagggaagacacttaggagacacttttggcgaagactggcagcaaacacctttaaggcaagggtcctcggacatctacagcacgccagaagggaaactgcacgtggcccccacgggagaagcacccacctacgtcaacactcagcagatcccaccacaggcctggccggctgcggtcagcagtgctgagagcagcccaaggaaagacctctttgacatgaaaccttttgaagatgctctcaagaaccagcccttggggcccgtgttaagcaaggcagcctccgtggagtgcatcagccctgtgtcacctagagccccagatgccaagatgctggaggaactgcaagccgagacttggtaccaaggagagatgagcaggaaggaggcagaggggctgctggagaaagacggagacttcctggtcaggaagagcaccaccaacccgggctcctttgtcctcacgggcatgcacaatggccaggccaagcacctgctgctcgtggacccagaaggcacgagaagtaactcctactgatgttggccatccctggcactacagctgtatctgaataatcccgtaggtttggctgaatttttcatcttcccgtcaagaaagacattcatctttacctggggcatagtccaagaattgctaagtttaataaatgcagttaaatc

SEQ ID NO: 34347 - DNA, 424 bp, Homo sapiens
aacgcagggacagacaactcctgtcatcaggccagagccaggagccaggagccagtggtcagggccccacacaagttttaaaacttttagaattatggcctaggctgaaagccttgacttttatgtcctttaaagtaaataaatacagaaactgagagcattttccttacaaacacatttctagtagacaaggaagtacaggctcctaggcttttaatatttatcttgaatgcttatctcgaaaagttgaatcactgaggattttgttctaaggctgtaaaatgtgatgatcagtaaatgaaacccccattgctaagtctcttgttttcccgtttagagaagtaactcctactgatgttggccatccctggcactacagctgtatctgaataatcccgtaggtttggctgaatttttcatcttc

SEQ ID NO: 34348 - DNA, 942 bp, Homo sapiens
  misc_feature (856)..(856): n is a, c, g, or t
  misc_feature (862)..(862): n is a, c, g, or t
cccaggaagctgtttatggccaaaatgatatacaccacaaagtattatctctgaacttcagtgaatgtcatactaaaattcgtcatgtggatgctcatgcaaccttgagtgatggagtagttgtccaggtcatgggtttgctgtctaacagtggacaaccagaaagaaagtttatgcaaaccttgttctggctcctgaaggatctgttccaaataaattttatgttcacaatgatatgtttcgttatgaagatgaagtgtttggtgattctgagcctgaacttgatgaagaatcagaagatgaagtagaagaggaacaagaagaaagacaaccatctcctgaacctgtgcaagaaaatgctaacagtggttactatgaagctcaccctgtgactaatggcatagaggagcctttggaagaatcctctcatgaacctgaacctgagccagaatctgaaacaaagactgaagagctgaaaccacaagtggaggagaagaacttagaagaactagaggagaaatctactactcctcctccggcagaacctgtttctctgccacaagaaccaccaaagccaagagtcgaagctaaaccagaagttcaatctcagccacctcgtgtgcgtgaacaacgacctagagaacgacctggttttcctcctagaggaccaagaccaggcagaggagatatggaacagaatgactctgacaaccgtagaataattcgctatccagatagtcatcaactttttgtggtaacttgccacatgatattggtgaaaatgagctaaggaattcttcatgagtttgaaacgtgtggaacttcgcatcaataccaggtgtgggggaagctccanttggtnggggttggggcctggaccggccaactctcttggcccgctttgtggggggcgcctgggggaaccgtcgccgtcgacccgcg

SEQ ID NO: 34349 - DNA, 644 bp, Homo sapiens
cccaggaagctgtttatggccaaaatgatatacaccacaaagtattatctctgaacttcagtgaatgtcatactaaaattcgtcatgtggatgctcatgcaaccttgagtgatggagtagttgtccaggtcatgggtttgctgtctaacagtggacaaccagaaagaaagtttatgcaaaccttgttctggctcctgaaggatctgttccaaataaattttatgttcacaatgatatgtttcgttatgaagatgaagtgtttggtgattctgagcctgaacttgatgaagaatcagaagatgaagtagaagaggaacaagaagaaagacaaccatctcctgaacctgtgcaagaaaatgctaacagtggttactatgaagctcaccctgtgactaatggcatagaggagcctttggaagaatcctctcatgaacctgaacctgagccagaatctgaaacaaagactgaagagctgaaaccacaagtggaggagaagaacttagaagaactagaggagaaatctactactcctcctccggcagaacctgtttctctgccacaagaaccaccaaaggctttctcctgggcttcagtgaccagtaaaaacctgcctcctagtggtactgtttcttcctctggaattc

SEQ ID NO: 34350 - DNA, 520 bp, Homo sapiens
agtgacagagtaggtgcttttaaaattttcttgaataatgaatgcgatatttggacgataatcactaaacccaacatacttattttcttattttattcatcaagctttatatgaagatgaaagattccctgacagaaatgagccattgatctagtgagacatatatttgtatgtatattctctctcttagtaactattaatatgtctcagatcttttgtagtgtgtattttatctacagtgtaatttttaaaaaatgcttttctattactaatatatgtagatcagtaattgaacagactaatgtgttattttatatttcatatatttgcacagtatcttatgaacagatttaaacctaatgattttactcattgatacttgtgtgggatttactatccagtccagtgcttatttgccaagagctgttcagcctatgcttgaaaccattctaatgaaggagaaccctcaggcagtttattctgcctttgggaggcctctgattattttaaaaaaaaaaag

SEQ ID NO: 34351 - DNA, 502 bp, Homo sapiens
gccctcatctgtggactgggggtactgtgaagattaagtgttaagacactaaagaaccctgggagggtgggacatgcgtaagcactggctcagcctcccactgtcgtgccgcttctgccagaccagtgcgcctgcagatctaacccagaggcatcaggagcagatgcaggggccacagggcagcagccacgatgaaccaccatctctttccaccgcttcgtgcctcgggcccctggcgtttcttttgtcctgccttcattggttgctgtgctctcacaggcctggatccaggctaccgaggctaggatgaggcctgtaaccccacactaccatgtggcaaacagccagaacaccgcaagagacgtaagtcaagccacactggctgggagctaattttgcattgttaaaaagcaggataacacagaaaatagaacggacaggaaagctttcacattgtgcaaatgtgaactggtgattagaaggttcatttcaatcagtttgc

SEQ ID NO: 34352 - DNA, 650 bp, Homo sapiens
gccctcatctgtggactgggggtactgtgaagattaagtgttaagacactaaagaaccctgggagggtgggacatgcgtaagcactggctcagcctcccactgtcgtgccgcttctgccagaccagtgcgcctgcagatctaacccagaggcatcaggagcagatgcaggggccacagggcagcagccacgatgaaccaccatctctttccaccgcttcgtgcctcgggcccctggcgtttcttttgtcctgccttcattggttgctgtgctctcacaggcctggatccaggctaccgaggctaggatgaggcctgtaaccccacactaccatgtggcaaacagccagaacaccgcaagagacgtaagtcaagccacactggctgggagctaattttgcattgttaaaaagcaggataacacagaaaatagaacggacaggaaagctttcacattgtgcaatttacttggatctggaagaaacattttaaatctacaaaattactgtcaaacccaataggcaggattgaaaaggagttagaaattataaacaaataaaccaacaaagtcgggggtaacaaccccaaccaaagatatcagaaactggatgaagatggcttaaaggcacattaaaaaaaaatccaaaaaaac

SEQ ID NO: 34353 - DNA, 422 bp, Homo sapiens
  misc_feature (3)..(5): n is a, c, g, or t
  misc_feature (10)..(10): n is a, c, g, or t
ttnnntatgntttacgcacctcatctggcaaagtagaattgtaatacctgctgtcatagacttcccaaaaagagagagtgcgttgagaggttggctttataattatatcataatggctggaaataaatgtaatgtcctctatacatttcctccttggaaaaatggggatttaggagggtaagaaaaatagttacatttagcagatgccctctccataaaactcttcacatttaattctcacagcattgactgtagattgatgtcataatctttagttcacagtatcagaaactgaggctcagtgagattacattgctgtatacattttagtggaaaaaagcttgagcctgcattcatactctgatatatctgactgtaagtgttcttcctattattctacccacatccaagtctgttcttct

SEQ ID NO: 34354 - DNA, 607 bp, Homo sapiens
acctcaggactgcagagagtttctaccatcaagaaggccctcaccagatgtggctttaaataaattttcaggtattttgttataagcaacagaaaataggctaagacaggtgccatgagtgagagtgaacctccagagtttatgatcatttgatacctaggagctgtgttggacttgacatagccaaaccttgatcagactgttgatggcctacatgtgatgtaggaaatatatgggacattgtgtgattgtctttaatcaaaccataaagctagaccacactgctttaggcctagacagaatttcctccaaagggaatatgttgccactgtcagattcaatgtatgaacaggaaatgaagacctaggaggcaggccttaccttgactatgaatgaagaaaaagtactcctttcagtatctggagctggtgaaaaatttggccttgaactccaccttgtggacagatgtggagatgctataaacacttccagtggttggaaggtgagctgtctgaagccaagtgaaggcagaaaaggaagacagacaggagagtcaacttggtaggagactctgggatgcgtctgtgcctgaatagttgtaattata

SEQ ID NO: 34355 - DNA, 405 bp, Homo sapiens
ttcctaatgatacaaattagggtggagaagggaaaagtgtcatcatggtgctgtttctgcagctgctccttctcttgttctgttaaagaggaagttgtcagcacccaacagtaacaattaagttcatgttagaagccactggttgaaatccatgtagaagacctttgcctaatttaacatggcagtgggagactggtatctggcagagaatgaaagaggatgcgttattgcaaagtgggaattttgagattatctaccaaacaatttgaaaaagtccctattggtctttgatgccccaagctcccatttttgcataagttttactttgttactattgtgcgtgtgtatgtatgtgtatacacttaagtgtaaatatctgacagctacgataaagaaaattgagaa

SEQ ID NO: 34356 - DNA, 292 bp, Homo sapiens
actctcaaaagaccctggagtacatcagaggtgagtacaatagcaatcttttcctctgtagaggacaggggaggagtcccttcatggctgcaaactctggatgagggctggggattgagggcttcccagagagcatcacaagaagttgtcctaccactcttaaaggcatcagaagcagttctgggattgcttggcgttggcaccacaagtgtccttcagccattcctggaagaggtcttcagttttcttcagcaccagaaactggccaaggacaacataggctttgtcaaag

SEQ ID NO: 34357 - DNA, 371 bp, Homo sapiens
acacacacacacgcatgcatgcacacaccatgcaggtgacttccccaggaactagtgccagcacccctgctgcagagggggatatcaaggctaaatggaagagaggggtgacttgcctgggagcacagggcaaagccaggacagcaaaccaggcctcctggtgctaccccaccagctgccctcacagggtggaaggtacagccatagtgggtgcctgcattgccctcccctcacctgggcccagccatgctaccccaagctcagccctgtgaccagctctcccagagctgaacattcgggctcaacccctatacctgagccttttttgctgcctccaaaacagcctcatctgcagttgcttgaaatagaaa

SEQ ID NO: 34358 - DNA, 402 bp, Homo sapiens
ctgaagactccagtttgggatgagaaaataggtccatgctaaagtcagaaaggatggaactagtgtgggcctttaaactcaaaactaaccagccaaagctcccttccaaggcagagcctcactttgaggagaaagtgctgggaatagaaacaaaatttagtaggacggagacagtagggacaaaggaaggagaaggtccagataaaatttagaagggatcatggttaaattcccatacacagttattattgaaaaaagggaataaggaatagaacttctctacagatagtgaaagtatatcaggccagacgtggtggctcatgtctgtaatcccagtgctttgggaggccaagatgggtggattgcttgagccaaggagttgagaccagcctgaacaacgtg

SEQ ID NO: 34359 - DNA, 791 bp, Homo sapiens
gttgttcatcatcttctgagaaatatgctcatcctaaacttctctaccataagagaacgaaaaaacatggctcaagcactcaattgacactgttttcagtctagaattttgctttgctttaatctaccccactctcagcataataacagataagatatgctgtggatgcacacacaagaagtggtaattctaatattgtgggcatttgggaataaactaaaaatataggctatacccagtaacaggcacgtagccaaataaagtcagagttttaaagataaaacataaacttggaacataaacatgcgcagcatggcccgaacctcattccagacggagatacagaggcagctaaaagatcactgcacaatactgccaagaataaactaattacaatagattgaaagagaaaatactagatcttttacttaattaatctgcttattgtactggatttttcccctctatcactggcttattctattattttaaatgaattgtgttttttgctttttgttcctttagtattttaaggtccatttactcatttgcaaaatgatgatactcgttggtcttaccaactttgctaaagataaggaaaatggtataaaccctccggtggaagggaagggagtatttagtcaaatgagaagtatccttggccaggcacagtggctcatgcctgtaataccagcactttgggaagccgaagtgggaggactgcttgaggccaggaactcgagagcagcctggacaacatagcaagacctcatctctactaaaaaaaaaaa

SEQ ID NO: 34360 - DNA, 384 bp, Homo sapiens
gatggaaactattgatgggtcattaacatttgaaacatattagtatattcagtaaaaatactgacaaaggacgcaaatctatgtcccccttgaaaaaaattatgcagccaggcatggtggttcacacctgtaatcccagtactttgggagaccgaggtgggaggatcacttgaggccaggagttcgagaccagcctggccaacatagtaaaaccccatctctactaaaaatacaaaaattagctgggtgtggtggcagacacctatagttccagctactgtggggctgaggcatgacatttgcttgaacccaggaggcagaggctgcagtgagctgagactgtactactccactccatcctgggccacagagcaagactgtctc

SEQ ID NO: 34361 - DNA, 234 bp, Homo sapiens
gcaaaagactatagctactgcttcagttccttcttccaaatgtcatatgaaatgcctcttaggggtctatactaacccagaactgtgcaggagagagaaatctgggaaacacagttccagcttagctaggttgacttgctataagtcaaccacacctagtctcactaagcccatttgtcatgtgtggcccactcagactgaaagaatctttgttggttcactgttttataaggg

SEQ ID NO: 34362 - DNA, 237 bp, Homo sapiens
acccttggacacccacactcttctcacaccctcacacacacactctgcaccactcgcctagccccggccacgctcatgtcaggattctgaagacctcgagcacacacagacacgcacctggtcacgtgcactttcacacatacacttggcaccagggtggcagcagcggaggtgactgagaagcctgcttttcacagagaatcagaacccagcgggggctttagccacaaaaaaaga

SEQ ID NO: 34363 - DNA, 224 bp, Homo sapiens
gtgtgaagaagggagtaatcttggagtcaaagagaagcatgtcaagtcccaaggcagggaagaaaatatcctgtttgtcatccctaaatagactagaaatatctattgcacagaattattctccaaatcagcaacttccaaacatcttctaggatggcaagaaagggtaaaaggagaaaccaaaagaacaaggtcctgaatttattacagtgcagaaggattag

SEQ ID NO: 34364 - DNA, 244 bp, Homo sapiens
ttgtagttaaccagtaagaaagagaccataatggagaaagaacacactgactgtgtttcacagactgttgccctcatctccacttgtgttaaagaaggtaaattagttcccctccagattaacttcagcgtcagctgtggtgctttcctgacacttcttaacatttgaacagtaccacattctgtccgttttatcgttgtctcttctcataccctgtatttgccaattctgtactcatgcccag

SEQ ID NO: 34365 - DNA, 372 bp, Homo sapiens
tgccaccatgcctagctaattcttgtattcttttccagaagacagggtcctaacctatattacgtggtctcaaactccctggactcaagtggttctccccacctcggcctccccaaaatgtcgggattgcaggcaagagccactgaacctggcctccatgttctttatacgtaaaattagagggtttaattagggcagcaattctctaacattaatggtcatcacaattacctggagtgctgttaaaacacagattactgggcgcagatttgataatttatgattcagtgggtctggagtggagccctagagtatgggcttctaacaatttcccaaatgatgctgatggtaactacaccctgagaactattc

SEQ ID NO: 34366 - DNA, 756 bp, Homo sapiens
tacgtattatataactgcaaatgggagtgcttagtactgtcagttttaaaaacagaaaacctctaaagctcttaccacgagcctttctagcaaggcagggcagtctgagaaaaactactctgagaagagaactaacagtggttataaaactgctttaaaatcattgccagaatgtgaagatactgaaaaagttttcttgtagatcggagaactgataagaaagaaacataaaagtgtccacatgacatggagtttctgtagaaggcaaaaatgaatcatggtacccattggtgattgggtggtgaagggcaccagaagagaaagcagaaaatttagggtcttaaaacaccaccaccaaaaaaagaataaatcaaaggactcataccctctcgccaccaccaaaaaaaaagaagaaagaaaaggaaaggaaattcagtaaagaaatgggactttggtgcattgtcaaaagaaggtaaccctgaattaagaatcttttaagctaatcctaatctacaaaatgaatggaatgaaactagaccattataaacttactagaagaaaacagatttgataacactttagttgatggtaccctctcccccagaaacaaccataaaacagaagaaactgacaacactgtagattgaattagtttgtctgttcagactacatctgggagtatagaaaaacaccttgaataagatactcaaatgttaaaaacaaatggacagaaaaccggtgttggggataaatcac

SEQ ID NO: 34367 - DNA, 5851 bp, Homo sapiens
ggcgcggaggaggaggcggcggcgtcggtggcggcggcgacggcggcgcggaggcgaaggcagcggcgggcagccgaagcagtggctctcggagggggaacaaagagcagcgactaaggcggcagaggagcggcggcggtggcggcgctgcagcagcgggcgggactggtatggtggttccacagggcagaccccgctgcactcacagggaggaggaggcggcagcggcggaggaaggcggcgcaccccgagaggcatgcccaaagaaaaatacgagccccctgaccctcggaggatgtatacaattatgtcttctgaggaagcagcaaatggaaagaaatcccactgggcagagcttgaaataagtggaaaagtaagaagcttaagcgcatctttgtggtcactaactcacctgacagctttgcatttgagtgacaattccctgtcccgaattccttcagacattgccaagcttcacaatctggtgtatttggacctgtcatctaataaaattcgtagcttacccgcagaactcggaaacatggtatcactcagggagctccatttaaataacaacctgttacgagttctaccttttgagctgggaaaactgtttcagttgcagactttaggcctgaaaggaaatccccttacccaggatatattgaacctttatcaggaaccagatggaacaagacggctgctgaactatttgcttgataatttgtcaggtactgcaaaaagaattacaacagaacaaccacctccaaggtcttggattatgttacaagaaccagataggacaaggccaactgccttgttttctgtcatgtgctataatgttctttgtgataaatatgcgacccggcagttatacggctactgtccatcatgggcgctaaactgggactacaggaaaaaggccattattcaagaaatcttgagctgcaatgctgatatcgtaagtcttcaggaggttgaaacggaacagtattacagtttttttctggtagagctgaaagaacgtggctataatggattcttcagtcctaagtctagagctaggacaatgtcagaacaagaaaggaaacatgttgatggctgtgcaatattcttcaagacagaaaaatttactttggttcagaaacacactgttgaatttaatcagctagccatggcaaattctgaggggtctgaagctatgctgaacagagtcatgacaaaagataacattggggttgcagtactgctagaacttcggaaggaatcgattgaaatgccgtctggaaagccacatcttggaacagaaaaacaacttattcttgtggctaacgcccacatgcattgggaccctgaatactctgatgtgaagttggtacaaactatgatgttcctctcagaagtgaagaacattattgataaagcctctcgcaacctcaaatccagtgttttgggagaatttggaactattccacttgtgttatgtgcagatcttaattctttgccagactctggtgttgtagaatatttgagcacaggtggagtagaaacaaatcacaaagactttaaggagttgaggtataatgaaagtctcacaaacttcagctgtcatgggaagaatggaaccaccaatggaaggatcactcatggtttcaagttacagagtgcctatgagagtggcctgatgccttacacgaattacacatttgatttcaagggtataatagactacattttctattctaaacctcagctgaacaccttaggcatcctgggccctctggaccaccactggctggttgagaataacatcagtggctgcccgcaccccctcatcccctctgaccacttctcactttttgcacaactggagctcttactgcctttcctgccccaagtcaacggcatccaccttcctggcaggaggtagtcaagcaccttcagaggacagccttgattcacttgtaaacttgtgaaaatctgaacataggggagtgaggtatggccactgaggatttttgcttgcttaagaatgatttggactttcaatctgattatttgataaggatatagtatgaaagccaggtgctagcaacagacaaattctgagcccaatatgctttatactgctagacagggattggtgtgtttgcacctgtctttcatttgtcataagagattttcctatttcttctacccaatagaatattttcatgcctggaaataggaaaatgtgtgaacagcgtattctcttcacacagaaatctgtagcactgcttttttgaggccagtagcaacatccagagatcattcttccatactttactccctcctttttcagacttgtttgtaaagtacagaatctgaatttagcctttatgattgtatatgatccacagaagacctgatttatgaaattttgtactaaaatcatttggaaatgattgtattgtaaactgaggctaaatttttttttaaacctgtttcatgtgttataaaggccagcttgtaaaagaagctgcaacagactttctctgctcatgatttgcactcttagggttttgttagcccttttgtactactttctttttaaattgagaacatggttctttacatataaatctgcttcaaccttaggatgttttcagaccagaggcaacttattcatgaatttttatgaaaactatctactaggacagataagctgaacagtgatgatctgtagacatttatggactgaatgtaatggttgatatatgtacattctgatatttttaaatctttaactttttaaagttaaaaacctacagctgcttaggtccagcttcttaactctttttgagacacttcctgtcctatctccactgtgcctgcctaaatttgttctcaccaagcactgcctgtgcatgcagagaaaatctgtgcatcctcttttatatttttaaaatactgtttaacatttgtgagaattttatgaaaatgcttttgtatgagctgtggctttttcccattgtgaagcattgaatatcacattttggaacatgttatagggtgagtccctggatctttgctcaccagatccaagcactgcttctcggtgtcattgcagtgtgctgcttgtcacccagaatactactatcatgtgaattctttttgtcgtcagtgtcttttccttagtctttttgttgttgttgttgttgttgttttaatcattccttttttaagaagaagtaattttccatttatgaagcagtatgaattagatgtattttcaaaacaggtccctaagacaattcttcagatcatttttaaaatgactaagtcattttagtatgtcaagcaagataaaaattacatcataccgtctattttgcccatagtgccatttagagatgaaaaccagctttaactttgcaaagtgaacatgtacatggtctgctctcatttattcattcttctctcaaaagtcaaatgaatgcagagggagcttggtcaaactgcttttgtttcaactgcaggcaggggagcaaaaggacgccatgtgagcattaggaaaaaaaatactcactcttactaacaatttttatacagaaaatgagtcattttggaaatgattcttatgttttttttttttctccttttagaaaattctccaaaaggttttgatgttgaatcttggtcttggacctgttttttcctttgagggttttttgttttttgttttttctaggatttcattgtgatgttttggttttgttttttgctttttgtttaagttgtgctgacaccaaacacatccagtttataatcagtacattggaaagctggtattgatgtagaaccagtgcataactttttatggggttttgttattggtttttttttgtaaagtgtgaataaaaggtatgtttactcatttttcctgaacactgtgttggtaatgtgcatcatgacaatttccagtgaaggtgagctggagctggttggactaatgagactgaggaagcagcttttcctacgatctgcattatgtaatcacaggtccagagagctttatggaagcgggagaggaggagcacttactcatgttgtatttgttaatggaggatgtcatcttttcatagatgctggaactagagtgcacttgttagatgctaaaggtttgagctttacacaaaatgtcttcatctgtatttgttattgtctacaatatatttgaatttggggcagcatattaagatgtaatggcctgttatgtcttgaaaatacttgttttgcctcttccaggcatactgcattctgtggatcagtttgaacagcttctccaccttatttggacagtgataaattgaaccaagagtgtagatttacaagtgtaaccttcaaaagaggaagaactatttggggtctgtaggtaatgaacagtcacaccaaaatagactatgatgcttttgttaagaaaggtttcatgttttagatattttccgtgtcctaaataattttcaataatctataatccctaaaatgcaataaaaactagtatgttttcacggtgtatattttttttcaaaaattctgtaacaaatatatttaatgtgttgccataatgtcatttcagtatttttgctggataaatccattttagaaatgtcttacaaaaagtttagggcatgttttctgttttaaagaccagaagtttgaaggcacccaaatccttgtcgccaatctcctgaagtacagctttaccatattagtggtcattatttatgctttgagagtttcaatattgttcgtcaagttaacttatggcataatttaagctaaagttgtagaaatgaattgttgagtgcaactttcatagtcccaaagataggcagagaacatctccagaaatgtgtgtgtgtgtgtgtgtgtgtgtgtgtgtgtgtgtgtttaatatgatttagtgacaaccaggaaaacttacttgggattattagcactttcaaacttagggacattattaaattggatggaatgcacttctaaatgtttaaattaaaatttcaaagctctttcgagattcaggttctcaataataatattcaagttttagagtttcactttgtactatttaaatttatggaactagtttccatactgacttgtaaggttttggggtcatatataaggactaaagccaagctaggcaaaacaatgacagcaccgttttttcagtgaagctctcagaatgtccagtacagatgttgcagataattccaagaactccttcagcaggtgttcttcaccattcgtaaacagtattttaagatgttcactttgctcttctttttggttacatacattttaataactggtatgttgaagtagtgtctaaaagtatctagtctttattcacagtacattatattgtgtgatgcactggactaactcttgtttaccattcatgtaacaaaacccagcacattatctgcactataagctcaaagaatgtcacatccgcccagacagctctttgatgagggtgatgggaactgaataaaccatacggactggcagtaacaagggcttttactgttctgttcagtggaaccttcttggtcaaattgtaattagctagcattatatttatatacagggtcttttttctttaccgatgtattttcctactcatagccaaccaataaattcagtatctgtttcaaatattttagaagtgtagtttgtatagctgtagtactgaggtttgaggaaaaataaatgttgatcagcagaccacgtattttgcagggtgactgtgacatgctatgcggaaatggtgtcttggcatgctttattggactgctgctgt

SEQ ID NO: 34368 - DNA, 5832 bp, Homo sapiens
ggcgcggaggaggaggcggcggcgtcggtggcggcggcgacggcggcgcggaggcgaaggcagcggcgggcagccgaagcagtggctctcggagggggaacaaagagcagcgactaaggcggcagaggagcggcggcggtggcggcgctgcagcagcgggcgggactggtatggtggttccacagggcagaccccgctgcactcacagggaggaggaggcggcagcggcggaggaaggcggcgcaccccgagaggcatgcccaaagaaaaatacgagccccctgaccctcggaggatgtatacaattatgtcttctgaggaagcagcaaatggaaagaaatcccactgggcagagcttgaaataagtggaaaagtaagaagcttaagcgcatctttgtggtcactaactcacctgacagctttgcatttgagtgacaattccctgtcccgaattccttcagacattgccaagcttcacaatctggtgtatttggacctgtcatctaataaaattcgtagcttacccgcagaactcggaaacatggtatcactcagggagctccatttaaataacaacctgttacgagttctaccttttgagctgggaaaactgtttcagttgcagactttaggcctgaaaggaaatccccttacccaggatatattgaacctttatcaggaaccagatggaacaagacggctgctgaactatttgcttgataatttgtcaggtactgcaaaaagaattacaacagaacaaccacctccaaggtcttggattatgttacaagaaccagataggacaaggccaactgccttgttttctgtcatgtgctataatgttctttgtgataaatatgcgacccggcagttatacggctactgtccatcatgggcgctaaactgggactacaggaaaaaggccattattcaagaaatcttgagctgcaatgctgatatcgtaagtcttcaggaggttgaaacggaacagtattacagtttttttctggtagagctgaaagaacgtggctataatggattcttcagtcctaagtctagagctaggacaatgtcagaacaagaaaggaaacatgttgatggctgtgcaatattcttcaagacagaaaaatttactttggttcagaaacacactgttgaatttaatcagctagccatggcaaattctgaggggtctgaagctatgctgaacagagtcatgacaaaagataacattggggttgcagtactgctagaacttcggaaggaatcgattgaaatgccgtctggaaagccacatcttggaacagaaaaacaacttattcttgtggctaacgcccacatgcattgggaccctgaatactctgatgtgaagttggtacaaactatgatgttcctctcagaagtgaagaacattattgataaagcctctcgcaacctcaaatccagtgttttgggagaatttggaactattccacttgtgttatgtgcagatcttaattctttgccagactctggtgttgtagaatatttgagcacaggtggagtagaaacaaatcacaaagactttaaggagttgaggtataatgaaagtctcacaaacttcagctgtcatgggaagaatggaaccaccaatggaaggatcactcatggtttcaagttacagagtgcctatgagagtggcctgatgccttacacgaattacacatttgatttcaagggtataatagactacattttctattctaaacctcagctgaacaccttaggcatcctgggccctctggaccaccactggctggttgagaataacatcagtggctgcccgcaccccctcatcccctctgaccacttctcactttttgcacaactggagctcttactgcctttcctgccccaagtcaacggcatccaccttcctggcaggaggtagtcaagcaccttcagaggacagccttgattcacttgtaaacttgtgaaaatctgaacataggggagtgaggtatggccactgaggatttttgcttgcttaagaatgatttggactttcaatctgattatttgataaggatatagtatgaaagccaggtgctagcaacagacaaattctgagcccaatatgctttatactgctagacagggattggtgtgtttgcacctgtctttcatttgtcataagagattttcctatttcttctacccaatagaatattttcatgcctggaaataggaaaatgtgtgaacagcgtattctcttcacacagaaatctgtagcactgcttttttgaggccagtagcaacatccagagatcattcttccatactttactccctcctttttcagacttgtttgtaaagtacagaatctgaatttagcctttatgattgtatatgatccacagaagacctgatttatgaaattttgtactaaaatcatttggaaatgattgtattgtaaactgaggctaaatttttttttaaacctgtttcatgtgttataaaggccagcttgtaaaagaagctgcaacagactttctctgctcatgatttgcactcttagggttttgttagcccttttgtactactttctttttaaattgagaacatggttctttacatataaatctgcttcaaccttaggatgttttcagaccagaggcaacttattcatgaatttttatgaaaactatctactaggacagataagctgaacagtgatgatctgtagacatttatggactgaatgtaatggttgatatatgtacattctgatatttttaaatctttaactttttaaagttaaaaacctacagctgcttaggtccagcttcttaactctttttgagacacttcctgtcctatctccactgtgcctgcctaaatttgttctcaccaagcactgcctgtgcatgcagagaaaatctgtgcatcctcttttatatttttaaaatactgtttaacatttgtgagaattttatgaaaatgcttttgtatgagctgtggctttttcccattgtgaagcattgaatatcacattttggaacatgttatagggtgagtccctggatctttgctcaccagatccaagcactgcttctcggtgtcattgcagtgtgctgcttgtcacccagaatactactatcatgtgaattctttttgtcgtcagtgtcttttccttagtctttttgttgttgttgttgttgttgttttaatcattccttttttaagaagaagtaattttccatttatgaagcagtatgaattagatgtattttcaaaacaggtccctaagacaattcttcagatcatttttaaaatgactaagtcattttagtatgtcaagcaagataaaaattacatcataccgtctattttgcccatagtgccatttagagatgaaaaccagctttaactttgcaaagtgaacatgtacatggtctgctctcatttattcattcttctctcaaaagtcaaatgaatgcagagggagcttggtcaaactgcttttgtttcaactgcaggcaggggagcaaaaggacgccatgtgagcattaggaaaaaaaatactcactcttactaacaatttttatacagaaaatgagtcattttggaaatgattcttatgttttttttttttctccttttagaaaattctccaaaaggttttgatgttgaatcttggtcttggacctgttttttcctttgagggttttttgttttttgttttttctaggatttcattgtgatgttttggttttgttttttgctttttgtttaagttgtgctgacaccaaacacatccagtttataatcagtacattggaaagctggtattgatgtagaaccagtgcataactttttatggggttttgttattggtttttttttgtaaagtgtgaataaaaggtatgtttactcatttttcctgaacactgtgttggtaatgtgcatcatgacaatttccagtgaaggtgagctggagctggttggactaatgagactgaggaagcagcttttcctacgatctgcattatgtaatcacaggtccagagagctttatggaagcgggagaggaggagcacttactcatgttgtatttgttaatggaggatgtcatcttttcatagatgctggaactagagtgcacttgttagatgctaaaggtttgagctttacacaaaatgtcttcatctgtatttgttattgtctacaatatatttgaatttggggcagcatattaagatgtaatggcctgttatgtcttgaaaatacttgttttgcctcttccaggcatactgcattctgtggatcagtttgaacagcttctccaccttatttggacagtgataaattgaaccaagagtgtagatttacaagtgtaaccttcaaaagaggaagaactatttggggtctgtaggtaatgaacagtcacaccaaaatagactatgatgcttttgttaagaaaggtttcatgttttagatattttccgtgtcctaaataattttcaataatctataatccctaaaatgcaataaaaactagtatgttttcacggtgtatattttttttcaaaaattctgtaacaaatatatttaatgtgttgccataatgtcatttcagtatttttgctggataaatccattttagaaatgtcttacaaaaagtttagggcatgttttctgttttaaagaccagaagtttgaaggcacccaaatccttgtcgccaatctcctgaagtacagctttaccatattagtggtcattatttatgctttgagagtttcaatattgttcgtcaagttaacttatggcataatttaagctaaagttgtagaaatgaattgttgagtgcaactttcatagtcccaaagataggcagagaacatctccagaaatgtgtgtgtgtgtgtgtgtgtgtgtgtgtgtgtgtgtgtttaatatgatttagtgacaaccaggaaaacttacttgggattattagcactttcaaacttagggacattattaaattggatggaatgcacttctaaatgtttaaattaaaatttcaaagctctttcgagattcaggttctcaataataatattcaagttttagagtttcactttgtactatttaaatttatggaactagtttccatactgacttgtaaggttttggggtcatatataaggactaaagccaagctaggcaaaacaatgacagcaccgttttttcagtgaagctctcagaatgtccagtacagatgttgcagataattccaagaactccttcagcaggtgttcttcaccattcgtaaacagtattttaagatgttcactttgctcttctttttggttacatacattttaataactggtatgttgaagtagtgtctaaaagtatctagtctttattcacagtacattatattgtgtgatgcactggactaactcttgtttaccattcatgtaacaaaacccagcacattatctgcactataagctcaaagaatgtcacatccgcccagacagctctttgatgagggtgatgggaactgaataaaccatacggactggcagtaacaagggcttttactgttctgttcagtggaaccttcttggtcaaattgtaattagctagcattatatttatatacagggtcttttttctttaccgatgtattttcctactcatagccaaccaataaattcagtatctgtttcaaatattttagaagtgtagtttgtatagctgtagtactgaggtttgaggaaaaataaatgttgatcagcagaccacgtatttagacgggccatatatgggaatggtgtaacctatggattctttgctgt

SEQ ID NO: 34369 - DNA, 5595 bp, Homo sapiens
gctttcatccttcccttcactgtttcctctgcccacccactctcccagtcacctgcctgccccgttcgtgttttgctcactcttgtttgttataaccatctgtattattgaaagtgttggcaaggcagggtcagatatagagcactgctagtgcatttctgattgacatcagcccattaacattatgttttgaatgtgtatatagaacatggtatgaatcatttttacttatatcagaaactgaaaaaacaatattttctatagtctgacatcttactagtaactataacatagttatggatgatctgataattttgatacattttaaaattttgaaacattttattacttagtttcattttacttatttcaaaaatatttccaggaaatccccttacccaggatatattgaacctttatcaggaaccagatggaacaagacggctgctgaactatttgcttgataatttgtcaggtactgcaaaaagaattacaacagaacaaccacctccaaggtcttggattatgttacaagaaccagataggacaaggccaactgccttgttttctgtcatgtgctataatgttctttgtgataaatatgcgacccggcagttatacggctactgtccatcatgggcgctaaactgggactacaggaaaaaggccattattcaagaaatcttgagctgcaatgctgatatcgtaagtcttcaggaggttgaaacggaacagtattacagtttttttctggtagagctgaaagaacgtggctataatggattcttcagtcctaagtctagagctaggacaatgtcagaacaagaaaggaaacatgttgatggctgtgcaatattcttcaagacagaaaaatttactttggttcagaaacacactgttgaatttaatcagctagccatggcaaattctgaggggtctgaagctatgctgaacagagtcatgacaaaagataacattggggttgcagtactgctagaacttcggaaggaatcgattgaaatgccgtctggaaagccacatcttggaacagaaaaacaacttattcttgtggctaacgcccacatgcattgggaccctgaatactctgatgtgaagttggtacaaactatgatgttcctctcagaagtgaagaacattattgataaagcctctcgcaacctcaaatccagtgttttgggagaatttggaactattccacttgtgttatgtgcagatcttaattctttgccagactctggtgttgtagaatatttgagcacaggtggagtagaaacaaatcacaaagactttaaggagttgaggtataatgaaagtctcacaaacttcagctgtcatgggaagaatggaaccaccaatggaaggatcactcatggtttcaagttacagagtgcctatgagagtggcctgatgccttacacgaattacacatttgatttcaagggtataatagactacattttctattctaaacctcagctgaacaccttaggcatcctgggccctctggaccaccactggctggttgagaataacatcagtggctgcccgcaccccctcatcccctctgaccacttctcactttttgcacaactggagctcttactgcctttcctgccccaagtcaacggcatccaccttcctggcaggaggtagtcaagcaccttcagaggacagccttgattcacttgtaaacttgtgaaaatctgaacataggggagtgaggtatggccactgaggatttttgcttgcttaagaatgatttggactttcaatctgattatttgataaggatatagtatgaaagccaggtgctagcaacagacaaattctgagcccaatatgctttatactgctagacagggattggtgtgtttgcacctgtctttcatttgtcataagagattttcctatttcttctacccaatagaatattttcatgcctggaaataggaaaatgtgtgaacagcgtattctcttcacacagaaatctgtagcactgcttttttgaggccagtagcaacatccagagatcattcttccatactttactccctcctttttcagacttgtttgtaaagtacagaatctgaatttagcctttatgattgtatatgatccacagaagacctgatttatgaaattttgtactaaaatcatttggaaatgattgtattgtaaactgaggctaaatttttttttaaacctgtttcatgtgttataaaggccagcttgtaaaagaagctgcaacagactttctctgctcatgatttgcactcttagggttttgttagcccttttgtactactttctttttaaattgagaacatggttctttacatataaatctgcttcaaccttaggatgttttcagaccagaggcaacttattcatgaatttttatgaaaactatctactaggacagataagctgaacagtgatgatctgtagacatttatggactgaatgtaatggttgatatatgtacattctgatatttttaaatctttaactttttaaagttaaaaacctacagctgcttaggtccagcttcttaactctttttgagacacttcctgtcctatctccactgtgcctgcctaaatttgttctcaccaagcactgcctgtgcatgcagagaaaatctgtgcatcctcttttatatttttaaaatactgtttaacatttgtgagaattttatgaaaatgcttttgtatgagctgtggctttttcccattgtgaagcattgaatatcacattttggaacatgttatagggtgagtccctggatctttgctcaccagatccaagcactgcttctcggtgtcattgcagtgtgctgcttgtcacccagaatactactatcatgtgaattctttttgtcgtcagtgtcttttccttagtctttttgttgttgttgttgttgttgttttaatcattccttttttaagaagaagtaattttccatttatgaagcagtatgaattagatgtattttcaaaacaggtccctaagacaattcttcagatcatttttaaaatgactaagtcattttagtatgtcaagcaagataaaaattacatcataccgtctattttgcccatagtgccatttagagatgaaaaccagctttaactttgcaaagtgaacatgtacatggtctgctctcatttattcattcttctctcaaaagtcaaatgaatgcagagggagcttggtcaaactgcttttgtttcaactgcaggcaggggagcaaaaggacgccatgtgagcattaggaaaaaaaatactcactcttactaacaatttttatacagaaaatgagtcattttggaaatgattcttatgttttttttttttctccttttagaaaattctccaaaaggttttgatgttgaatcttggtcttggacctgttttttcctttgagggttttttgttttttgttttttctaggatttcattgtgatgttttggttttgttttttgctttttgtttaagttgtgctgacaccaaacacatccagtttataatcagtacattggaaagctggtattgatgtagaaccagtgcataactttttatggggttttgttattggtttttttttgtaaagtgtgaataaaaggtatgtttactcatttttcctgaacactgtgttggtaatgtgcatcatgacaatttccagtgaaggtgagctggagctggttggactaatgagactgaggaagcagcttttcctacgatctgcattatgtaatcacaggtccagagagctttatggaagcgggagaggaggagcacttactcatgttgtatttgttaatggaggatgtcatcttttcatagatgctggaactagagtgcacttgttagatgctaaaggtttgagctttacacaaaatgtcttcatctgtatttgttattgtctacaatatatttgaatttggggcagcatattaagatgtaatggcctgttatgtcttgaaaatacttgttttgcctcttccaggcatactgcattctgtggatcagtttgaacagcttctccaccttatttggacagtgataaattgaaccaagagtgtagatttacaagtgtaaccttcaaaagaggaagaactatttggggtctgtaggtaatgaacagtcacaccaaaatagactatgatgcttttgttaagaaaggtttcatgttttagatattttccgtgtcctaaataattttcaataatctataatccctaaaatgcaataaaaactagtatgttttcacggtgtatattttttttcaaaaattctgtaacaaatatatttaatgtgttgccataatgtcatttcagtatttttgctggataaatccattttagaaatgtcttacaaaaagtttagggcatgttttctgttttaaagaccagaagtttgaaggcacccaaatccttgtcgccaatctcctgaagtacagctttaccatattagtggtcattatttatgctttgagagtttcaatattgttcgtcaagttaacttatggcataatttaagctaaagttgtagaaatgaattgttgagtgcaactttcatagtcccaaagataggcagagaacatctccagaaatgtgtgtgtgtgtgtgtgtgtgtgtgtgtgtgtgtgtgtttaatatgatttagtgacaaccaggaaaacttacttgggattattagcactttcaaacttagggacattattaaattggatggaatgcacttctaaatgtttaaattaaaatttcaaagctctttcgagattcaggttctcaataataatattcaagttttagagtttcactttgtactatttaaatttatggaactagtttccatactgacttgtaaggttttggggtcatatataaggactaaagccaagctaggcaaaacaatgacagcaccgttttttcagtgaagctctcagaatgtccagtacagatgttgcagataattccaagaactccttcagcaggtgttcttcaccattcgtaaacagtattttaagatgttcactttgctcttctttttggttacatacattttaataactggtatgttgaagtagtgtctaaaagtatctagtctttattcacagtacattatattgtgtgatgcactggactaactcttgtttaccattcatgtaacaaaacccagcacattatctgcactataagctcaaagaatgtcacatccgcccagacagctctttgatgagggtgatgggaactgaataaaccatacggactggcagtaacaagggcttttactgttctgttcagtggaaccttcttggtcaaattgtaattagctagcattatatttatatacagggtcttttttctttaccgatgtattttcctactcatagccaaccaataaattcagtatctgtttcaaatattttagaagtgtagtttgtatagctgtagtactgaggtttgaggaaaaataaatgttgatcagcagaccacgtattttgcagggtgactgtgacatgctatgcggaaatggtgtcttggcatgctttattggactgctgctgt

SEQ ID NO: 34370 - DNA, 4693 bp, Homo sapiens
ggcgcggaggaggaggcggcggcgtcggtggcggcggcgacggcggcgcggaggcgaaggcagcggcgggcagccgaagcagtggctctcggagggggaacaaagagcagcgactaaggcggcagaggagcggcggcggtggcggcgctgcagcagcgggcgggactggtatggtggttccacagggcagaccccgctgcactcacagggaggaggaggcggcagcggcggaggaaggcggcgcaccccgagaggcatgcccaaagaaaaatacgagccccctgaccctcggaggatgtatacaattatgtcttctgaggaagcagcaaatggaaagaaatcccactgggcagagcttgaaataagtggaaaagtaagaagcttaagcgcatctttgtggtcactaactcacctgacagctttgcatttgagtgacaattccctgtcccgaattccttcagacattgccaagcttcacaatctggtgtatttggacctgtcatctaataaaattcgtagcttacccgcagaactcggaaacatggtatcactcagggagctccatttaaataacaacctgttacgagttctaccttttgagctgggaaaactgtttcagttgcagactttaggcctgaaaggaaatccccttacccaggatatattgaacctttatcaggaaccagatggaacaagacggctgctgaactatttgcttgataatttgtcaggtactgcaaaaagaattacaacagaacaaccacctccaaggtcttggattatgttacaagaaccagataggacaaggccaactgccttgttttctgtcatgtgctataatgttctttgtgataaatatgcgacccggcagttatacggctactgtccatcatgggcgctaaactgggactacaggaaaaaggccattattcaagaaatcttgagctgcaatgctgatatcgtaagtcttcaggaggttgaaacggaacagtattacagtttttttctggtagagctgaaagaacgtggctataatggattcttcagtcctaagtctagagctaggacaatgtcagaacaagaaaggaaacatgttgatggctgtgcaatattcttcaagacagaaaaatttactttggttcagaaacacactgttgaatttaatcagctagccatggcaaattctgaggggtctgaagctatgctgaacagagtcatgacaaaagataacattggggttgcagtactgctagaacttcggaaggaatcgattgaaatgccgtctggaaagccacatcttggaacagaaaaacaacttattcttgtggctaacgcccacatgcattgggaccctgaatactctgatgtgaagttggtacaaactatgatgttcctctcagaagtgaagaacattattgataaagcctctcgcaacctcaaatccagtgttttgggagaatttggaactattccacttgtgttatgtgcagatcttaattctttgccagactctggtgttgtagaatatttgagcacaggtggagtagaaacaaatcacaaagactttaaggagttgaggtataatgaaagtctcacaaacttcagctgtcatgggaagaatggaaccaccaatggaaggatcactcatggtttcaagttacagagtgcctatgagagtggcctgatgccttacacgaattacacatttgatttcaagggtataatagactacattttctattctaaacctcagctgaacaccttaggcatcctgggccctctggaccaccactggctggttgagaataacatcagtggctgcccgcaccccctcatcccctctgaccacttctcactttttgcacaactggagctcttactgcctttcctgccccaagtcaacggcatccaccttcctggcaggaggtagtcaagcaccttcagaggacagccttgattcacttgtaaacttgtgaaaatctgaacataggggagtgaggtatggccactgaggatttttgcttgcttaagaatgatttggactttcaatctgattatttgataaggatatagtatgaaagccaggtgctagcaacagacaaattctgagcccaatatgctttatactgctagacagggattggtgtgtttgcacctgtctttcatttgtcataagagattttcctatttcttctacccaatagaatattttcatgcctggaaataggaaaatgtgtgaacagcgtattctcttcacacagaaatctgtagcactgcttttttgaggccagtagcaacatccagagatcattcttccatactttactccctcctttttcagacttgtttgtaaagtacagaatctgaatttagcctttatgattgtatatgatccacagaagacctgatttatgaaattttgtactaaaatcatttggaaatgattgtattgtaaactgaggctaaatttttttttaaacctgtttcatgtgttataaaggccagcttgtaaaagaagctgcaacagactttctctgctcatgatttgcactcttagggttttgttagcccttttgtactactttctttttaaattgagaacatggttctttacatataaatctgcttcaaccttaggatgttttcagaccagaggcaacttattcatgaatttttatgaaaactatctactaggacagataagctgaacagtgatgatctgtagacatttatggactgaatgtaatggttgatatatgtacattctgatatttttaaatctttaactttttaaagttaaaaacctacagctgcttaggtccagcttcttaactctttttgagacacttcctgtcctatctccactgtgcctgcctaaatttgttctcaccaagcactgcctgtgcatgcagagaaaatctgtgcatcctcttttatatttttaaaatactgtttaacatttgtgagaattttatgaaaatgcttttgtatgagctgtggctttttcccattgtgaagcattgaatatcacattttggaacatgttatagggtgagtccctggatctttgctcaccagatccaagcactgcttctcggtgtcattgcagtgtgctgcttgtcacccagaatactactatcatgtgaattctttttgtcgtcagtgtcttttccttagtctttttgttgttgttgttgttgttgttttaatcattccttttttaagaagaagtaattttccatttatgaagcagtatgaattagatgtattttcaaaacaggtccctaagacaattcttcagatcatttttaaaatgactaagtcattttagtatgtcaagcaagataaaaattacatcataccgtctattttgcccatagtgccatttagagatgaaaaccagctttaactttgcaaagtgaacatgtacatggtctgctctcatttattcattcttctctcaaaagtcaaatgaatgcagagggagcttggtcaaactgcttttgtttcaactgcaggcaggggagcaaaaggacgccatgtgagcattaggaaaaaaaatactcactcttactaacaatttttatacagaaaatgagtcattttggaaatgattcttatgttttttttttttctccttttagaaaattctccaaaaggttttgatgttgaatcttggtcttggacctgttttttcctttgagggttttttgttttttgttttttctaggatttcattgtgatgttttggttttgttttttgctttttgtttaagttgtgctgacaccaaacacatccagtttataatcagtacattggaaagctggtattgatgtagaaccagtgcataactttttatggggttttgttattggtttttttttgtaaagtgtgaataaaaggtatgtttactcatttttcctgaacactgtgttggtaatgtgcatcatgacaatttccagtgaaggtgagctggagctggttggactaatgagactgaggaagcagcttttcctacgatctgcattatgtaatcacaggtccagagagctttatggaagcgggagaggaggagcacttactcatgttgtatttgttaatggaggatgtcatcttttcatagatgctggaactagagtgcacttgttagatgctaaaggtttgagctttacacaaaatgtcttcatctgtatttgttattgtctacaatatatttgaatttggggcagcatattaagatgtaatggcctgttatgtcttgaaaatacttgttttgcctcttccaggcatactgcattctgtggatcagtttgaacagcttctccaccttatttggacagtgataaattgaaccaagagtgtagatttacaagtgtaaccttcaaaagaggaagaactatttggggtctgtaggtaatgaacagtcacaccaaaatagactatgatgcttttgttaagaaaggtttcatgttttagatattttccgtgtcctaaataattttcaataatctataatccctaaaatgcaataaaaactagtatgttttcacggtgtatattttttttcaaaaattctgtaacaaatatatttaatgtgttgccataaaaaaaaatatcaatataaattatcaacttttcttccctcatcccttctttcctttctccattcaatcttttactaacttatatagg

SEQ ID NO: 34371 - DNA, 5798 bp, Homo sapiens
ggcgcggaggaggaggcggcggcgtcggtggcggcggcgacggcggcgcggaggcgaaggcagcggcgggcagccgaagcagtggctctcggagggggaacaaagagcagcgactaaggcggcagaggagcggcggcggtggcggcgctgcagcagcgggcgggactggtatggtggttccacagggcagaccccgctgcactcacagggaggaggaggcggcagcggcggaggaaggcggcgcaccccgagaggcatgcccaaagaaaaatacgagccccctgaccctcggaggatgtatacaattatgtcttctgaggaagcagcaaatggaaagaaatcccactgggcagagcttgaaataagtggaaaagtaagaagcttaagcgcatctttgtggtcactaactcacctgacagctttgcatttgagtgacaattccctgtcccgaattccttcagacattgccaagcttcacaatctggtgtatttggacctgtcatctaataaaattcgtagcttacccgcagaactcggaaacatggtatcactcagggagctccatttaaataacaacctgttacgagttctaccttttgagctgggaaaactgtttcagttgcagactttaggcctgaaaggaaatccccttacccaggatatattgaacctttatcaggaaccagatggaacaagacggctgctgaactatttgcttgataatttgtcaggtactgcaaaaagaattacaacagaacaaccacctccaaggtcttggattatgttacaagaaccagataggacaaggccaactgccttgttttctgtcatgtgctataatgttctttgtgataaatatgcgacccggcagttatacggctactgtccatcatgggcgctaaactgggactacaggaaaaaggccattattcaagaaatcttgagctgcaatgctgatatcgtaagtcttcaggaggttgaaacggaacagtattacagtttttttctggtagagctgaaagaacgtggctataatggattcttcagtcctaagtctagagctaggacaatgtcagaacaagaaaggaaacatgttgatggctgtgcaatattcttcaagacagaaaaatttactttggttcagaaacacactgttgaatttaatcagctagccatggcaaattctgaggggtctgaagctatgctgaacagagtcatgacaaaagataacattggggttgcagtactgctagaacttcggaaggaatcgattgaaatgccgtctggaaagccacatcttggaacagaaaaacaacttattcttgtggctaacgcccacatgcattgggaccctgaatactctgatgtgaagttggtacaaactatgatgttcctctcagaagtgaagaacattattgataaagcctctcgcaacctcaaatccagtgttttgggagaatttggaactattccacttgtgttatgtgcagatcttaattctttgccagactctggtgttgtagaatatttgagcacaggtggagtagaaacaaatcacaaagactttaaggagttgaggtataatgaaagtctcacaaacttcagctgtcatgggaagaatggaaccaccaatggaaggatcactcatggtttcaagttacagagtgcctatgagagtggcctgatgccttacacgaattacacatttgatttcaagggtataatagactacattttctattctaaacctcagctgaacaccttaggcatcctgggccctctggaccaccactggctggttgagaataacatcagtggctgcccgcaccccctcatcccctctgaccacttctcactttttgcacaactggagctcttactgcctttcctgccccaagtcaacggcatccaccttcctggcaggaggtagtcaagcaccttcagaggacagccttgattcacttgtaaacttgtgaaaatctgaacataggggagtgaggtatggccactgaggatttttgcttgcttaagaatgatttggactttcaatctgattatttgataaggatatagtatgaaagccaggtgctagcaacagacaaattctgagcccaatatgctttatactgctagacagggattggtgtgtttgcacctgtctttcatttgtcataagagattttcctatttcttctacccaatagaatattttcatgcctggaaataggaaaatgtgtgaacagcgtattctcttcacacagaaatctgtagcactgcttttttgaggccagtagcaacatccagagatcattcttccatactttactccctcctttttcagacttgtttgtaaagtacagaatctgaatttagcctttatgattgtatatgatccacagaagacctgatttatgaaattttgtactaaaatcatttggaaatgattgtattgtaaactgaggctaaatttttttttaaacctgtttcatgtgttataaaggccagcttgtaaaagaagctgcaacagactttctctgctcatgatttgcactcttagggttttgttagcccttttgtactactttctttttaaattgagaacatggttctttacatataaatctgcttcaaccttaggatgttttcagaccagaggcaacttattcatgaatttttatgaaaactatctactaggacagataagctgaacagtgatgatctgtagacatttatggactgaatgtaatggttgatatatgtacattctgatatttttaaatctttaactttttaaagttaaaaacctacagctgcttaggtccagcttcttaactctttttgagacacttcctgtcctatctccactgtgcctgcctaaatttgttctcaccaagcactgcctgtgcatgcagagaaaatctgtgcatcctcttttatatttttaaaatactgtttaacatttgtgagaattttatgaaaatgcttttgtatgagctgtggctttttcccattgtgaagcattgaatatcacattttggaacatgttatagggtgagtccctggatctttgctcaccagatccaagcactgcttctcggtgtcattgcagtgtgctgcttgtcacccagaatactactatcatgtgaattctttttgtcgtcagtgtcttttccttagtctttttgttgttgttgttgttgttgttttaatcattccttttttaagaagaagtaattttccatttatgaagcagtatgaattagatgtattttcaaaacaggtccctaagacaattcttcagatcatttttaaaatgactaagtcattttagtatgtcaagcaagataaaaattacatcataccgtctattttgcccatagtgccatttagagatgaaaaccagctttaactttgcaaagtgaacatgtacatggtctgctctcatttattcattcttctctcaaaagtcaaatgaatgcagagggagcttggtcaaactgcttttgtttcaactgcaggcaggggagcaaaaggacgccatgtgagcattaggaaaaaaaatactcactcttactaacaatttttatacagaaaatgagtcattttggaaatgattcttatgttttttttttttctccttttagaaaattctccaaaaggttttgatgttgaatcttggtcttggacctgttttttcctttgagggttttttgttttttgttttttctaggatttcattgtgatgttttggttttgttttttgctttttgtttaagttgtgctgacaccaaacacatccagtttataatcagtacattggaaagctggtattgatgtagaaccagtgcataactttttatggggttttgttattggtttttttttgtaaagtgtgaataaaaatttccagtgaaggtgagctggagctggttggactaatgagactgaggaagcagcttttcctacgatctgcattatgtaatcacaggtccagagagctttatggaagcgggagaggaggagcacttactcatgttgtatttgttaatggaggatgtcatcttttcatagatgctggaactagagtgcacttgttagatgctaaaggtttgagctttacacaaaatgtcttcatctgtatttgttattgtctacaatatatttgaatttggggcagcatattaagatgtaatggcctgttatgtcttgaaaatacttgttttgcctcttccaggcatactgcattctgtggatcagtttgaacagcttctccaccttatttggacagtgataaattgaaccaagagtgtagatttacaagtgtaaccttcaaaagaggaagaactatttggggtctgtaggtaatgaacagtcacaccaaaatagactatgatgcttttgttaagaaaggtttcatgttttagatattttccgtgtcctaaataattttcaataatctataatccctaaaatgcaataaaaactagtatgttttcacggtgtatattttttttcaaaaattctgtaacaaatatatttaatgtgttgccataatgtcatttcagtatttttgctggataaatccattttagaaatgtcttacaaaaagtttagggcatgttttctgttttaaagaccagaagtttgaaggcacccaaatccttgtcgccaatctcctgaagtacagctttaccatattagtggtcattatttatgctttgagagtttcaatattgttcgtcaagttaacttatggcataatttaagctaaagttgtagaaatgaattgttgagtgcaactttcatagtcccaaagataggcagagaacatctccagaaatgtgtgtgtgtgtgtgtgtgtgtgtgtgtgtgtgtgtgtttaatatgatttagtgacaaccaggaaaacttacttgggattattagcactttcaaacttagggacattattaaattggatggaatgcacttctaaatgtttaaattaaaatttcaaagctctttcgagattcaggttctcaataataatattcaagttttagagtttcactttgtactatttaaatttatggaactagtttccatactgacttgtaaggttttggggtcatatataaggactaaagccaagctaggcaaaacaatgacagcaccgttttttcagtgaagctctcagaatgtccagtacagatgttgcagataattccaagaactccttcagcaggtgttcttcaccattcgtaaacagtattttaagatgttcactttgctcttctttttggttacatacattttaataactggtatgttgaagtagtgtctaaaagtatctagtctttattcacagtacattatattgtgtgatgcactggactaactcttgtttaccattcatgtaacaaaacccagcacattatctgcactataagctcaaagaatgtcacatccgcccagacagctctttgatgagggtgatgggaactgaataaaccatacggactggcagtaacaagggcttttactgttctgttcagtggaaccttcttggtcaaattgtaattagctagcattatatttatatacagggtcttttttctttaccgatgtattttcctactcatagccaaccaataaattcagtatctgtttcaaatattttagaagtgtagtttgtatagctgtagtactgaggtttgaggaaaaataaatgttgatcagcagaccacgtattttgcagggtgactgtgacatgctatgcggaaatggtgtcttggcatgctttattggactgctgctgt

SEQ ID NO: 34372 - DNA, 4525 bp, Homo sapiens
ggcgcggaggaggaggcggcggcgtcggtggcggcggcgacggcggcgcggaggcgaaggcagcggcgggcagccgaagcagtggctctcggagggggaacaaagagcagcgactaaggcggcagaggagcggcggcggtggcggcgctgcagcagcgggcgggactggtatggtggttccacagggcagaccccgctgcactcacagggaggaggaggcggcagcggcggaggaaggcggcgcaccccgagaggcatgcccaaagaaaaatacgagccccctgaccctcggaggatgtatacaattatgtcttctgaggaagcagcaaatggaaagaaatcccactgggcagagcttgaaataagtggaaaagtaagaagcttaagcgcatctttgtggtcactaactcacctgacagctttgcatttgagtgacaattccctgtcccgaattccttcagacattgccaagcttcacaatctggtgtatttggacctgtcatctaataaaattcgtagcttacccgcagaactcggaaacatggtatcactcagggagctccatttaaataacaacctgttacgagttctaccttttgagctgggaaaactgtttcagttgcagactttaggcctgaaaggaaatccccttacccaggatatattgaacctttatcaggaaccagatggaacaagacggctgctgaactatttgcttgataatttgtcaggtactgcaaaaagaattacaacagaacaaccacctccaaggtcttggattatgttacaagaaccagataggacaaggccaactgccttgttttctgtcatgtgctataatgttctttgtgataaatatgcgacccggcagttatacggctactgtccatcatgggcgctaaactgggactacaggaaaaaggccattattcaagaaatcttgagctgcaatgctgatatcgtaagtcttcaggaggttgaaacggaacagtattacagtttttttctggtagagctgaaagaacgtggctataatggattcttcagtcctaagtctagagctaggacaatgtcagaacaagaaaggaaacatgttgatggctgtgcaatattcttcaagacagaaaaatttactttggttcagaaacacactgttgaatttaatcagctagccatggcaaattctgaggggtctgaagctatgctgaacagagtcatgacaaaagataacattggggttgcagtactgctagaacttcggaaggaatcgattgaaatgccgtctggaaagccacatcttggaacagaaaaacaacttattcttgtggctaacgcccacatgcattgggaccctgaatactctgatgtgaagttggtacaaactatgatgttcctctcagaagtgaagaacattattgataaagcctctcgcaacctcaaatccagtgttttgggagaatttggaactattccacttgtgttatgtgcagatcttaattctttgccagactctggtgttgtagaatatttgagcacaggtggagtagaaacaaatcacaaagactttaaggagttgaggtataatgaaagtctcacaaacttcagctgtcatgggaagaatggaaccaccaatggaaggatcactcatggtttcaagttacagagtgcctatgagagtggcctgatgccttacacgaattacacatttgatttcaagggtataatagactacattttctattctaaacctcagctgaacaccttaggcatcctgggccctctggaccaccactggctggttgagaataacatcagtggctgcccgcaccccctcatcccctctgaccacttctcactttttgcacaactggagctcttactgcctttcctgccccaagtcaacggcatccaccttcctggcaggaggtagtcaagcaccttcagaggacagccttgattcacttgtaaacttgtgaaaatctgaacataggggagtgaggtatggccactgaggatttttgcttgcttaagaatgatttggactttcaatctgattatttgataaggatatagtatgaaagccaggtgctagcaacagacaaattctgagcccaatatgctttatactgctagacagggattggtgtgtttgcacctgtctttcatttgtcataagagattttcctatttcttctacccaatagaatattttcatgcctggaaataggaaaatgtgtgaacagcgtattctcttcacacagaaatctgtagcactgcttttttgaggccagtagcaacatccagagatcattcttccatactttactccctcctttttcagacttgtttgtaaagtacagaatctgaatttagcctttatgattgtatatgatccacagaagacctgatttatgaaattttgtactaaaatcatttggaaatgattgtattgtaaactgaggctaaatttttttttaaacctgtttcatgtgttataaaggccagcttgtaaaagaagctgcaacagactttctctgctcatgatttgcactcttagggttttgttagcccttttgtactactttctttttaaattgagaacatggttctttacatataaatctgcttcaaccttaggatgttttcagaccagaggcaacttattcatgaatttttatgaaaactatctactaggacagataagctgaacagtgatgatctgtagacatttatggactgaatgtaatggttgatatatgtacattctgatatttttaaatctttaactttttaaagttaaaaacctacagctgcttaggtccagcttcttaactctttttgagacacttcctgtcctatctccactgtgcctgcctaaatttgttctcaccaagcactgcctgtgcatgcagagaaaatctgtgcatcctcttttatatttttaaaatactgtttaacatttgtgagaattttatgaaaatgcttttgtatgagctgtggctttttcccattgtgaagcattgaatatcacattttggaacatgttatagggtgagtccctggatctttgctcaccagatccaagcactgcttctcggtgtcattgcagtgtgctgcttgtcacccagaatactactatcatgtgaattctttttgtcgtcagtgtcttttccttagtctttttgttgttgttgttgttgttgttttaatcattccttttttaagaagaagtaattttccatttatgaagcagtatgaattagatgtattttcaaaacaggtccctaagacaattcttcagatcatttttaaaatgactaagtcattttagtatgtcaagcaagataaaaattacatcataccgtctattttgcccatagtgccatttagagatgaaaaccagctttaactttgcaaagtgaacatgtacatggtctgctctcatttattcattcttctctcaaaagtcaaatgaatgcagagggagcttggtcaaactgcttttgtttcaactgcaggcaggggagcaaaaggacgccatgtgagcattaggaaaaaaaatactcactcttactaacaatttttatacagaaaatgagtcattttggaaatgattcttatgttttttttttttctccttttagaaaattctccaaaaggttttgatgttgaatcttggtcttggacctgttttttcctttgagggttttttgttttttgttttttctaggatttcattgtgatgttttggttttgttttttgctttttgtttaagttgtgctgacaccaaacacatccagtttataatcagtacattggaaagctggtattgatgtagaaccagtgcataactttttatggggttttgttattggtttttttttgtaaagtgtgaataaaaatttccagtgaaggtgagctggagctggttggactaatgagactgaggaagcagcttttcctacgatctgcattatgtaatcacaggtccagagagctttatggaagcgggagaggaggagcacttactcatgttgtatttgttaatggaggatgtcatcttttcatagatgctggaactagagtgcacttgttagatgctaaaggtttgagctttacacaaaatgtcttcatctgtatttgttattgtctacaatatatttgaatttggggcagcatattaagatgtaatggcctgttatgtcttgaaaatacttgttttgcctcttccaggcatactgcattctgtggatcagtttgaacagcttctccaccttatttggacagtgataaattgaaccaagagtgtagatttacaagtgtaaccttcaaaagaggaagaactatttggggtctgtaggtaatgaacagtcacaccaaaatagactatgatgcttttgttaagaaaggtttcatgttttagatattttccgtgtcctaaataattttcaataatctataatccctaaaatgcaataaaaactagtatgttttcaaaaaaaaaaagtcgacgcggccgcgaat

SEQ ID NO: 34373 - DNA, 2106 bp, Homo sapiens
ggcgcggaggaggaggcggcggcgtcggtggcggcggcgacggcggcgcggaggcgaaggcagcggcgggcagccgaagcagtggctctcggagggggaacaaagagcagcgactaaggcggcagaggagcggcggcggtggcggcgctgcagcagcgggcgggactggtatggtggttccacagggcagaccccgctgcactcacagggaggaggaggcggcagcggcggaggaaggcggcgcaccccgagaggcatgcccaaagaaaaatacgagccccctgaccctcggaggatgtatacaattatgtcttctgaggaagcagcaaatggaaagaaatcccactgggcagagcttgaaataagtggaaaagtaagaagcttaagcgcatctttgtggtcactaactcacctgacagctttgcatttgagtgacaattccctgtcccgaattccttcagacattgccaagcttcacaatctggtgtatttggacctgtcatctaataaaattcgtagcttacccgcagaactcggaaacatggtatcactcagggagctccatttaaataacaacctgttacgagttctaccttttgagctgggaaaactgtttcagttgcagactttaggcctgaaaggaaatccccttacccaggatatattgaacctttatcaggaaccagatggaacaagacggctgctgaactatttgcttgataatttgtcaggtactgcaaaaagaattacaacagaacaaccacctccaaggtcttggattatgttacaagaaccagataggacaaggccaactgccttgttttctgtcatgtgctataatgttctttgtgataaatatgcgacccggcagttatacggctactgtccatcatgggcgctaaactgggactacaggaaaaaggccattattcaagaaatcttgagctgcaatgctgatatcgtaagtcttcaggaggttgaaacggaacagtattacagtttttttctggtagagctgaaagaacgtggctataatggattcttcagtcctaagtctagagctaggacaatgtcagaacaagaaaggaaacatgttgatggctgtgcaatattcttcaagacagaaaaatttactttggttcagaaacacactgttgaatttaatcagctagccatggcaaattctgaggggtctgaagctatgctgaacagagtcatgacaaaagataacattggggttgcagtactgctagaacttcggaaggaatcgattgaaatgccgtctggaaagccacatcttggaacagaaaaacaacttattcttgtggctaacgcccacatgcattgggaccctgaatactctgatgtgaagttggtacaaactatgatgttcctctcagaagtgaagaacattattgataaagcctctcgcaacctcaaatccagtgttttgggagaatttggaactattccacttgtgttatgtgcagatcttaattctttgccagactctggtaagaaaataatgtgattttatgtagaatattttttgacataagatgatttagtaatgttttgtttctgatcattccaaattaagtccaaataaaaattcagtttgtaatggcagctatgagcaggttttaaacatcatgttggggtggaggggccattttgaagatgaaacgatattatggaaacttgaggagaaggatgttaatcatcttgaataaacacataagcaataacgtgaaataactctttaaagaacgtatgtagttccattttattactccaaagtcagagataattatggttattaagacagcctctttgggattccagcgtgtggtaatataatcatagtttaaatttgagttaaaattatagaatctcaattttgcatgtatttataacttgattagaaaaatacacctcaggtggaaaatgagctcctttatttgcacacatatcagtcaagcgattttgacaaagagcaaggatcttgatttttattaaaatgtagaatacagaaagcctgatctggagcgctctttccgtggatagtatacaataaacagtagcccttgtaataacaaactgttt

SEQ ID NO: 34374 - DNA, 743 bp, Homo sapiens
ttatgcagctgttacgagctcttttgagtcgttaacgaaatgatcattttagttctcttttaagaattcacatggtaggctgctttatcatttccactttcttaaatgtgtagtagaccccatgtgtactagaccagtgatactcagtgtggtctgtgacctggtgccagtttgcaaactgtcttgccagtctgcagtgagattaatacagcagttgaggaattttatatgtctgttaaatctaatactttttaaaaattgggtcttacattttgtccttttcccccattatttcattttctctagtaatttgtttcttgtattctctggcagtttttttttttaaaccacatgttatttaagaaacgcagtactagacattgaaatataacgtaacattttttcattcttaggtgcttatgttcctagaaactatgttgttgattttaactgttaaaggctaacatatttttctgacttcctggaatttttacatcaacagggagctccatttaaataacaacctgttacgagttctaccttttgagctgggaaaactgtttcagttgcagactttaggcctgaaaggtatgacttccatatttgtacttcttatggtttgtgtatatgtctttgaatctaaagaagccaagaagctttctgctaggggattcttttaaagactcattttcccccagacttcatcagtttcttagctatatcgcaatggttttatcttctct

SEQ ID NO: 34375 - DNA, 274 bp, Homo sapiens
caatgaaaacgaggggggcgcggaggaggaggcggcggcgtcggtggcggcggcgacggcggcgcggaggcgaaggcagcggcgggcgcagcgaggagggcgaggccgggggccgagagggcgggagggcgtagtggcggcccgtcggggcggctgaggcgggcagccgaagcagtggctctcggagggggaacaaagagcagcgactaaggcggcagaggagcggcggcggtggcggcgctgcagcagcgggcgggactggtatggtggttcc

SEQ ID NO: 34376 - DNA, 6253 bp, Homo sapiens
ggcgcggaggaggaggcggcggcgtcggtggcggcggcgacggcggcgcggaggcgaaggcagcggcgggcagccgaagcagtggctctcggagggggaacaaagagcagcgactaaggcggcagaggagcggcggcggtggcggcgctgcagcagcgggcgggactggtatggtggttccacagggcagaccccgctgcactcacagggaggaggaggcggcagcggcggaggaaggcggcgcaccccgagagcactaatcgctattttctttggaaacttcctttgattctttacctccttcaccttccccgaagagcctgctaaccaacacctgtggccttctgtttttaactgttgttgccattgacagcgttgtgaatggtcatctcgctcgagctctttggatttgttgttactgtgcatgcccaaagaaaaatacgagccccctgaccctcggaggatgtatacaattatgtcttctgaggaagcagcaaatggaaagaaatcccactgggcagagcttgaaataagtggaaaagtaagaagcttaagcgcatctttgtggtcactaactcacctgacagctttgcatttgagtgacaattccctgtcccgaattccttcagacattgccaagcttcacaatctggtgtatttggacctgtcatctaataaaattcgtagcttacccgcagaactcggaaacatggtatcactcagggagctccatttaaataacaacctgttacgagttctaccttttgagctgggaaaactgtttcagttgcagactttaggcctgaaaggaaatccccttacccaggatatattgaacctttatcaggaaccagatggaacaagacggctgctgaactatttgcttgataatttgtcaggtactgcaaaaagaattacaacagaacaaccacctccaaggtcttggattatgttacaagaaccagataggacaaggccaactgccttgttttctgtcatgtgctataatgttctttgtgataaatatgcgacccggcagttatacggctactgtccatcatgggcgctaaactgggactacaggaaaaaggccattattcaagaaatcttgagctgcaatgctgatatcgtaagtcttcaggaggttgaaacggaacagtattacagtttttttctggtagagctgaaagaacgtggctataatggattcttcagtcctaagtctagagctaggacaatgtcagaacaagaaaggaaacatgttgatggctgtgcaatattcttcaagacagaaaaatttactttggttcagaaacacactgttgaatttaatcagctagccatggcaaattctgaggggtctgaagctatgctgaacagagtcatgacaaaagataacattggggttgcagtactgctagaacttcggaaggaatcgattgaaatgccgtctggaaagccacatcttggaacagaaaaacaacttattcttgtggctaacgcccacatgcattgggaccctgaatactctgatgtgaagttggtacaaactatgatgttcctctcagaagtgaagaacattattgataaagcctctcgcaacctcaaatccagtgttttgggagaatttggaactattccacttgtgttatgtgcagatcttaattctttgccagactctggtgttgtagaatatttgagcacaggtggagtagaaacaaatcacaaagactttaaggagttgaggtataatgaaagtctcacaaacttcagctgtcatgggaagaatggaaccaccaatggaaggatcactcatggtttcaagttacagagtgcctatgagagtggcctgatgccttacacgaattacacatttgatttcaagggtataatagactacattttctattctaaacctcagctgaacaccttaggcatcctgggccctctggaccaccactggctggttgagaataacatcagtggctgcccgcaccccctcatcccctctgaccacttctcactttttgcacaactggagctcttactgcctttcctgccccaagtcaacggcatccaccttcctggcaggaggtagtcaagcaccttcagaggacagccttgattcacttgtaaacttgtgaaaatctgaacataggggagtgaggtatggccactgaggatttttgcttgcttaagaatgatttggactttcaatctgattatttgataaggatatagtatgaaagccaggtgctagcaacagacaaattctgagcccaatatgctttatactgctagacagggattggtgtgtttgcacctgtctttcatttgtcataagagattttcctatttcttctacccaatagaatattttcatgcctggaaataggaaaatgtgtgaacagcgtattctcttcacacagaaatctgtagcactgcttttttgaggccagtagcaacatccagagatcattcttccatactttactccctcctttttcagacttgtttgtaaagtacagaatctgaatttagcctttatgattgtatatgatccacagaagacctgatttatgaaattttgtactaaaatcatttggaaatgattgtattgtaaactgaggctaaatttttttttaaacctgtttcatgtgttataaaggccagcttgtaaaagaagctgcaacagactttctctgctcatgatttgcactcttagggttttgttagcccttttgtactactttctttttaaattgagaacatggttctttacatataaatctgcttcaaccttaggatgttttcagaccagaggcaacttattcatgaatttttatgaaaactatctactaggacagataagctgaacagtgatgatctgtagacatttatggactgaatgtaatggttgatatatgtacattctgatatttttaaatctttaactttttaaagttaaaaacctacagctgcttaggtccagcttcttaactctttttgagacacttcctgtcctatctccactgtgcctgcctaaatttgttctcaccaagcactgcctgtgcatgcagagaaaatctgtgcatcctcttttatatttttaaaatactgtttaacatttgtgagaattttatgaaaatgcttttgtatgagctgtggctttttcccattgtgaagcattgaatatcacattttggaacatgttatagggtgagtccctggatctttgctcaccagatccaagcactgcttctcggtgtcattgcagtgtgctgcttgtcacccagaatactactatcatgtgaattctttttgtcgtcagtgtcttttccttagtctttttgttgttgttgttgttgttgttttaatcattccttttttaagaagaagtaattttccatttatgaagcagtatgaattagatgtattttcaaaacaggtccctaagacaattcttcagatcatttttaaaatgactaagtcattttagtatgtcaagcaagataaaaattacatcataccgtctattttgcccatagtgccatttagagatgaaaaccagctttaactttgcaaagtgaacatgtacatggtctgctctcatttattcattcttctctcaaaagtcaaatgaatgcagagggagcttggtcaaactgcttttgtttcaactgcaggcaggggagcaaaaggacgccatgtgagcattaggaaaaaaaatactcactcttactaacaatttttatacagaaaatgagtcattttggaaatgattcttatgttttttttttttctccttttagaaaattctccaaaaggttttgatgttgaatcttggtcttggacctgttttttcctttgagggttttttgttttttgttttttctaggatttcattgtgatgttttggttttgttttttgctttttgtttaagttgtgctgacaccaaacacatccagtttataatcagtacattggaaagctggtattgatgtagaaccagtgcataactttttatggggttttgttattggtttttttttgtaaagtgtgaataaaaggtatgtttactcatttttcctgaacactgtgttggtaatgtgcatcatgacaatttccagtgaaggtgagctggagctggttggactaatgagactgaggaagcagcttttcctacgatctgcattatgtaatcacaggtccagagagctttatggaagcgggagaggaggagcacttactcatgttgtatttgttaatggaggatgtcatcttttcatagatgctggaactagagtgcacttgttagatgctaaaggtttgagctttacacaaaatgtcttcatctgtatttgttattgtctacaatatatttgaatttggggcagcatattaagatgtaatggcctgttatgtcttgaaaatacttgttttgcctcttccaggcatactgcattctgtggatcagtttgaacagcttctccaccttatttggacagtgataaattgaaccaagagtgtagatttacaagtgtaaccttcaaaagaggaagaactatttggggtctgtaggtaatgaacagtcacaccaaaatagactatgatgcttttgttaagaaaggtttcatgttttagatattttccgtgtcctaaataattttcaataatctataatccctaaaatgcaataaaaactagtatgttttcacggtgtatattttttttcaaaaattctgtaacaaatatatttaatgtgttgccataatgtcatttcagtatttttgctggataaatccattttagaaatgtcttacaaaaagtttagggcatgttttctgttttaaagaccagaagtttgaaggcacccaaatccttgtcgccaatctcctgaagtacagctttaccatattagtggtcattatttatgctttgagagtttcaatattgttcgtcaagttaacttatggcataatttaagctaaagttgtagaaatgaattgttgagtgcaactttcatagtcccaaagataggcagagaacatctccagaaatgtgtgtgtgtgtgtgtgtgtgtgtgtgtgtgtgtgtgtttaatatgatttagtgacaaccaggaaaacttacttgggattattagcactttcaaacttagggacattattaaattggatggaatgcacttctaaatgtttaaattaaaatttcaaagctctttcgagattcaggttctcaataataatattcaagttttagagtttcactttgtactatttaaatttatggaactagtttccatactgacttgtaaggttttggggtcatatataaggactaaagccaagctaggcaaaacaatgacagcaccgttttttcagtgaagctctcagaatgtccagtacagatgttgcagataattccaagaactccttcagcaggtgttcttcaccattcgtaaacagtattttaagatgttcactttgctcttctttttggttacatacattttaataactggtatgttgaagtagtgtctaaaagtatctagtctttattcacagtacattatattgtgtgatgcactggactaactcttgtttaccattcatgtaacaaaacccagcacattatctgcactataagctcaaagaatgtcacatccgcccagacagctctttgatgagggtgatgggaactgaataaaccatacggactggcagtaacaagggcttttactgttctgttcagtggaaccttcttggtcaaattgtaattagctagcattatatttatatacagggtcttttttctttaccgatgtattttcctactcatagccaaccaataaattcagtatctgtttcaaatattttagaagtgtagtttgtatagctgtagtactgaggtttgaggaaaaataaatgttgatcagcagaccacgtatttaaaattctgaatcttctgggacagggttgtaactcagccttccaaagggaagagtgcagggggacggggccatgatatggggaaatggtgtaaactaatgtatttctttattggctgttattctgtataacactcatatctttgccaaagttcaattttatatttaggcaactgatggtccttttgcatttaggattttcgttgttgttaccttatacctcatgatataaggaatgggctcatgtgtcttccgtcttttggaaggaggttgacatattttaaataaatgcttttaaatac

SEQ ID NO: 34377 - DNA, 5599 bp, Homo sapiens
ggctgatctagagtatccccgtagtcccaccagacctcggaggatgtatacaattatgtcttctgaggaagcagcaaatggaaagaaatcccactgggcagagcttgaaataagtggaaaagtaagaagcttaagcgcatctttgtggtcactaactcacctgacagctttgcatttgagtgacaattccctgtcccgaattccttcagacattgccaagcttcacaatctggtgtatttggacctgtcatctaataaaattcgtagcttacccgcagaactcggaaacatggtatcactcagggagctccatttaaataacaacctgttacgagttctaccttttgagctgggaaaactgtttcagttgcagactttaggcctgaaaggaaatccccttacccaggatatattgaacctttatcaggaaccagatggaacaagacggctgctgaactatttgcttgataatttgtcaggtactgcaaaaagaattacaacagaacaaccacctccaaggtcttggattatgttacaagaaccagataggacaaggccaactgccttgttttctgtcatgtgctataatgttctttgtgataaatatgcgacccggcagttatacggctactgtccatcatgggcgctaaactgggactacaggaaaaaggccattattcaagaaatcttgagctgcaatgctgatatcgtaagtcttcaggaggttgaaacggaacagtattacagtttttttctggtagagctgaaagaacgtggctataatggattcttcagtcctaagtctagagctaggacaatgtcagaacaagaaaggaaacatgttgatggctgtgcaatattcttcaagacagaaaaatttactttggttcagaaacacactgttgaatttaatcagctagccatggcaaattctgaggggtctgaagctatgctgaacagagtcatgacaaaagataacattggggttgcagtactgctagaacttcggaaggaatcgattgaaatgccgtctggaaagccacatcttggaacagaaaaacaacttattcttgtggctaacgcccacatgcattgggaccctgaatactctgatgtgaagttggtacaaactatgatgttcctctcagaagtgaagaacattattgataaagcctctcgcaacctcaaatccagtgttttgggagaatttggaactattccacttgtgttatgtgcagatcttaattctttgccagactctggtgttgtagaatatttgagcacaggtggagtagaaacaaatcacaaagactttaaggagttgaggtataatgaaagtctcacaaacttcagctgtcatgggaagaatggaaccaccaatggaaggatcactcatggtttcaagttacagagtgcctatgagagtggcctgatgccttacacgaattacacatttgatttcaagggtataatagactacattttctattctaaacctcagctgaacaccttaggcatcctgggccctctggaccaccactggctggttgagaataacatcagtggctgcccgcaccccctcatcccctctgaccacttctcactttttgcacaactggagctcttactgcctttcctgccccaagtcaacggcatccaccttcctggcaggaggtagtcaagcaccttcagaggacagccttgattcacttgtaaacttgtgaaaatctgaacataggggagtgaggtatggccactgaggatttttgcttgcttaagaatgatttggactttcaatctgattatttgataaggatatagtatgaaagccaggtgctagcaacagacaaattctgagcccaatatgctttatactgctagacagggattggtgtgtttgcacctgtctttcatttgtcataagagattttcctatttcttctacccaatagaatattttcatgcctggaaataggaaaatgtgtgaacagcgtattctcttcacacagaaatctgtagcactgcttttttgaggccagtagcaacatccagagatcattcttccatactttactccctcctttttcagacttgtttgtaaagtacagaatctgaatttagcctttatgattgtatatgatccacagaagacctgatttatgaaattttgtactaaaatcatttggaaatgattgtattgtaaactgaggctaaatttttttttaaacctgtttcatgtgttataaaggccagcttgtaaaagaagctgcaacagactttctctgctcatgatttgcactcttagggttttgttagcccttttgtactactttctttttaaattgagaacatggttctttacatataaatctgcttcaaccttaggatgttttcagaccagaggcaacttattcatgaatttttatgaaaactatctactaggacagataagctgaacagtgatgatctgtagacatttatggactgaatgtaatggttgatatatgtacattctgatatttttaaatctttaactttttaaagttaaaaacctacagctgcttaggtccagcttcttaactctttttgagacacttcctgtcctatctccactgtgcctgcctaaatttgttctcaccaagcactgcctgtgcatgcagagaaaatctgtgcatcctcttttatatttttaaaatactgtttaacatttgtgagaattttatgaaaatgcttttgtatgagctgtggctttttcccattgtgaagcattgaatatcacattttggaacatgttatagggtgagtccctggatctttgctcaccagatccaagcactgcttctcggtgtcattgcagtgtgctgcttgtcacccagaatactactatcatgtgaattctttttgtcgtcagtgtcttttccttagtctttttgttgttgttgttgttgttgttttaatcattccttttttaagaagaagtaattttccatttatgaagcagtatgaattagatgtattttcaaaacaggtccctaagacaattcttcagatcatttttaaaatgactaagtcattttagtatgtcaagcaagataaaaattacatcataccgtctattttgcccatagtgccatttagagatgaaaaccagctttaactttgcaaagtgaacatgtacatggtctgctctcatttattcattcttctctcaaaagtcaaatgaatgcagagggagcttggtcaaactgcttttgtttcaactgcaggcaggggagcaaaaggacgccatgtgagcattaggaaaaaaaatactcactcttactaacaatttttatacagaaaatgagtcattttggaaatgattcttatgttttttttttttctccttttagaaaattctccaaaaggttttgatgttgaatcttggtcttggacctgttttttcctttgagggttttttgttttttgttttttctaggatttcattgtgatgttttggttttgttttttgctttttgtttaagttgtgctgacaccaaacacatccagtttataatcagtacattggaaagctggtattgatgtagaaccagtgcataactttttatggggttttgttattggtttttttttgtaaagtgtgaataaaaggtatgtttactcatttttcctgaacactgtgttggtaatgtgcatcatgacaatttccagtgaaggtgagctggagctggttggactaatgagactgaggaagcagcttttcctacgatctgcattatgtaatcacaggtccagagagctttatggaagcgggagaggaggagcacttactcatgttgtatttgttaatggaggatgtcatcttttcatagatgctggaactagagtgcacttgttagatgctaaaggtttgagctttacacaaaatgtcttcatctgtatttgttattgtctacaatatatttgaatttggggcagcatattaagatgtaatggcctgttatgtcttgaaaatacttgttttgcctcttccaggcatactgcattctgtggatcagtttgaacagcttctccaccttatttggacagtgataaattgaaccaagagtgtagatttacaagtgtaaccttcaaaagaggaagaactatttggggtctgtaggtaatgaacagtcacaccaaaatagactatgatgcttttgttaagaaaggtttcatgttttagatattttccgtgtcctaaataattttcaataatctataatccctaaaatgcaataaaaactagtatgttttcacggtgtatattttttttcaaaaattctgtaacaaatatatttaatgtgttgccataatgtcatttcagtatttttgctggataaatccattttagaaatgtcttacaaaaagtttagggcatgttttctgttttaaagaccagaagtttgaaggcacccaaatccttgtcgccaatctcctgaagtacagctttaccatattagtggtcattatttatgctttgagagtttcaatattgttcgtcaagttaacttatggcataatttaagctaaagttgtagaaatgaattgttgagtgcaactttcatagtcccaaagataggcagagaacatctccagaaatgtgtgtgtgtgtgtgtgtgtgtgtgtgtgtgtgtgtgtttaatatgatttagtgacaaccaggaaaacttacttgggattattagcactttcaaacttagggacattattaaattggatggaatgcacttctaaatgtttaaattaaaatttcaaagctctttcgagattcaggttctcaataataatattcaagttttagagtttcactttgtactatttaaatttatggaactagtttccatactgacttgtaaggttttggggtcatatataaggactaaagccaagctaggcaaaacaatgacagcaccgttttttcagtgaagctctcagaatgtccagtacagatgttgcagataattccaagaactccttcagcaggtgttcttcaccattcgtaaacagtattttaagatgttcactttgctcttctttttggttacatacattttaataactggtatgttgaagtagtgtctaaaagtatctagtctttattcacagtacattatattgtgtgatgcactggactaactcttgtttaccattcatgtaacaaaacccagcacattatctgcactataagctcaaagaatgtcacatccgcccagacagctctttgatgagggtgatgggaactgaataaaccatacggactggcagtaacaagggcttttactgttctgttcagtggaaccttcttggtcaaattgtaattagctagcattatatttatatacagggtcttttttctttaccgatgtattttcctactcatagccaaccaataaattcagtatctgtttcaaatattttagaagtgtagtttgtatagctgtagtactgaggtttgaggaaaaataaatgttgatcagcagaccacgtattttgcagggtgactgtgacatgctatgcggaaatggtgtcttggcatgctttattggactgctgctgt

SEQ ID NO: 34378 - DNA, 5846 bp, Homo sapiens
ggcgcggaggaggaggcggcggcgtcggtggcggcggcgacggcggcgcggaggcgaaggcagcggcgggcagccgaagcagtggctctcggagggggaacaaagagcagcgactaaggcggcagaggagcggcggcggtggcggcgctgcagcagcgggcgggactggtatggtggttccacagggcagaccccgctgcactcacagggaggaggaggcggcagcggcggaggaaggcggcgcaccccgagaggcatgcccaaagaaaaatacgagccccctgaccctcggaggatgtatacaattatgtcttctgaggaagcagcaaatggaaagaaatcccactgggcagagcttgaaataagtggaaaagtaagaagcttaagcgcatctttgtggtcactaactcacctgacagctttgcatttgagtgacaattccctgtcccgaattccttcagacattgccaagcttcacaatctggtgtatttggacctgtcatctaataaaattcgtagcttacccgcagaactcggaaacatggtatcactcaggaaatccccttacccaggatatattgaacctttatcaggaaccagatggaacaagacggctgctgaactatttgcttgataatttgtcaggtactgcaaaaagaagtaagtggttatttgtttaaacctttttattaggaagacgtgtaagaatattgcttaattctgtattttctattcaactagttacaacagaacaaccacctccaaggtcttggattatgttacaagaaccagataggacaaggccaactgccttgttttctgtcatgtgctataatgttctttgtgataaatatgcgacccggcagttatacggctactgtccatcatgggcgctaaactgggactacaggaaaaaggccattattcaagaaatcttgagctgcaatgctgatatcgtaagtcttcaggaggttgaaacggaacagtattacagtttttttctggtagagctgaaagaacgtggctataatggattcttcagtcctaagtctagagctaggacaatgtcagaacaagaaaggaaacatgttgatggctgtgcaatattcttcaagacagaaaaatttactttggttcagaaacacactgttgaatttaatcagctagccatggcaaattctgaggggtctgaagctatgctgaacagagtcatgacaaaagataacattggggttgcagtactgctagaacttcggaaggaatcgattgaaatgccgtctggaaagccacatcttggaacagaaaaacaacttattcttgtggctaacgcccacatgcattgggaccctgaatactctgatgtgaagttggtacaaactatgatgttcctctcagaagtgaagaacattattgataaagcctctcgcaacctcaaatccagtgttttgggagaatttggaactattccacttgtgttatgtgcagatcttaattctttgccagactctggtgttgtagaatatttgagcacaggtggagtagaaacaaatcacaaagactttaaggagttgaggtataatgaaagtctcacaaacttcagctgtcatgggaagaatggaaccaccaatggaaggatcactcatggtttcaagttacagagtgcctatgagagtggcctgatgccttacacgaattacacatttgatttcaagggtataatagactacattttctattctaaacctcagctgaacaccttaggcatcctgggccctctggaccaccactggctggttgagaataacatcagtggctgcccgcaccccctcatcccctctgaccacttctcactttttgcacaactggagctcttactgcctttcctgccccaagtcaacggcatccaccttcctggcaggaggtagtcaagcaccttcagaggacagccttgattcacttgtaaacttgtgaaaatctgaacataggggagtgaggtatggccactgaggatttttgcttgcttaagaatgatttggactttcaatctgattatttgataaggatatagtatgaaagccaggtgctagcaacagacaaattctgagcccaatatgctttatactgctagacagggattggtgtgtttgcacctgtctttcatttgtcataagagattttcctatttcttctacccaatagaatattttcatgcctggaaataggaaaatgtgtgaacagcgtattctcttcacacagaaatctgtagcactgcttttttgaggccagtagcaacatccagagatcattcttccatactttactccctcctttttcagacttgtttgtaaagtacagaatctgaatttagcctttatgattgtatatgatccacagaagacctgatttatgaaattttgtactaaaatcatttggaaatgattgtattgtaaactgaggctaaatttttttttaaacctgtttcatgtgttataaaggccagcttgtaaaagaagctgcaacagactttctctgctcatgatttgcactcttagggttttgttagcccttttgtactactttctttttaaattgagaacatggttctttacatataaatctgcttcaaccttaggatgttttcagaccagaggcaacttattcatgaatttttatgaaaactatctactaggacagataagctgaacagtgatgatctgtagacatttatggactgaatgtaatggttgatatatgtacattctgatatttttaaatctttaactttttaaagttaaaaacctacagctgcttaggtccagcttcttaactctttttgagacacttcctgtcctatctccactgtgcctgcctaaatttgttctcaccaagcactgcctgtgcatgcagagaaaatctgtgcatcctcttttatatttttaaaatactgtttaacatttgtgagaattttatgaaaatgcttttgtatgagctgtggctttttcccattgtgaagcattgaatatcacattttggaacatgttatagggtgagtccctggatctttgctcaccagatccaagcactgcttctcggtgtcattgcagtgtgctgcttgtcacccagaatactactatcatgtgaattctttttgtcgtcagtgtcttttccttagtctttttgttgttgttgttgttgttgttttaatcattccttttttaagaagaagtaattttccatttatgaagcagtatgaattagatgtattttcaaaacaggtccctaagacaattcttcagatcatttttaaaatgactaagtcattttagtatgtcaagcaagataaaaattacatcataccgtctattttgcccatagtgccatttagagatgaaaaccagctttaactttgcaaagtgaacatgtacatggtctgctctcatttattcattcttctctcaaaagtcaaatgaatgcagagggagcttggtcaaactgcttttgtttcaactgcaggcaggggagcaaaaggacgccatgtgagcattaggaaaaaaaatactcactcttactaacaatttttatacagaaaatgagtcattttggaaatgattcttatgttttttttttttctccttttagaaaattctccaaaaggttttgatgttgaatcttggtcttggacctgttttttcctttgagggttttttgttttttgttttttctaggatttcattgtgatgttttggttttgttttttgctttttgtttaagttgtgctgacaccaaacacatccagtttataatcagtacattggaaagctggtattgatgtagaaccagtgcataactttttatggggttttgttattggtttttttttgtaaagtgtgaataaaaggtatgtttactcatttttcctgaacactgtgttggtaatgtgcatcatgacaatttccagtgaaggtgagctggagctggttggactaatgagactgaggaagcagcttttcctacgatctgcattatgtaatcacaggtccagagagctttatggaagcgggagaggaggagcacttactcatgttgtatttgttaatggaggatgtcatcttttcatagatgctggaactagagtgcacttgttagatgctaaaggtttgagctttacacaaaatgtcttcatctgtatttgttattgtctacaatatatttgaatttggggcagcatattaagatgtaatggcctgttatgtcttgaaaatacttgttttgcctcttccaggcatactgcattctgtggatcagtttgaacagcttctccaccttatttggacagtgataaattgaaccaagagtgtagatttacaagtgtaaccttcaaaagaggaagaactatttggggtctgtaggtaatgaacagtcacaccaaaatagactatgatgcttttgttaagaaaggtttcatgttttagatattttccgtgtcctaaataattttcaataatctataatccctaaaatgcaataaaaactagtatgttttcacggtgtatattttttttcaaaaattctgtaacaaatatatttaatgtgttgccataatgtcatttcagtatttttgctggataaatccattttagaaatgtcttacaaaaagtttagggcatgttttctgttttaaagaccagaagtttgaaggcacccaaatccttgtcgccaatctcctgaagtacagctttaccatattagtggtcattatttatgctttgagagtttcaatattgttcgtcaagttaacttatggcataatttaagctaaagttgtagaaatgaattgttgagtgcaactttcatagtcccaaagataggcagagaacatctccagaaatgtgtgtgtgtgtgtgtgtgtgtgtgtgtgtgtgtgtgtttaatatgatttagtgacaaccaggaaaacttacttgggattattagcactttcaaacttagggacattattaaattggatggaatgcacttctaaatgtttaaattaaaatttcaaagctctttcgagattcaggttctcaataataatattcaagttttagagtttcactttgtactatttaaatttatggaactagtttccatactgacttgtaaggttttggggtcatatataaggactaaagccaagctaggcaaaacaatgacagcaccgttttttcagtgaagctctcagaatgtccagtacagatgttgcagataattccaagaactccttcagcaggtgttcttcaccattcgtaaacagtattttaagatgttcactttgctcttctttttggttacatacattttaataactggtatgttgaagtagtgtctaaaagtatctagtctttattcacagtacattatattgtgtgatgcactggactaactcttgtttaccattcatgtaacaaaacccagcacattatctgcactataagctcaaagaatgtcacatccgcccagacagctctttgatgagggtgatgggaactgaataaaccatacggactggcagtaacaagggcttttactgttctgttcagtggaaccttcttggtcaaattgtaattagctagcattatatttatatacagggtcttttttctttaccgatgtattttcctactcatagccaaccaataaattcagtatctgtttcaaatattttagaagtgtagtttgtatagctgtagtactgaggtttgaggaaaaataaatgttgatcagcagaccacgtattttgcagggtgactgtgacatgctatgcggaaatggtgtcttggcatgctttattggactgctgctgt

SEQ ID NO: 34379 - DNA, 4578 bp, Homo sapiens
ggcgcggaggaggaggcggcggcgtcggtggcggcggcgacggcggcgcggaggcgaaggcagcggcgggcagccgaagcagtggctctcggagggggaacaaagagcagcgactaaggcggcagaggagcggcggcggtggcggcgctgcagcagcgggcgggactggtatggtggttccacagggcagaccccgctgcactcacagggaggaggaggcggcagcggcggaggaaggcggcgcaccccgagaggcatgcccaaagaaaaatacgagccccctgaccctcggaggatgtatacaattatgtcttctgaggaagcagcaaatggaaagaaatcccactgggcagagcttgaaataagtggaaaagtaagaagcttaagcgcatctttgtggtcactaactcacctgacagctttgcatttgagtgacaattccctgtcccgaattccttcagacattgccaagcttcacaatctggtgtatttggacctgtcatctaataaaattcgtagcttacccgcagaactcggaaacatggtatcactcagggagctccatttaaataacaacctgttacgagttctaccttttgagctgggaaaactgtttcagttgcagactttaggcctgaaaggaaatccccttacccaggatatattgaacctttatcaggaaccagatggaacaagacggctgctgaactatttgcttgataatttgtcaggtactgcaaaaagaattacaacagaacaaccacctccaaggtcttggattatgttacaagaaccagataggacaaggccaactgccttgttttctgtcatgtgctataatgttctttgtgataaatatgcgacccggcagttatacggctactgtccatcatgggcgctaaactgggactacaggaaaaaggccattattcaagaaatcttgagctgcaatgctgatatcgtaagtcttcaggaggttgaaacggaacagtattacagtttttttctggtagagctgaaagaacgtggctataatggattcttcagtcctaagtctagagctaggacaatgtcagaacaagaaaggaaacatgttgatggctgtgcaatattcttcaagacagaaaaatttactttggttcagaaacacactgttgaatttaatcagctagccatggcaaattctgaggggtctgaagctatgctgaacagagtcatgacaaaagataacattggggttgcagtactgctagaacttcggaaggaatcgattgaaatgccgtctggaaagccacatcttggaacagaaaaacaacttattcttgtggctaacgcccacatgcattgggaccctgaatactctgatgtgaagttggtacaaactatgatgttcctctcagaagtgaagaacattattgataaagcctctcgcaacctcaaatccagtgttttgggagaatttggaactattccacttgtgttatgtgcagatcttaattctttgccagactctggtgttgtagaatatttgagcacaggtggagtagaaacaaatcacaaagactttaaggagttgaggtataatgaaagtctcacaaacttcagctgtcatgggaagaatggaaccaccaatggaaggatcactcatggtttcaagttacagagtgcctatgagagtggcctgatgccttacacgaattacacatttgatttcaagggtataatagactacattttctattctaaacctcagctgaacaccttaggcatcctgggccctctggaccaccactggctggttgagaataacatcagtggctgcccgcaccccctcatcccctctgaccacttctcactttttgcacaactggagctcttactgcctttcctgccccaagtcaacggcatccaccttcctggcaggaggtagtcaagcaccttcagaggacagccttgattcacttgtaaacttgtgaaaatctgaacataggggagtgaggtatggccactgaggatttttgcttgcttaagaatgatttggactttcaatctgattatttgataaggatatagtatgaaagccaggtgctagcaacagacaaattctgagcccaatatgctttatactgctagacagggattggtgtgtttgcacctgtctttcatttgtcataagagattttcctatttcttctacccaatagaatattttcatgcctggaaataggaaaatgtgtgaacagcgtattctcttcacacagaaatctgtagcactgcttttttgaggccagtagcaacatccagagatcattcttccatactttactccctcctttttcagacttgtttgtaaagtacagaatctgaatttagcctttatgattgtatatgatccacagaagacctgatttatgaaattttgtactaaaatcatttggaaatgattgtattgtaaactgaggctaaatttttttttaaacctgtttcatgtgttataaaggccagcttgtaaaagaagctgcaacagactttctctgctcatgatttgcactcttagggttttgttagcccttttgtactactttctttttaaattgagaacatggttctttacatataaatctgcttcaaccttaggatgttttcagaccagaggcaacttattcatgaatttttatgaaaactatctactaggacagataagctgaacagtgatgatctgtagacatttatggactgaatgtaatggttgatatatgtacattctgatatttttaaatctttaactttttaaagttaaaaacctacagctgcttaggtccagcttcttaactctttttgagacacttcctgtcctatctccactgtgcctgcctaaatttgttctcaccaagcactgcctgtgcatgcagagaaaatctgtgcatcctcttttatatttttaaaatactgtttaacatttgtgagaattttatgaaaatgcttttgtatgagctgtggctttttcccattgtgaagcattgaatatcacattttggaacatgttatagggtgagtccctggatctttgctcaccagatccaagcactgcttctcggtgtcattgcagtgtgctgcttgtcacccagaatactactatcatgtgaattctttttgtcgtcagtgtcttttccttagtctttttgttgttgttgttgttgttgttttaatcattccttttttaagaagaagtaattttccatttatgaagcagtatgaattagatgtattttcaaaacaggtccctaagacaattcttcagatcatttttaaaatgactaagtcattttagtatgtcaagcaagataaaaattacatcataccgtctattttgcccatagtgccatttagagatgaaaaccagctttaactttgcaaagtgaacatgtacatggtctgctctcatttattcattcttctctcaaaagtcaaatgaatgcagagggagcttggtcaaactgcttttgtttcaactgcaggcaggggagcaaaaggacgccatgtgagcattaggaaaaaaaatactcactcttactaacaatttttatacagaaaatgagtcattttggaaatgattcttatgttttttttttttctccttttagaaaattctccaaaaggttttgatgttgaatcttggtcttggacctgttttttcctttgagggttttttgttttttgttttttctaggatttcattgtgatgttttggttttgttttttgctttttgtttaagttgtgctgacaccaaacacatccagtttataatcagtacattggaaagctggtattgatgtagaaccagtgcataactttttatggggttttgttattggtttttttttgtaaagtgtgaataaaaggtatgtttactcatttttcctgaacactgtgttggtaatgtgcatcatgacaatttccagtgaaggtgagctggagctggttggactaatgagactgaggaagcagcttttcctacgatctgcattatgtaatcacaggtccagagagctttatggaagcgggagaggaggagcacttactcatgttgtatttgttaatggaggatgtcatcttttcatagatgctggaactagagtgcacttgttagatgctaaaggtttgagctttacacaaaatgtcttcatctgtatttgttattgtctacaatatatttgaatttggggcagcatattaagatgtaatggcctgttatgtcttgaaaatacttgttttgcctcttccaggcatactgcattctgtggatcagtttgaacagcttctccaccttatttggacagtgataaattgaaccaagagtgtagatttacaagtgtaaccttcaaaagaggaagaactatttggggtctgtaggtaatgaacagtcacaccaaaatagactatgatgcttttgttaagaaaggtttcatgttttagatattttccgtgtcctaaataattttcaataatctataatccctaaaatgcaataaaaactagtatgttttcaaaaaaaaaaagtcgacgcggccgcgaat

SEQ ID NO: 34380 - DNA, 2201 bp, Homo sapiens
ggcgcggaggaggaggcggcggcgtcggtggcggcggcgacggcggcgcggaggcgaaggcagcggcgggcagccgaagcagtggctctcggagggggaacaaagagcagcgactaaggcggcagaggagcggcggcggtggcggcgctgcagcagcgggcgggactggtatggtggttccacagggcagaccccgctgcactcacagggaggaggaggcggcagcggcggaggaaggcggcgcaccccgagaggcatgcccaaagaaaaatacgagccccctgaccctcggaggatgtatacaattatgtcttctgaggaagcagcaaatggaaagaaatcccactgggcagagcttgaaataagtggaaaagtaagaagcttaagcgcatctttgtggtcactaactcacctgacagctttgcatttgagtgacaattccctgtcccgaattccttcagacattgccaagcttcacaatctggtgtatttggacctgtcatctaataaaattcgtagcttacccgcagaactcggaaacatggtatcactcagggagctccatttaaataacaacctgttacgagttctaccttttgagctgggaaaactgtttcagttgcagactttaggcctgaaaggaaatccccttacccaggatatattgaacctttatcaggaaccagatggaacaagacggctgctgaactatttgcttgataatttgtcaggtactgcaaaaagaattacaacagaacaaccacctccaaggtcttggattatgttacaagaaccagataggacaaggccaactgccttgttttctgtcatgtgctataatgttctttgtgataaatatgcgacccggcagttatacggctactgtccatcatgggcgctaaactgggactacaggaaaaaggccattattcaagaaatcttgagctgcaatgctgatatcgtaagtcttcaggaggttgaaacggaacagtattacagtttttttctggtagagctgaaagaacgtggctataatggattcttcagtcctaagtctagagctaggacaatgtcagaacaagaaaggaaacatgttgatggctgtgcaatattcttcaagacagaaaaatttactttggttcagaaacacactgttgaatttaatcagctagccatggcaaattctgaggggtctgaagctatgctgaacagagtcatgacaaaagataacattggggttgcagtactgctagaacttcggaaggaatcgattgaaatgccgtctggaaagccacatcttggaacagaaaaacaacttattcttgtggctaacgcccacatgcattgggaccctgaatactctgatgtgaagttggtacaaactatgatgttcctctcagaagtgaagaacattattgataaagcctctcgcaacctcaaatccagtgttttgggagaatttggaactattccacttgtgttatgtgcagatcttaattctttgccagactctggtgttgtagaatatttgagcacaggtggagtagaaacaaatcacaaagactttaaggagttgaggtataatgaaagtctcacaaacttcagctgtcatgggaagaatggaaccaccaatggaaggatcactcatggtttcaagttacagagtgcctatgagagtggcctgatgccttacacgaattacacatttgatttcaagggtataatagactacattttctattctaaacctcagctgaacaccttaggcatcctgggccctctggaccaccactggctggttgagaataacatcagtggctgcccgcaccccctcatcccctctgaccacttctcactttttgcacaactggagctcttactgcctttcctgccccaagtcaacggcatccaccttcctggcaggaggcatactgcattctgtggatcagtttgaacagcttctccaccttatttggacagtgataaattgaaccaagagtgtagatttacaagtgtaaccttcaaaagaggaagaactatttggggtctgtaggtaatgaacagtcacaccaaaatagactatgatgcttttgttaagaaaggtttcatgttttagatattttccgtgtcctaaataattttcaataatctataatccctaaaatgcaaaaagtgtgcgggatcctgtagagtgaccaaca

SEQ ID NO: 34381 - DNA, 289 bp, Homo sapiens
tttttttttttgaaaattgcacgtgcttggtcttcttgtatcacacatttttatttattgctatgtaacaaactaccattaatttagcagcacaaaattacacacatttattattttacaatttctgtgaggaatctgggcatgccttattttgggtctcccaaagtgtcatcaaagtttttatctgagtttgaggtcttcttccaaactcattgtggttgttggcagaatctggctctgtgaagttgtagcactgagaccctcatttcctaggtaacacctacagtgc

SEQ ID NO: 34382 - DNA, 1970 bp, Homo sapiens
ggcatgaggggagatttgggtgcttttctttccgtggcgcctcttcattttgtaaactgctgcttaatggaacaagagcccagcattgtcccggcctatcccccaggtgcagtcacacagtaggtacagtcctggacttcattctcagcaggaggggcaacaagaactcctcaggaggtaaccacgatgtcgctccctggctaggtgctgggaagcccaattaggatagttgtgagtgctctctggggtctgaaagtgttctgtttctcccttgggattagaagagtgcttgcaaggcgtctttttgggtgatggccattgctgagctgtgctgtgctgtgccggtgactgacaggttcctctcctctaacccagccaggccctcatggacgagagtgcactcaggtgtactgcacccccttccatcctcactgcagccctgagctgggtggggcagcatgtgggagtgagccaggaagatggggcacaggggcttcccggggactgcagggcaggcggcagcagggagggcatcgggaggaggtgagctcctgtggacttccatcagctcctcctcgaacccgcatctgcaccgtgcgtgccttggccaggccaggacttgggagcgcctggctcttccttctgagcctggcagggtgctgctgtaggagatggcctccccctggatctggctccttccccacctgaagcttcactcccagggcagagcccatgtctgtaggctccgcctgcatgaagaacagagggcagagtgagcacagacagcctggggtcagaggggaagtgtccggcaactgtgaactttgtcactgacatcatcccaaagagaaagggctgaatagtcccatctccacttttggagtctttttcaaagcgtgggtaacctccaggtgcctcctaggatgtgtggtatgtggctgtgtggcaaacgcggcctgggaacaagtgttactctgtgaggagcagttcagtgggagaaggccatttccctgcaggagtcatacagaaagctacgctgaaagtcaaatgagggagctggccttggtccacatactcagcgagcatgcaggagaggtgttcgcaggcgcactgagtggctggctttggtgttagagtgagtgacatcgcgatctgactgaggtgctccctcactcctgccacaggaaaatccatgaataacgttgagaagcccctggagtttcgagaggctactagaagccatggtccttggaacaacgtggccactgtgagccgaaggaaaccgggtgactcggggtaccggctacagagggctctcccctcttcaggaattcccaggcagggctgttgagcctcgggatgcagtgtccttgagtctcgaggtgtcgaggagaggctggaggaggacgtgggttctgcgttcctggttggtgcgctgtcacccctcttcacggaatccacccagactggtcctcagccttgtggtagcacaaatgaatgcagtaaaaatgcttgttggcctcaactgtgacttgtaccagcgttcacagaatactgcactgaacctcaaatcttgttattataaaattctaagaatgtcagaaatcagaagagttttagaaatcaagtgtttattccactaaaggacctttttttgatttaaaaaagttctcagccgggtgcagtggctcacacctatcatcctagcacttggggaggtggaggcaggaagattgcttagtctaggagttcaagaccagcctgggcaatgtagtgagacccccatgtctacaatcaatcagtcaacacaaaaatacataaataaataaggttctcatattggctgggcacggtggctcacacctgtaaccccagcactttgagaggttgaggcagaggggttgcttgaggttaggagtttgagatcatcctgggcaatgtagtgagaccccatctctacaaaaaaaaaa

SEQ ID NO: 34383 - DNA, 354 bp, Homo sapiens
tgggagacaaggtcttgctatgttgcccaggctggccttaaactcctgggctcaagcagtgatcctcttgcctcagtctcccaagtaactgggattacagaatcacatcactacacctggctaaaacttttattcttcttaaataattagactcataggaagttgcaaaaatagtatgtatatgtactacaggttgaatatccctaatctgaaaatccagaatgctccaaaatctgaaactttctgagcactgatatgacacccaaagtaaatgctcactggaacattttggaattcaaatttttgaatcagggatgctcaaccagtatgtattctggaaatattccaaaattt

SEQ ID NO: 34384 - DNA, 468 bp, Homo sapiens
ggcacgagctgggcgtgtgcttggtatcgttccctcagaacactcagtggtcctggtttcagtaagggtttgggatcacatacaacttggatttgaatgttaattttgcccattaaaaattgagccgcctttgacaaattactccatccatctcacacctgaacctcagtttttcttctgttaattggggcccagctgggctgttgtgaggacctgatgttaaaaatgtaaaaagtggtcaccctggtacttgggcatataatggaccctaaacaaacagtctccatgattgtggttttgagcaggttattttatctcttcaggtttccatctgcttacttttgtttttttcgagacacggtcttgctgtgtcgcccaagctggaagtccagtggtattgatgatggctcactgcagcctcgacctcccaggctcaagggatccttctgcctcagcctcccgagcagc

SEQ ID NO: 34385 - DNA, 432 bp, Homo sapiens
ttgtcttttgccacttcatggtctttttggttataatctttttggtatataaactcatttggcctgtttgatgagcccattttacatctctggttgttgagataccaatttctcagtagttattcatgaagcaccaacgtcttggttattttcacgagacccatttgtgcctgtatagaaattatctgaatcttgctaatacggacatatctttggcttgataagtggtggagctgttttcttttccattctacaatgttgttagtcttttaatacaaaaagaccataaagagaatcttaagaaatgcccccaaagtaggatttgttttctgaccacacattttctgatgacgctgcaatagaaactaaaagttaatttcaaaagattaaacagaaaacttcacttcttggtggttaaaagttaaacactta

SEQ ID NO: 34386 - DNA, 776 bp, Homo sapiens
attcctcaatttccaggatacaattttgatgcctcactttctttatctgagaagtggggatagatatatacctcctttctaaggtaaacgtgagactttagtgaagaagcatgtatgtaatactatccagagtgtctataaataaatgcttaataaatagtagcaaatattattttagataatgtttgacgaagcaaaatgatttagatagcaaatagttgaatgtaaaggtaattaactttatctggtttaactgttcttcaagtggatttgattaatgacctatgcttgccatttattgctttgtaatccttgctgtagtaaccttccacttttattgataatgtttattagcaacagagtgagcctccatctcaacaaataaataaataaataaataaataaataaatatataaataggagtcaatagagctgcaacatagaggcatgtgatgagcttgaagcaaggtaggcggggtctggttatagaaggaccagtagacatacaagaatttgggactgcattatcatgacattttggctttatttccaaagaccctgtgtcttaggagatcgcaaactttagagtatccattttattttgaaactggtaattggcacacttcttaatgccatgattcaaatatctctcattgcacaaagactcattttaaaaatattcagaagtggtgtgttaacttggtgaatttctgtttttttttttttttttttttgattagctgtattatctctgaagaaattgcaacctgaaaaa

SEQ ID NO: 34387 - DNA, 494 bp, Homo sapiens
gctgcctaacaaattatcccaaagtttagctgcttaaaacaataaatgtgttatctcttactgtttctgagggtcattaatctgatagcagcttagctgggtagttctagcatagggctctcacaaggttgtagtcaagatgtcatttggagctgcagttatctttcagggctcacctgggactgtgggaaatccactttcaaactcactcacatagttgttggcagtacagccctggctggtgtgttagagactttagttccttacaacgtgggcctctccataagcttctgtaacatgtcaacctacttcttgcaggacgaatgatctgaaaggcatagggaatgaatgaataaatgaatacccaagacagaagttgtcttttttataacctaatcttggaagtgatttgctattacttgagctgttagttactggtcatgcaggctgacctagtacactgtgggagaggactgcacaaggaggcatgaata

SEQ ID NO: 34388 - DNA, 420 bp, Homo sapiens
cgagttaggcacaggggatacaaccaggttacttgaagccaacacaagaagaatagaatcagtggatctctctctctctctctctctctctcacacacacacacacacacacacaaacacacacacagaggaaaagaaaagaaccaatagaaaatttgactcaaataatccttttagccatatctaagtaatattaaagtaagatatgcattactggttttacctccaagttaggaaaactctttaaagatggactatcaaagtctttttcttatgatttggtaggatggtgtgtgattttaaggaatccaaagtctagcagtagatatttagtattaaggtaatgtcccacttactagaatgtcagtgtttttccaagtttccacattctcatcacatagattgaattaggtttaaaaa

SEQ ID NO: 34389 - DNA, 570 bp, Homo sapiens
aaaaccatgtataaattactcagggactctgggtcttaatttctcatttgtgaaatgagagagagatctcaattgaattgagtactatttatttttaaagtctatgattctttgaaattacaaaaaatctattaaactagagaattactttgtaattcacaaaaccctttcaaaatacttaattccaaagttatccatagaacaacaccagggtgattactgcacagtattgtaaatggaataagtatggagattgggctgaaaaatcattcaacaaatactttagttgtctcttccttgttctcatcatagagtacagcatgtgcacactcataacctggactgtatagcatagctactgttgtggaaactgaattttaacaccaaagatagaagtctttgagtgatttggccaccttttcagtcttaaaataaaatggcttaatagcattgctgggcactgtggcacgagcctgtagttttggctgctggggagggtgagactggaggatcttctgagcccaggagttcaagttcctctgggcacatagtgagatgctgtctctaaga

SEQ ID NO: 34390 - DNA, 586 bp, Homo sapiens
taaattttatctttttccttaaaagaaatctgtatttctatcaggacattctggatgtccccagttttactggtagtctttcattgtgtgtatattaagttctttgtttttatcacctgtataggttagtatatccatgactcccgtcaactttctaaatgttcgctgggtgcagtggctcatgcctgtaatcccagcactttgggaggctgaggcggctggatcacctgaggtcagtagttcgagaccagtctggccaacatggtgaaaccccgtgtctactaaaaataaaaaaaaaattagctggatatggtgggtcatgcctgtaatcctagctactcgggaggctgaggttggagaatcgcttgaacccaggaggcggaagttgcagtgagctgagatcgcgccgctgcactctagcctgggtgacagagtatgtctctgtctcaaaaaaaaaaaaaaagttgctaaacatttctaataccataaggatccctgctgttgccagccgttttaaaactacatccatcgtcttcttggcaaccttccatctctttttcgtatgtgacagcgtcttgctctgccg

SEQ ID NO: 34391 - DNA, 271 bp, Homo sapiens
aaataggaggtagccaatttccctttgtcattagcaggttgctaaataataagtatctacacagctctttcttcatgctctgtatttaaagtatcaagtaaaataaagtcaatttagttttttaacttggcaaagcactgataaataagactatagacatcttttatagaaatgagagataaatatttacggttgaaagaatgtttatgacatttgtgggtcgattaatgtgaatttaaaaaataactataaactatcagaataaaatttc

SEQ ID NO: 34392 - DNA, 393 bp, Homo sapiens
acgtgttatatgtttctgttgataaatatgtattacctcaataaatgtgttctgcttatgtttctctaatgatttttttataaaatataatgaaatatgtatataaataaaacaccattataataataactttggtttcagagtaccacatgtgtaactaatgtaaacatagtttgttctgtaccatagaggattttataatattttgtaaaaaataaagctgtgtaaattcagaaagatactttttctatatttacatttctcttcaattttcattaagtttctcttttttcccaatttgataactcagaaataacatgtctttgacttttaaaagttctcttttataatcaaaatatggtaattctttggcagcatgtaaccaaaaaaaaa

SEQ ID NO: 34393 - DNA, 1577 bp, Homo sapiens
gctggaatttgctttgtactagtgatttgaaaaataattttctggataacgaatttccatactaaagcatcagtcaccaccaattccttattaagttaattctccttagtaactttggtgttaaagtggtaactatctgaacccaaaataaatttgtgaagagtaatttattcattctaaaaagaaattttcttacattgctagaaaagaatagtatctactaatcttattcccatactttatgaagggtgattatttagagagttttaaaagaaattaacagaacatttaaaagtgtgttctttgttgtttgtttttaaataggcaaatgaatctaacctgacatcttttttccccttgctagaaatattgagctgaatgaattacattccgaaaatgtaatgaatagtacacattttgaatgaaaactcaaagttttctagtttttaatatcttgtctggagagtgtatccactacttgaaaaatactgcagttgaattattgatattttcacctttactcttcaaagtaaagctgaaatcagaaattggaatcatattcagcaaatgtaatttctggtgggtaattttcttttttctttttaaggctattcaccatgctcttctgaattttggttggctaaaatttgagaatacagaattcccacgtttcctgcctaccctgttcattcttggttatgtccagagtggcattatttgtctttttctgtttttcattttcttttataagagaggcccaggcagatctcaaactcctgggctcaagtaatccacctgcctcagcctcccaaagtgctgggattacagtcatgagccaccactcccggccttattcatctttttttaaatacattatttctgaaattatattctatggctgattactgttatctttacaactcatcttatttgggttttcagaaagtttcaaaagattaaagttttcccaactaacaaggtaagttgccatgaactaaacatgtccccctcaaaattcatatgttcaaatcctaatccccagtgtgatgatatcagaagatggggcctttggtatatgattaggtcaggaaagtggagccctcatgaatgggattagtgccgttagaaaagggatcccagagagcgctcacctgttttccatgtgaggatacaatgagaagtcagcagtctgcaacctggaagagagcctcaccagaacctaaccatactggcaccttgatctcggacttccagcctccagaactgtgagaaatttctgttgtttataagccactcagtctatggtacattgttatagtagcctatattgactaagatagagtagatttgttttgattcttccttccgtctgttctccaaactcttaaaataagttactcccttcatgccatatcccacatcacttgcttgtataccgtgtaaatattttatatatacctgcctggcatcagtttgtgctgattttgtaaattttgaatgtgtttgttttagattttaagcataacattatggcacatatcttaataactttttatggttacaatattctggttaaa

SEQ ID NO: 34394 - DNA, 1227 bp, Homo sapiens
aaaaataaaaaacaacaacaaaatttccattggtttccagatgaggaaacagattcttaaaaagacaaacatctctccaaggtcacggtcggtgagcaagaacttggagactctgattcccagtttctgaccccctggtcaatttctatcaaatggccgaaaggactacaggatagacttatacagatctagagggttgttagccaggtgtggtggttggcacctgtaatcccagctacttggggggcagagacaggagaattgcttgaacctgggaggcagaggttgcagtgagtcaagattgcaccatttcctgggcgacgagtgaaactctgtctcaaaagaaaaaaacaaaaacatatgttatataaatttgaaagagctaataaaaatcaaatggccacaatcttcttgggaagtagattggcttaccaaaacatcaatattcattaagaatttaagtgaggtgggattacagtcatgagccaccactcccggccttattcatctttttttaaatacattatttctgaaattatattctatggctgattactgttatctttacaactcatcttatttgggttttcagaaagtttcaaaagattaaagttttcccaactaacaaggtaagttgccatgaactaaacatgtccccctcaaaattcatatgttcaaatcctaatccccagtgtgatgatatcagaagatggggcctttggtatatgattaggtcaggaaagtggagccctcatgaatgggattagtgccgttagaaaagggatcccagagagcgctcacctgttttccatgtgaggatacaatgagaagtcagcagtctgcaacctggaagagagcctcaccagaacctaaccatactggcaccttgatctcggacttccagcctccagaactgtgagaaatttctgttgtttataagccactcagtctatggtacattgttatagtagcctatattgactaagatagagtagatttgttttgattcttccttccgtctgttctccaaactcttaaaataagttactcccttcatgccatatcccacatcacttgcttgtataccgtgtaaatattttatatatacctgcctggcatcagtttgtgctgattttgtaaattttgaatgtgtttgttttagattttaagcataacattatggcacatatcttaataactttttatggttacaatattctggttaaa

SEQ ID NO: 34395 - DNA, 367 bp, Homo sapiens
ggaagagggcccaaaaagagataacagacactgaaatcatcacatattcctttagaaaggcacagtgagcacgctcattttttttccattttagacaaataatgcatgataagtataaatgtgtcatgagcacactgttttctctgtagaaataacaaaggccctggatacagtagaatgtctggccttacttttctgtaaactgcggccactttgtcctttatctgtgtggttaatttctatgaactgctggacagctgatttgaccgaggcttcttggctctgcaccgggtgataattctacctgggcagcaggccacgcgtgagagcagcttccccgaacctctctcatcccctcagtttgggc

SEQ ID NO: 34396 - DNA, 532 bp, Homo sapiens
ttgtattattatctgcaacttttcagaagagccataccagaccctcatatgcccagcacaggatccactcatgcacacctgtctagggccttgtctttatgattttctgtcacctggcttctcagccatgcctccaaccaagctatcctcaaataaagactaaccatgcacaaaaagtgaaaaattacacaagacctactcaaggtctgaaatggaaagtgcagctggtgattctgagtagtatattttatgaattgatgagcagggaatttctaggtatcacagagcaatcagcagctgaggagagagcgacaaaaccaggactctgacagggctttttggaaacttaatttttggagcaatcagcagctgaggagagagctaccaaaccaggaccctgacagggctttttggaaacttaattttttattgtcaaattatacagacaaaaatgaaagtaaaggtagtgaggagtaccacacacctttacttagaaggataaataaaggacacctttgtagggagaaaaaaa

SEQ ID NO: 34397 - DNA, 1043 bp, Homo sapiens
ccaccgcacccagcctgaaggtgactcttaagaatgagatttatgaactccatacagttgtagatttcagtttttaaatagtctggggttttatttttcttttcaaaatatctaatagacttagcaatcaatttagaacaaatatttggcccttaatatatctttagtgagggaagtagcttttatttcctgcttgtttaggttttctgttggtacataaaaacaaaattgctgtctcagactgaatctacttgaatctaggaaggcacatctcatccctattgtggtttttagggacacttttctctttcccagagatgagaggaccaattcaggacagaagagccctcgtgaataccaacgtgctagctcaggttcccttctttcctccatcagagctattggtagggttttaaggtcgtgtgtgcatcatgcttccaatgtcaagagatttcctcaaacagcctgtttactagatgaattttccagctggtgaaatacatgagctttgttgttttcctggtcttccaatagcctgtcattattgttagatattatggcacctgttgttgaatgtaggttcccttacagccctggtctagatgatcctagatggggtgagacatatgcaagccattggtatgtgcataagcagttgcaatgaaccttaggctgacttggtagtaggcatttgtctttctgttcatgcattgaataaacatttttaagaaccatctatgtgccaggctttgtgctaggcactgacagtagagagatgaagacatagtccttgcacttaaggaattcatactccagatgtctggagttaagaaatacatatttcagccaggcatggtggctcacgcctggaatcccagcactttcagaagctgaggcagaattgcttgaggccaagagtttaggactagcctggtcagcatggccggaccccgtctctataaaaaaatgtaaaaattagtcaagtcttgtggctcgcacttgtagacacaattactcaggatgctgaggcaagaggattttgc

SEQ ID NO: 34398 - DNA, 422 bp, Homo sapiens
gagacaaggtcttgctctgtcacccaggctggagtgcagtggtgtgacttcggctcactgcaacctccacctccagggttcaagtggtttttgtacctcagcctctggagtagctgggtctacaggcgcataccaccatgcttggctaatttttgtattttttgtagagacagggtttcactgtgttgcccaggcgggtctcaaactcctggcctcaagtgatctgcccaacttggcctcccaaagtgctgagattaaaagtgtgagccaccacacccagccggttctctgtaacttaaatgaggagaaaattacctgggccttgagaaacaacttttatcctggacctcttttgtctagctgaaaaatctaaatttttctggctccccctgctggtcgctcctgggcagttgcgtacaagt

SEQ ID NO: 34399 - DNA, 736 bp, Homo sapiens
agtttttctcaaaatggcatgtgtgcatgaaattctacaggcatatggggtcgtgatctgctaatctccagttattatacaaaactacagatacttgaaaacagaaccaaataaaaattctagcagaagaagacaatatatgaaatttaataattcatttcctgggaatgacagcagaaaggtgatgacagaggaaagagccaataaaatttgaagacagactactttgaaaagggactttccagctatcagtacactatctcacaattacccttgaaccagaagacaatgaatgatttgctaaacagatggcatagtctatgacatgcatcatatgtgtgagcaatcacagaaggtatgacttttctcatgaaatattttcagacaaatattttaagttaatctaacattcactaaatctacctactgattttaggtagattttctttctccaaatatacatttttaaataaaaattttcattgtattgcattgtattttattggttatcaacagcaccatgttcttagtttttttaaaaaaaatgtttaatgagttgtaatatttgtgtctttaagcaaggggttccctcatttttcctgtcttttctggcttgatttgaagttattcctgggtatcaatattctacacacattgtctactgcttacctccaacacagcagttttcactgtcatgtaattatttgtttgctcatcgctcttccccatgaccatc

SEQ ID NO: 34400 - DNA, 440 bp, Homo sapiens
tgggcaacaagagtgaaactccatctcaaaaaataaatagacaaataaaataaaataaaagattttttttaaagttagcaacttgtaaaaatgtttcagtaggaaagttcctgtgatgagactgtgatgccttgatggtcaacatcagcttgttggcttttaccccagataagccttttgactttttaccccagataacagccattgactgtccacgattgtcatcatgcagctatatttgtcataagcatcatgtgcttggatacattatgtcataagcataaatgtcctagagtaaattgtacacgagttgcattatgtgctagatgtctatccaaaggaatactctggcaattcatttggcaaagtaataattttgtgtgcatgtgcaagtatataccaatttatgcaataaaaatttttgaagtatgaaaaaaaaa

SEQ ID NO: 34401 - DNA, 461 bp, Homo sapiens
atcaaaaggaagctcaggtgggtcacaaaaataacatgaatttcaaataagtagaaatagggaaatataagcttataattactagttatgcaaatacaatttagaaggatgattgatgttcaaacataatcagggcctcagcttccttatatgtaaaatgatatactcctatttaatatgtaagggtgtcaggaggactaaatcaaacacaatacaagaaatgcctacactgtatctgctcaataaatgtgagttaccttctcttcctttcccattgaaatcataattgatcatatttttaatataattcataatttttccaacactcaacacagtaaacaattagtaaactgaagtacagagaattagacagctatgaaaaagtaaaaaagaataccaggaatgtaagtcagaaactacaaattcctgtgtaacactctacatattaagccaggcatatg

SEQ ID NO: 34402 - DNA, 787 bp, Homo sapiens
gagtgggaacggggaatgactaagtgaatgtaagatttgcttttagggaaatgttctaaacttagattctggtgatgattgtataactctaaatacactaaattgttttgaattgtacacctaaaacagatgaagagtaactttcatagtatgtaaactatatctcagtaaagctgcttaaaaaaataaccagcatgtgcgagggggaaatgggggaagagcagagtcgggtgatgcagggtctcataggctcgtcatattaagaggtgtctttttcctcaaagcaatggaaaatcatgaaaagattttagtaagggataaatggtagtgatgatgtgatcacatttgcattctaaagaacagcatgaccaatgtgtgcaaaacaacctagaattagaggtagaatgagtagatatttttttctatgctcaccaggtccctaactcctgagttgtcatatgactcaaatgtcaatgagtgatttacccgtttacctgcatttgtttatccattaccccttcttcctgaaacaccacaaggaattctggaaacagggatgatgtcttatttaactttgtattctcagcacccaacacttggtctggaattcaacaggctttcaactaatgtttacacaatgaatgatgttgaaaggagcaaagaggccgggtgcagtggctcatgcctgtaatcccagcactttgggaggccgaggcagtcagatcacctgaggtcgggagttcgagaccagcctgaccaacatagagaaaccctgcctctactaaaa

SEQ ID NO: 34403 - DNA, 863 bp, Homo sapiens
gcgagtttattgggcttgttttctgttttctagggagtaggttagtggaaaagaaaaagggccgaattcactcccacgacctctacagccgcccctgaggggaagcggtcagcgtaagtcccggatccccgctccggagccgcctcgtgggagcggggcaaggagatccaggaggggtctcgaatctgccatggcgaaccggcgagtggggcgaggctgctgggaagtgagcccgaccgagcggaggccgcccgcggggctgcggggccccgcggccgaggaggaggcgtcttccccgccggtcctgtctctcagccacttctgcaggtctcctttcctttgcttcggggacgttctcctgggagcctcacggacgctgtctctggccctagacaaccctaacgaggaggtggcagaagtgaagatctcccacttcccggccgcggacctgggcttcagtgtgtcgcagcgctgtttcgtgttgcagcctaaagagaaaattgttatttctgttaactggacaccactcaaagaaggccgagtaagagagattatgacatttcttgtaaatgatgttctgaaacaccaagctatattactaggaaatgcagaagagcagaaaaagaaaaagaggagtctttgggataccattaaaaagaagaaaatttcagcctctacaagtcacaacagaagggtttcaaatattcagaatgttaataaaacatttagtgtttcccaaaaagttgacagagttaggagcccactacaagcttgtgaaaacttggctatgaatgaaggcggtcccccaacagaaaacaattctttaatacttgaagaaaataaaatacccatatcacctatta

SEQ ID NO: 34404 - DNA, 318 bp, Homo sapiens
gcctttcaaaaggtgagctgtacagtccggcaaccactagccacatgtgattattgagcatctgactgtggcttgtctgaactgagatgtgctgtaagtgtaaaatgcacgctggattttaaagatttagaacaaaaggaatgtaaaatatctcaatcataaatttttatattgatttcatgttgaaatgacaatatttctgatatactgggttaaataaaatgtattaaagttatttttgcttttcctaatgaggctaactagacaattgaagttatacatgtggctcacatatttctataggacagtgctggtcta

SEQ ID NO: 34405 - DNA, 430 bp, Homo sapiens
gcgctgaagaagtcctggatggagagacaggtggtcttacatgtggctgtgagtggcctgtccttcagagaggctttaggaatctctaggtacaagggaaagataacatccccttgggctgcagtccaggttcattcaacaagggaagaaaactggaaaacatctgatgtctgttttaccagagttgttactattacttttactattattgttttttgtttttttgttttttttttgagacgaagttttgctcttgttgccattgcactccagcctgggtgacagaatgagaccctgtctccaaaaataaataaataaataaataaataaataaataaataaaagtttcccatgtgcatgtgtgcacatatgtgtgtacacttatggacatttggggacacctcctgcaccccgcagtggtgcagttatt

SEQ ID NO: 34406 - DNA, 373 bp, Homo sapiens
aagcatgcctagtaaggactccatcatcaagtgtatccatgggtacatgggatttggctcacgtagaccctaatgatgtaagttgattgcatgagaagtttgctttcaatcaagttgcatgttttctgattaaacccaatgacccacttgcaaatctattgcttcctatcctatgactctgagctctgctgacttaagagattttggtacccaagggaagaatacttctttggtactcaaggaagaataccctgaatcggagactgagcctgtcacctggactttcggagcttttcttttccctatgtgtgtataaagggagttacagtcttgattagggtaatcaaccaccctgtcaaggggaaatatggtt

SEQ ID NO: 34407 - DNA, 151 bp, Homo sapiens
caatcaaaagaattacaattgctactaggaaacactaaatctgaggattctgtcatgactatgtatagctggttagaaaaatctttgctgaattgaatggctttctcattacagatggccttgtttacactgtacttagagttctgtgtgc

SEQ ID NO: 34408 - DNA, 440 bp, Homo sapiens
gcggagattgtgccattgcatttcagcctgggcaacaagagcgaaacctgaaactctgtctcaaaaaaaagaaagagaaagattctctgatcagtttgggacatgttatgtttaggttgccttcaggtcatctaaatgatgatatttagaaggtagatggaagtaaggccctaaagtccagaaaaaaagtgtgagatacaggtgagctggaggatggtgtggaagccaattgaaattatgtatataaagggaaggaggatactttttctaatgtttgcgttagcataagaaagatgctgataaattatatttagtggtccttcattaatattcatgaagtgaagggcttgccatgggtgaagcatttgattgttctgcctggcatccagagatacataatacataatttcctacattcaaaagttgtacagcaggaaaaa

SEQ ID NO: 34409 - DNA, 1109 bp, Homo sapiens
tcaaatatgaataaaggaatcctccatgagaaattaacaataagacttagtaatgcatttaaaaaatagtacttcctgaccaagtagggtttatctcaatattgaaaggttagtttacttttagaatttatcagtaaatgtgtcatattggcatattaaaaaagaaaatgggattatatataaggatgatgttactagttataaaaagagagggaggccaggcatggtggctcacgcctgtaaccccaacactttcggaggccaagcagggtggattgtttgagctcaggagtttgagatcggcctggccaatatggcaaaaccttgtctctactaaaaatacaaaaaatagctgggcatggtgatgcatgcctgtagtcccagctacttgggaggctgaggcatgaggctctctggagcccaggaggcggaggttgcagtgagccaagatcgtgtcactgcactccagactaggtgacagagtgagaacctgtatcaaaaaaaaaaaaagagagagagagggagaaacctatgaaatttaacaaccatttctgctaaaatctctcagtaaacacagaatagataggaacttccctaacttgataaagtgtatctaccagaaacctatagcaacctgcatatgaaagagggatttaaaaaatttccatcaaagtctcagaacaagcagagaaggactattctacattcccttggatgtgctagccaaagcaatgagatatacaacaacaacacagagcgcaataaagattggggtaaattcagcattatttgcagtcaatattatgacttagaccaggagtaggcaaactttttctgttaaggagcagataataagtattttagggattgtaggccagaagacatctgtgacaattactcagttttgccctaataacataacagaactaagatccattatatctgtagtaaaatatataaatatgcttaattcatgtattttaaagattttcagagtgaattataaggcaaaacctaatgctctgtgttgtggaagagaaacagaaacaaactgactcaggaaagttaaaataaaaggatggacaaatgtgaataaaaagaaagcaggt

SEQ ID NO: 34410 - DNA, 463 bp, Homo sapiens
catacactgcattacaggtgggtgtcgacttccacctccagcctgtgagatgcctgcagggagccatcctgagtcctccgaattgacacagtgtctttggggtaggaatttcccagtgaatgcttacttaaatgaattcaaaaagagaaaacatttccatggaagaggaaacaggaaattccaacagatcagcaacagttggagtgctaacctgtcactggaatgggaaaaaaaatgctgtcgttgacacatcttttccttgtttttgacacaaattagaaacaccacctggaacacagctgtgactagataaacaagtgaaacattctttggtgtggtgaggggaaaacaaatttctcaaaggacacgcaccatggtgtatgagaggacactggagcccagccagcatctgacatgctgaattcaaagtgcaggtgaaagtaggacaactgattcacaagct

SEQ ID NO: 34411 - DNA, 302 bp, Homo sapiens
agttcattattcctgtaaaccaggggttgacaaactttctgagaagggcctgatactttctctctcagggtcttttttttgctatttgcctcttttaaaaaacaactttataaaaaaagttaaaaaccatttctcagcaatgtaaaaactctacttagcaggggggctgtacatcacagccaaggaacaccagatctggcccagaggccatcatttgcagagatacctcctgtagacagttgttcctgcttcatgtgagactgtgtcaatatgctaatatgctgataaaccaaagttctaag

SEQ ID NO: 34412 - DNA, 672 bp, Homo sapiens
  misc_feature (1)..(1): n is a, c, g, or t
ngttgtcataaagagttaagagtatatattctaaaactacagggatctaggttcaaattccaacttattcacttactagctctgtgacgttggccatgttacttaatctctctaatcctattttctcatctacaaagtggggataaataatagtcttttcctcataaggtcagaggaagattacctgaaagaatgcctaaatgcccagctaatgtcagtgacacttcccattatcttgtcacagggtctgttatcactgtaggcaaagtggggtggtatcattgcctgcccagtcccgagggctttgggcttgcagaaagaagaggaggcagttcccttcttcccaggatctcagttctttatcttagattcccaagagagctcagcctaggaagttttcttagactagctggggtctccaggacaaaggttgtattcactagggtagaacaaataaaataaaataaatacaaattaaaaaaagaaaaggaatgacgggtgggaagatggcagggaaacctcccacactgttactcagcactgtgccttctgctcttggggttcctggttctccttacaaactggagaaaagagactgatagacaaaggctaaagcaagaaatctgggatgggaaagggggaaagaaagaaaacagggaggtggtagatgaa

SEQ ID NO: 34413 - DNA, 711 bp, Homo sapiens
gggcaatatcagctatagcccttctatataaaactgttggagagatagtcatggggtcctctcccttactgccttcattccgtattcagttgagctacttctgaattcccatcataactcaacacttgtctttcaatagattaacttcctattaggtcttaattttattatcctctaatgttaccatctcgttgcagtaatcctaaccttgccactctctctctctctctcttttttagacagggtcttgctctgtcacccaggctggactgcagtggtgtgttcacagctcactgctgccttgacctcctgggctcagttaatctgcctgcctcagcctcccgagtagctgggactacaggcttgcaccactgcacctggctaatttttatattttttgtagagacagggcttaccatgttgcccaggctggtctcaaactcctgggctcaagcggtctgcccaccttgagtggcacttgtggatctctagtgcctttttaagcatccctatacatccaggtagttagtatttgtttgcctctacctggagagaatgacggtatacttggactgtgatgttacagggatatacagtgccccacttacttttcccaaatactgaaatatgaatttagcagaccacaaagtgctaggattataggcatgagccactgcaccaggcctggccagtcttctgataagacctctc

SEQ ID NO: 34414 - DNA, 403 bp, Homo sapiens
ttcatcattctgcaaatcagcaagactcacttcaaacagaagacccttgagaccatcagatgcaatttgggttccttgggtcctggcgaccaagtctttccagtatttcttatattgaacatagcaggtgctttcacatcatactgatctttcttagagaatggaccaactactttcttcttaactccctttttgccacctttcataaggcacttgttcttaacaaccgccatggtgctgcttggagtaccaaaaggctaaattttatatttttggtagagacgggatttcaggatgttggccaagctgctcttgaactcctgatgtcaggtgatctgcccgcctctgcctcccaaagtgctgggattacaagtgtggaccactgcacccagctgttatttat

SEQ ID NO: 34415 - DNA, 2119 bp, Homo sapiens
caggagagggctctactctgagctcctattttccaaggctccgggccgcgctcggcgctggcctgctgccccggcgggtccgccggccggaggggggagtcacaggaagagccctccacaaaaggaggcctcggcggatcaggacagctgcaggtgggtgtgcagactggtgagctgccagcaggggcccagacgcgccaggcctggagatggctggaaactgctcctgggaggcccatcccggcaacaggaacaagatgtgccctggcctgagcgaggccccggaactctacagccggggcttcctgaccatcgagcagatcgcgatgctgccgcctccggccgtcatgaactacatcttcctgctcctctgcctgtgtggcctggtgggcaacgggctggtcctctggtttttcggcttctccatcaagaggaaccccttctccatctacttcctgcacctggccagcgccgatgtgggctacctcttcagcaaggcggtgttctccatcctgaacacggggggcttcctgggcacgtttgccgactacatccgcagcgtgtgccgggtcctggggctctgcatgttccttaccggcgtgagcctcctgccggccgtcagcgccgagcgctgcgcctcggtcatcttccccgcctggtactggcgccggcggcccaagcgcctgtcggccgtggtgtgcgccctgctgtgggtcctgtccctcctggtcacctgcctgcacaactacttctgcgtgttcctgggccgcggggcccccggcgcggcctgcaggcacatggacatcttcctgggcatcctcctgttcctgctctgctgcccgctcatggtgctgccctgcctggccctcatcctgcacgtggagtgccgggcccgacggcgccacgctctgccaagctcaaccacgtcatcctggccatggtctccgtcttcctggtgtcctccatctacttagggatcgactggttcctcttctgggtcttccagatcccggcccccttccccgagtacgtcactgacctgtgcatctgcatcaacagcagcgccaagccatcgtctacttcctggccgggagggacaagtcgcagcggctgtgggagccgctcagggtggtcttccagcgggccctgcgggacggcgctgagctgggggaggccgggggcagcacgcccaacacagtcaccatggagatgcagtgtcccccggggaacgcctcctgagactccagcgcctggaggaggcaggggcaggaagcggcctccaagacccttcgccttgggacaggaatgggcacctgcttctgagtccatacaggagaagaaagatctgtttcctctcctcgggcctccttctccctgggctggggactccaggggtggctgggagactgggcagccaccagcaaacagaccctgtggcccctgcccggctcccccacccattctgctcccctagagacctcttgtacagaagttgcccccaggtggtggggcccctccttgccctaggctggttggtaaaagagaggaggtcaacacccagcctagccacctctgcctcttgggtcagccctccttgactgtgtcccagccagcaccaggccagcagcctcatccctgccattcagggctgttccagagattcgatcctcttaaggcattatcagtgagcaaatgtgaaggaaatggtgtctggaagaaagttctggttcacatgccttgtagctaagtctttctgcaaacaacctcccttccccccgtcgagtcatttggtgactttgatggggggatttctggttatgtcaaggctctggagacaggaagggcctttggccgccttgggtagttgacctgccttttctgactccgggacgagccagtcctaggctgcctccgggagcacttgaggtatcccgcaggccatgaggacccactgggcagctcctggacagcctcttggctccagcccccacccgaaagtggacactggctccgccctggccacctggggactggcactgtggtgcacagtggcccaatgtggccaacggaagttttataaaagacaaaatgtatatcaataaacattttataacttgca

SEQ ID NO: 34416 - DNA, 1802 bp, Homo sapiens
caggagagggctctactctgagctcctattttccaaggctccgggccgcgctcggcgctggcctgctgccccggcgggtccgccggccggaggggggagtcacaggaagagccctccacaaaaggaggcctcggcggatcaggacagctgcaggtgggtgtgcagactggtgagctgccagcaggggcccagacgcgccaggcctggagatggctggaaactgctcctgggaggcccatcccggcaacaggaacaagatgtgccctggcctgagcgaggccccggaactctacagccggggcttcctgaccatcgagcagatcgcgatgctgccgcctccggccgtcatgaactacatcttcctgctcctctgcctgtgtggcctggtgggcaacgggctggtcctctggtttttcggcttctccatcaagaggaaccccttctccatctacttcctgcacctggccagcgccgatgtgggctacctcttcagcaaggcggtgttctccatcctgaacacggggggcttcctgggcacgtttgccgactacatccgcagcgtgtgccgggtcctggggctctgcatgttccttaccggcgtgagcctcctgccggccgtcagcgccgagcgctgcgcctcggtcatcttccccgcctggtactggcgccggcggcccaagcgcctgtcggccgtggtgtgcgccctgctgtgggtcctgtccctcctggtcacctgcctgcacaactacttctgcgtgttcctgggccgcggggcccccggcgcggcctgcaggcacatggacatcttcctgggcatcctcctgttcctgctctgctgcccgctcatggtgctgccctgcctggccctcatcctgcacgtggagtgccgggcccgacggcgccacgctctgccaagctcaaccacgtcatcctggccatggtctccgtcttcctggtgtcctccatctacttagggatcgactggttcctcttctgggtcttccagatcccggcccccttccccgagtacgtcactgacctgtgcatctgcatcaacagcagcgccaagccatcgtctacttcctggccgggagggacaagtcgcagcggctgtgggagccgctcagggtggtcttccagcgggccctgcgggacggcgctgagctgggggaggccgggggcagcacgcccaacacagtcaccatggagatgcagtgtcccccggggaacgcctcctgagactccagcgcctggaggaggcaggggcaggaagcggcctccaagacccttcgccttgggacaggaatgggcacctgcttctgagtccatacaggagaagaaagatctgtttcctctcctcgggcctccttctccctgggctggggactccaggggtggctgggagactgggcagccaccagcaaacagaccctgtggcccctgcccggctcccccacccattctgctcccctagagacctcttgtacagaagttgcccccaggtggtggggcccctccttgccctaggctgccttttctgactccgggacgagccagtcctaggctgcctccgggagcacttgaggtatcccgcaggccatgaggacccactgggcagctcctggacagcctcttggctccagcccccacccgaaagtggacactggctccgccctggccacctggggactggcactgtggtgcacagtggcccaatgtggccaacggaagttttataaaagacaaaatgtatatcaataaacattttataacttgcagccaggaaggcttcatgcccacag

SEQ ID NO: 34417 - DNA, 2143 bp, Homo sapiens
caggagagggctctactctgagctcctattttccaaggctccgggccgcgctcggcgctggcctgctgccccggcgggtccgccggccggaggggggagtcacaggaagagccctccacaaaaggaggcctcggcggatcaggacagctgcaggtgggtgtgcagactggtgagctgccagcaggggcccagacgcgccaggcctggagatggctggaaactgctcctgggaggcccatcccggcaacaggaacaagatgtgccctggcctgagcgaggccccggaactctacagccggggcttcctgaccatcgagcagatcgcgatgctgccgcctccggccgtcatgaactacatcttcctgctcctctgcctgtgtggcctggtgggcaacgggctggtcctctggtttttcggcttctccatcaagaggaaccccttctccatctacttcctgcacctggccagcgccgatgtgggctacctcttcagcaaggcggtgttctccatcctgaacacggggggcttcctgggcacgtttgccgactacatccgcagcgtgtgccgggtcctggggctctgcatgttccttaccggcgtgagcctcctgccggccgtcagcgccgagcgctgcgcctcggtcatcttccccgcctggtactggcgccggcggcccaagcgcctgtcggccgtggtgtgcgccctgctgtgggtcctgtccctcctggtcacctgcctgcacaactacttctgcgtgttcctgggccgcggggcccccggcgcggcctgcaggcacatggacatcttcctgggcatcctcctgttcctgctctgctgcccgctcatggtgctgccctgcctggccctcatcctgcacgtggagtgccgggcccgacggcgccacgctctgccaagctcaaccacgtcatcctggccatggtctccgtcttcctggtgtcctccatctacttagggatcgactggttcctcttctgggtcttccagatcccggcccccttccccgagtacgtcactgacctgtgcatctgcatcaacagcagcgccaagccatcgtctacttcctggccgggagggacaagtcgcagcggctgtgggagccgctcagggtggtcttccagcgggccctgcgggacggcgctgagctgggggaggccgggggcagcacgcccaacacagtcaccatggagatgcagtgtcccccggggaacgcctcctgagactccagcgcctggaggaggcaggggcaggaagcggcctccaagacccttcgccttgggacaggaatgggcacctgcttctgagtccatacaggagaagaaagatctgtttcctctcctcgggcctccttctccctgggctggggactccaggggtggctgggagactgggcagccaccagcaaacagaccctgtggcccctgcccggctcccccacccattctgctcccctagagacctcttgtacagaagttgcccccaggtggtggggcccctccttgccctaggctggttggtaaaagagaggaggtcaacacccagcctagccacctctgcctcttgggtcagccctccttgactgtgtcccagccagcaccaggccagcagcctcatccctgccattcagggctgttccagagattcgatcctcttaaggcattatcagtgagcaaatgtgaaggaaatggtgtctggaagaaagttctggttcacatgccttgtagctaagtctttctgcaaacaacctcccttccccccgtcgagtcatttggtgactttgatggggggatttctggttatgtcaaggctctggagacaggaagggcctttggccgccttgggtagttgacctgccttttctgactccgggacgagccagtcctaggctgcctccgggagcacttgaggtatcccgcaggccatgaggacccactgggcagctcctggacagcctcttggctccagcccccacccgaaagtggacactggctccgccctggccacctggggactggcactgtggtgcacagtggcccaatgtggccaacggaagttttataaaagacaaaatgtatatcaataaacattttataacttgcagccaggaaggcttcatgcccacag

SEQ ID NO: 34418 - DNA, 2156 bp, Homo sapiens
caggagagggctctactctgagctcctattttccaaggctccgggccgcgctcggcgctggcctgctgccccggcgggtccgccggccggaggggggagtcacaggaagagccctccacaaaaggaggcctcggcggatcaggacagctgcaggtgggtgtgcagactggtgagctgccagcaggggcccagacgcgccaggcctggagatggctggaaactgctcctgggaggcccatcccggcaacaggaacaagatgtgccctggcctgagcgaggccccggaactctacagccggggcttcctgaccatcgagcagatcgcgatgctgccgcctccggccgtcatgaactacatcttcctgctcctctgcctgtgtggcctggtgggcaacgggctggtcctctggtttttcggcttctccatcaagaggaaccccttctccatctacttcctgcacctggccagcgccgatgtgggctacctcttcagcaaggcggtgttctccatcctgaacacggggggcttcctgggcacgtttgccgactacatccgcagcgtgtgccgggtcctggggctctgcatgttccttaccggcgtgagcctcctgccggccgtcagcgccgagcgctgcgcctcggtcatcttccccgcctggtactggcgccggcggcccaagcgcctgtcggccgtggtgtgcgccctgctgtgggtcctgtccctcctggtcacctgcctgcacaactacttctgcgtgttcctgggccgcggggcccccggcgcggcctgcaggcacatggacatcttcctgggcatcctcctgttcctgctctgctgcccgctcatggtgctgccctgcctggccctcatcctgcacgtggagtgccgggcccgacggcgccacgctctgccaagctcaaccacgtcatcctggccatggtctccgtcttcctggtgtcctccatctacttagggatcgactggttcctcttctgggtcttccagatcccggcccccttccccgagtacgtcactgacctgtgcatctgcatcaacagcagcgccaagccatcgtctacttcctggccgggagggacaagtcgcagcggctgtgggagccgctcagggtggtcttccagcgggccctgcgggacggcgctgagctgggggaggccgggggcagcacgcccaacacagtcaccatggagatgcagtgtcccccggggaacgcctcctgagactccagcgcctggaggaggcaggggcaggaagcggcctccaagacccttcgccttgggacaggaatgggcacctgcttctgagtccatacaggagaagaaagatctgtttcctctcctcgggcctccttctccctgggctggggactccaggggtggctgggagactgggcagccaccagcaaacagaccctgtggcccctgcccggctcccccacccattctgctcccctagagacctcttgtacagaagttgcccccaggtggtggggcccctccttgccctaggctggttggtaaaagagaggaggtcaacacccagcctagccacctctgcctcttgggtcagccctccttgactgtgtcccagccagcaccaggccagcagcctcatccctgccattcagggctgttccagagattcgatcctcttaaggcattatcagtgagcaaatgtgaaggaaatggtgtctggaagaaagttctggttcacatgccttgtagctaagtctttctgcaaacaacctcccttccccccgtcgagtcatttggtgactttgatggggggatttctggttatgtcaaggctctggagacaggaagggcctttggccgccttgggtagttgacctgccttttctgactccgggacgagccagtcctaggctgcctccgggagcacttgaggtatcccgcaggccatgaggacccactgggcagctcctggacagcctcttggctccagcccccacccgaaagtggacactggctccgccctggccacctggggactggcactgtggtgcacagtggcccaatgtggccaacggaagttttataaaagacaaaatgtatatcaataaacattttataacttgcaaaaaaaaaacaaaaagggcggggccgctctaagaggt

SEQ ID NO: 34419 - DNA, 302 bp, Homo sapiens
tataattccatttatatgaaatgcccagaataggcaaatctatacagatagaaagtagattagtggttgccaggggatgggaaaaaagggtaacagtgagtgactgataatgggtatggggtttctttttgagatgatgaaaatgttttaaaattagatagtagagatggttgcacagccttgtgaatattctagaaaacactgaatagtataatttaaaacattttatgccttatgagttatatctcaaaaaacccaaaatgcacacctatgtatgtgtggacaagaagcatgaatgaata

SEQ ID NO: 34420 - DNA, 483 bp, Homo sapiens
cgtgtgtgcccattacatggcgagatccttgaagacagagactcattccccgtctgcctcccaccaccttgaacactcccaactcctaaagtgccaacacaggtttaatttgccgaattaaatcttcagttctgctgattctgctgagtacattcctctgctacaaagctaatggttccaaaacaaaatgattaagtatttgaatcctggagcatcaacactgccttttaaaatacagcaaagtctaaactagtccagctgaaacatctgtgagcttcagttccaatgagggagtccagggagttagaaactggaagagcaccttttttcagtggccgggaagatggcggacattcagactgagcgtgcctaccaaaagcagccgaccatctttcaaaacaagaagagggtcctgctgggagaaactggcaaggagaagctcccgcggtactacaagaacattggtctgggcttcaagacacc

SEQ ID NO: 34421 - DNA, 382 bp, Homo sapiens
tgaagaaatgaagaaaacaaggaatttacatctaaaaagactggcttttaattctcacattttaatgcatgatatggtttggctgtgtctccacccaaatttcatcttgaattgtagctcccataattctctcgtgttgtgggaggcacctagtgggagataattgaatcataggggtgttttcccccatattgttctcatggtagtgaataagtctcacaatatctgatggttttgtaatgggaaatcccttttgcttggctctctgattctgtcttatctgctgccacatgagatgtggctttcgctttccaccatgattgtgaggcctcccagccacgtagaacagtgactccattaaacctctttcctttgtaaattg

SEQ ID NO: 34422 - DNA, 334 bp, Homo sapiens
acaagattggccgaactggctctcaggctcccggctcactcatgctcatcctgtcactacaggaccttaaagaaaagttttaaagtgatttttaacttttttccagaaaaaaactatattctccccttccttgagtgtgctggccaagtgtgatggcctgtatgattcgagccgcgccagcgcttccttcccggctcccttccctgctgcgccaaggtcacccagccacgtggcattctcttacctcatggcaggcagcactgcgatcttatcagagctcacatttgcagccttcgtgaactggattttgaaagttaaaacagttaaaaaaaaa

SEQ ID NO: 34423 - DNA, 281 bp, Homo sapiens
gcggccgcctactactactatctactgctcgaattcaagcttctaacggatgtacggggacatgcctctgtgagcgatgacggagcaacagctctccagcacgtgaagctctccagacagctgttcgtgagaagccagacagaggcctggggtctcagtccagatttctggggagtggggtgtccaagcgtgggccacgctgctgggagccacctagggaagcaggtcgcctgtttctatagtgacggtaataaaccaagtcaattttctatagtgaaaat

SEQ ID NO: 34424 - DNA, 428 bp, Homo sapiens
gaccgcactgacaggaaaccttccgtcgtgagggagcacttcccaggggccgcagggacgacactctccagggaggccccagcaaccacaccatcttcttgctgtgagaggtcaggtccgcaaaggcttctgaagaagaggaagggcgagtaggggcacctggacgctgatggtggccaggatgctcagctggccaggagggcagcacctgctggggacggtggccctgccttcatgcccaggacaccagctgggtccagctagcagccactgggaatcagaggaatggggcaagttgcccagggtgggggtgcctagccaggtgcagtccccgccccgcctagtcctcggcgtcacgcaatgctcacctcgcctcttccccactaacatcccagactttaaaattcagtaaatcagatgtacaccga

SEQ ID NO: 34425 - DNA, 2377 bp, Homo sapiens
agccccgagcgagcggagcgagcgagcgagttgccgagcgcgccccgtccctcgcgcgcgatgctcccctggacggcgctcggcctggccctgagcttgcggctggcgctggcgcggagcggcgcggagcgcggtccaccagcatcagccccccgaggggacctgatgttcctgctggacagctcagccagcgtctctcactacgagttctcccgggttcgggagtttgtggggcagctggtggctccactgcccctgggcaccggggccctgcgtgccagtctggtgcacgtgggcagtcggccatacaccgagttccccttcggccagcacagctcgggtgaggctgcccaggatgcggtgcgtgcttctgcccagcgcatgggtgacacccacactggcctggcgctggtctatgccaaggaacagctgtttgctgaagcatcaggtgcccggccaggggtgcccaaagtgctggtgtgggtgacagatggcggctccagcgaccctgtgggcccccccatgcaggagctcaaggacctgggcgtcaccgtgttcattgtcagcaccggccgaggcaacttcctggagctgtcagccgctgcctcagcccctgccgagaagcacctgcactttgtggacgtggatgacctgcacatcattgtccaagagctgaggggctccattctcgacgcgatgcggccgcagcagctccatgccacggagatcacgtccagcggcttccgcctggcctggccacccctgctgaccgcagactcgggctactatgtgctggagctggtgcccagcgcccagccgggggctgcaagacgccagcagctgccagggaacgccacggactggatctgggccggcctcgacccggacacggactacgacgtggcgctagtgcctgagtccaacgtgcgcctcctgaggccccagatcctgcgggtgcgcacgcggcccggtgaggcagggccgggggcttcgggcccggagtcgggggctgggccggcccccacgcagctcgccgccctccccgccccagaggaggccgggccagagcgcatcgtcatctcccacgcccggccgcgcagcctccgcgtgagttgggccccagcgctgggctcagccgcggcgctcggctaccacgtgcagttcgggccgctgcggggcggggaggcgcagcgggtggaggtgcccgcgggccgcaactgcaccacgctgcagggcctggcgccgggcaccgcctacctggtgaccgtgaccgccgccttccgctcgggccgcgagagcgcgctgtccgccaaggcctgcacgcccgacggcccgcgcccgcgcccacgccccgtgccccgcgccccgaccccggggaccgccagccgtgagccgtaagccggcgtccccgcccagccgagagggccggcgcctacctgagggcccctgtgtcccgaacccggagcggaggcgcccaacccggcagacgggtgcaggcccggcctttccccacgcggactccgcgcgaccccggccctctccctgcggccgcagggcttccccgcctggcgcctgccctccagggctggggcctcgcctggcgggaccccgcagcagccccggccccatccccgcccagagccgggcgtcgtgtgggtccgtgggtgataattgagagcgtcagacccaggactgttcagggaggagccccggtcagactcccacgtgtgaagaccgggccccaagtggcaagggctggcctggggcgggcagcttgggtcctggacgttgataggaagcggaaggggaatcgcgggaagctggcccaggtcaggtccgcaaaggcttctgaagaagaggaagggcgagtaggggcacctggacgctgatggtggccaggatgctcagctggccaggagggcagcacctgctggggacggtggccctgccttcatgcccaggacaccagctgggtccagctagcagccactgggaatcagaggaatggggcagagctgggcattcaggaccttgaggacacgtgaccccacccgcccaccgccactatcaggccccgggaccgcactgacaggaaaccttccgtcgtgagggagcacttcccaggggccgcagggacgacactctccagggaggccccagcaaccacaccatcttcttgctgtgagaggtctcaccccgggctacctcctgtcactactcactgccctggggtccgtgggcaagttgcccagggtgggggtgcctagccaggtgcagtccccgccccgcctagtcctcggcgtcacgcaatgctcacctcgcctcttccccactaacatcccagactttaaaattcagtaaatcagatgtacaccga

SEQ ID NO: 34426 - DNA, 2873 bp, Homo sapiens
tgctgcttccttttttaggcaaagtcgagtgctggccgtccgcacggccccgcggtgtctcacctgcctgaaagggaggaaggaagcctgtggagccccatccgttctcccgcggcgcatcctccaggagagggtggggaaggaggagacatcctggcagacacccccccacgtcccccacctcccagctctgagctgaggaggccctggaagagggccatggctactccgagggagggccggggtagggttctcctgtccaggggacactgctggcccagccccacccaagcaggggaaatctgccctgggagccactgtccctcaggacgccccctgcaaccagccacctctcgtctgggcctcaccaagaccccaagactcaagagctcctgtctcaccagtgggaccctccagtcctgctgggggtgtgtcctgggtcctggagtctgggcccctcactgggtagggtatatgggtaacaggcccagtgtggtcccactggacagggcctcaaccaaccatctcccactcccatgcctcttcctccaagaagcccaggtggcgtgggtgcttcgagtctctctcgaattcctgtcttctgtcccctttcaagccactgtgtccttgtccaccagcatcagccccccgaggggacctgatgttcctgctggacagctcagccagcgtctctcactacgagttctcccgggttcgggagtttgtggggcagctggtggctccactgcccctgggcaccggggccctgcgtgccagtctggtgcacgtgggcagtcggccatacaccgagttccccttcggccagcacagctcgggtgaggctgcccaggatgcggtgcgtgcttctgcccagcgcatgggtgacacccacactggcctggcgctggtctatgccaaggaacagctgtttgctgaagcatcaggtgcccggccaggggtgcccaaagtgctggtgtgggtgacagatggcggctccagcgaccctgtgggcccccccatgcaggagctcaaggacctgggcgtcaccgtgttcattgtcagcaccggccgaggcaacttcctggagctgtcagccgctgcctcagcccctgccgagaagcacctgcactttgtggacgtggatgacctgcacatcattgtccaagagctgaggggctccattctcgacgcgatgcggccgcagcagctccatgccacggagatcacgtccagcggcttccgcctggcctggccacccctgctgaccgcagactcgggctactatgtgctggagctggtgcccagcgcccagccgggggctgcaagacgccagcagctgccagggaacgccacggactggatctgggccggcctcgacccggacacggactacgacgtggcgctagtgcctgagtccaacgtgcgcctcctgaggccccagatcctgcgggtgcgcacgcggcccggtgaggcagggccgggggcttcgggcccggagtcgggggctgggccggcccccacgcagctcgccgccctccccgccccagaggaggccgggccagagcgcatcgtcatctcccacgcccggccgcgcagcctccgcgtgagttgggccccagcgctgggctcagccgcggcgctcggctaccacgtgcagttcgggccgctgcggggcggggaggcgcagcgggtggaggtgcccgcgggccgcaactgcaccacgctgcagggcctggcgccgggcaccgcctacctggtgaccgtgaccgccgccttccgctcgggccgcgagagcgcgctgtccgccaaggcctgcacgcccgacggcccgcgcccgcgcccacgccccgtgccccgcgccccgaccccggggaccgccagccgtgagccgtaagccggcgtccccgcccagccgagagggccggcgcctacctgagggcccctgtgtcccgaacccggagcggaggcgcccaacccggcagacgggtgcaggcccggcctttccccacgcggactccgcgcgaccccggccctctccctgcggccgcagggcttccccgcctggcgcctgccctccagggctggggcctcgcctggcgggaccccgcagcagccccggccccatccccgcccagagccgggcgtcgtgtgggtccgtgggtgataattgagagcgtcagacccaggactgttcagggaggagccccggtcagactcccacgtgtgaagaccgggccccaagtggcaagggctggcctggggcgggcagcttgggtcctggacgttgataggaagcggaaggggaatcgcgggaagctggcccaggtcaggtccgcaaaggcttctgaagaagaggaagggcgagtaggggcacctggacgctgatggtggccaggatgctcagctggccaggagggcagcacctgctggggacggtggccctgccttcatgcccaggacaccagctgggtccagctagcagccactgggaatcagaggaatggggcagagctgggcattcaggaccttgaggacacgtgaccccacccgcccaccgccactatcaggccccgggaccgcactgacaggaaaccttccgtcgtgagggagcacttcccaggggccgcagggacgacactctccagggaggccccagcaaccacaccatcttcttgctgtgagaggtctcaccccgggctacctcctgtcactactcactgccctggggtccgtgggcaagttgcccagggtgggggtgcctagccaggtgcagtccccgccccgcctagtcctcggcgtcacgcaatgctcacctcgcctcttccccactaacatcccagactttaaaattcagtaaatcagatgtacaccga

SEQ ID NO: 34427 - DNA, 1982 bp, Homo sapiens
agccccgagcgagcggagcgagcgagcgagttgccgagcgcgccccgtccctcgcgcgcgatgctcccctggacggcgctcggcctggccctgagcttgcggctggcgctggcgcggagcggcgcggagcgcggagctcaaggacctgggcgtcaccgtgttcattgtcagcaccggccgaggcaacttcctggagctgtcagccgctgcctcagcccctgccgagaagcacctgcactttgtggacgtggatgacctgcacatcattgtccaagagctgaggggctccattctcgacgcgatgcggccgcagcagctccatgccacggagatcacgtccagcggcttccgcctggcctggccacccctgctgaccgcagactcgggctactatgtgctggagctggtgcccagcgcccagccgggggctgcaagacgccagcagctgccagggaacgccacggactggatctgggccggcctcgacccggacacggactacgacgtggcgctagtgcctgagtccaacgtgcgcctcctgaggccccagatcctgcgggtgcgcacgcggcccggtgaggcagggccgggggcttcgggcccggagtcgggggctgggccggcccccacgcagctcgccgccctccccgccccagaggaggccgggccagagcgcatcgtcatctcccacgcccggccgcgcagcctccgcgtgagttgggccccagcgctgggctcagccgcggcgctcggctaccacgtgcagttcgggccgctgcggggcggggaggcgcagcgggtggaggtgcccgcgggccgcaactgcaccacgctgcagggcctggcgccgggcaccgcctacctggtgaccgtgaccgccgccttccgctcgggccgcgagagcgcgctgtccgccaaggcctgcacgcccgacggcccgcgcccgcgcccacgccccgtgccccgcgccccgaccccggggaccgccagccgtgagccgtaagccggcgtccccgcccagccgagagggccggcgcctacctgagggcccctgtgtcccgaacccggagcggaggcgcccaacccggcagacgggtgcaggcccggcctttccccacgcggactccgcgcgaccccggccctctccctgcggccgcagggcttccccgcctggcgcctgccctccagggctggggcctcgcctggcgggaccccgcagcagccccggccccatccccgcccagagccgggcgtcgtgtgggtccgtgggtgataattgagagcgtcagacccaggactgttcagggaggagccccggtcagactcccacgtgtgaagaccgggccccaagtggcaagggctggcctggggcgggcagcttgggtcctggacgttgataggaagcggaaggggaatcgcgggaagctggcccaggtcaggtccgcaaaggcttctgaagaagaggaagggcgagtaggggcacctggacgctgatggtggccaggatgctcagctggccaggagggcagcacctgctggggacggtggccctgccttcatgcccaggacaccagctgggtccagctagcagccactgggaatcagaggaatggggcagagctgggcattcaggaccttgaggacacgtgaccccacccgcccaccgccactatcaggccccgggaccgcactgacaggaaaccttccgtcgtgagggagcacttcccaggggccgcagggacgacactctccagggaggccccagcaaccacaccatcttcttgctgtgagaggtctcaccccgggctacctcctgtcactactcactgccctggggtccgtgggcaagttgcccagggtgggggtgcctagccaggtgcagtccccgccccgcctagtcctcggcgtcacgcaatgctcacctcgcctcttccccactaacatcccagactttaaaattcagtaaatcagatgtacaccga

SEQ ID NO: 34428 - DNA, 4497 bp, Homo sapiens
agccccgagcgagcggagcgagcgagcgagttgccgagcgcgccccgtccctcgcgcgcgatgctcccctggacggcgctcggcctggccctgagcttgcggctggcgctggcgcggagcggcgcggagcgcggtccaccagcatcagccccccgaggggacctgatgttcctgctggacagctcagccagcgtctctcactacgagttctcccgggttcgggagtttgtggggcagctggtggctccactgcccctgggcaccggggccctgcgtgccagtctggtgcacgtgggcagtcggccatacaccgagttccccttcggccagcacagctcgggtgaggctgcccaggatgcggtgcgtgcttctgcccagcgcatgggtgacacccacactggcctggcgctggtctatgccaaggaacagctgtttgctgaagcatcaggtgcccggccaggggtgcccaaagtgctggtgtgggtgacagatggcggctccagcgaccctgtgggcccccccatgcaggagctcaaggacctgggcgtcaccgtgttcattgtcagcaccggccgaggcaacttcctggagctgtcagccgctgcctcagcccctgccgagaagcacctgcactttgtggacgtggatgacctgcacatcattgtccaagagctgaggggctccattctcgacgcgatgcggccgcagcagctccatgccacggagatcacgtccagcggcttccgcctggcctggccacccctgctgaccgcagactcgggctactatgtgctggagctggtgcccagcgcccagccgggggctgcaagacgccagcagctgccagggaacgccacggactggatctgggccggcctcgacccggacacggactacgacgtggcgctagtgcctgagtccaacgtgcgcctcctgaggccccagatcctgcgggtgcgcacgcggcccggtgaggcagggccgggggcttcgggcccggagtcgggggctgggccggcccccacgcagctcgccgccctccccgccccagaggaggccgggccagagcgcatcgtcatctcccacgcccggccgcgcagcctccgcgtgagttgggccccagcgctgggctcagccgcggcgctcggctaccacgtgcagttcgggccgctgcggggcggggaggcgcagcgggtggaggtgcccgcgggccgcaactgcaccacgctgcagggcctggcgccgggcaccgcctacctggtgaccgtgaccgccgccttccgctcgggccgcgagagcgcgctgtccgccaaggcctgcacgcccgacggcccgcgcccgcgcccacgccccgtgccccgcgccccgaccccggggaccgccagccgtgagccgtaagccggcgtccccgcccagccgagagggccggcgcctacctgagggcccctgtgtcccgaacccggagcggaggcgcccaacccggcagacgggtgcaggcccggcctttccccacgcggactccgcgcgaccccggccctctccctgcggccgcagggcttccccgcctggcgcctgccctccagggctggggcctcgcctggcgggaccccgcagcagccccggccccatccccgcccagagccgggcgtcgtgtgggtccgtgggtgataattgagagcgtcagacccaggactgttcagggaggagccccggtcagactcccacgtgtgaagaccgggccccaagtggcaagggctggcctggggcgggcagcttgggtcctggacgttgataggaagcggaaggggaatcgcgggaagctggcccaggtcaggtccgcaaaggcttctgaagaagaggaagggcgagtaggggcacctggacgctgatggtggccaggatgctcagctggccaggagggcagcacctgctggggacggtggccctgccttcatgcccaggacaccagctgggtccagctagcagccactgggaatcagaggaatggggcagagctgggcattcaggaccttgaggacacgtgaccccacccgcccaccgccactatcaggccccgggaccgcactgacaggaaaccttccgtcgtgagggagcacttcccaggggccgcagggacgacactctccagggaggccccagcaaccacaccatcttcttgctgtgagaggtctcaccccgggctacctcctgtcactactcactgccctggggtccgtgggcaagttgcccagggtgggggtgcctagccaggtgcagtccccgccccgcctagtcctcggcgtcacgcaatgctcacctcgcctcttccccactaacatcccagactttaaaattcagtaaatcagatgtacaccgagcctgcagtctcgctaggatgctttactcctccacaaacagcagccgccgacaggacagcttgtgaacgtctccgccttttggggtgtccggggagaggaggtggagctgtcccctcccagtgtcaggcctccttggtcctcatgtgcaccttttattcagagagcttgggcccccttcctttggagctgggcccagggcaggtggctggaatgcagaggacaagggggctggggcctctgcagggccattcccaccgcagtctctgccacggcccggagccctgggcccagggccacgcgggctccctctgctggcaaagccacaccctgcaccgcatggggtccactgcccctttccccacgtggactctgcgtgaccccaggaactgcagcattgaggtggtctcagtccctccctcaggtctggtgggcattgtgccaggggccaccttcgggacagctggccttggcaccgtctcccaagaacccagctctgtgcatcccgtggccccaccagaaacccaaggccacaccgcccaccagctgggtgtggtcaccattcatggagggccggctggggccaggctcaccacgcagagtttgccctccggtgtgatgatgcatgagacacagtaggcccccctgcctgtgtgtgcagggggtgtctgtgggggggccctgctggctggactttgggtttctcctgagctccccttagcccccaagtcaggccacggaggcctgagtaggacccatgggctgtgtgtgtcactgcaggtggcgtgctcacaactgcactgctggtcggcaggtggccagggttgcaggcccgggcctcgggccccacctcctctggaggggtaggatctccttcgtgcagcccctgccccctaccctgttctccggagtgttggcagatctgagcccacggtcacgtgagaggagatgcctcttgcacactgagcccaggcccagctcacggagcaccctgcaggtggcagcggggcaccaggggctcattcctggtggcctcagtggcttctgtggacgactcagactcacatgagaagctgggaggagctccagctctgcaatcccgagagggcagagcgggggccctggccacaaccctgctccccacatacccgtctggcagaggctctgcctcccctctgcccatctctgcacaccaaggctgagcacagcacaaggcctcacggagagggtgaaaaggcactgccgtctccatctcagtgccaaggaatgcccctttcagaagccctcgtctgagaagtgctgccccttatgtagccccaggcattttaaaatctttgaatctgcaccaagtctcagaacagctctggccccggagtgctccgtccaggccgctgtgaaccggctgtccccgcgtctcctccacctcccctgacacaatcctggccccgactcagtccacccagggtgcagtgcagaggctgatacccgccaggacttccttgccaagggcccggccacgtcacaaggccactgcacgcttttcgacatgcacctggaaatcgggaagggccatgctgcagttgcttctagttgagacgagaagagcgacaaggttgtgatccacgtggcaggtgttcagaaggctgggggcgggcagcgctggggagagccctgggtacttcgaggagaccccgaagggaggctgctcccacacctgcgccagtttccaccctctctgtgagcagggctgcggtcacctcccacatctgaagagaaccaacctgaggatttcacgctggctgcgtgccagaccagtccctgacaggttgtgcgaggcccttcgctggacagcccattgctggccactggacggagaggcagagggggctgaaattcgggcccatgcctctgtgagcgatgacggagcaacagctctccagcacgtgaagctctccagacagctgttcgtgagaagccagacagaggcctggggtctcagtccagatttctggggagtggggtgtccaagcgtgggccacgctgctgggagccacctagggaagcaggtcgcctgtttctatagtgacggtaataaaccaagtcaattttctatagtgaaaat

SEQ ID NO: 34429 - DNA, 1872 bp, Homo sapiens
aacccatatacggctaggtggaggcgcgtggtgtaatcggccgaggcgtgttcattgtcagcaccggccgaggcaacttcctggagctgtcagccgctgcctcagcccctgccgagaagcacctgcactttgtggacgtggatgacctgcacatcattgtccaagagctgaggggctccattctcgacgcgatgcggccgcagcagctccatgccacggagatcacgtccagcggcttccgcctggcctggccacccctgctgaccgcagactcgggctactatgtgctggagctggtgcccagcgcccagccgggggctgcaagacgccagcagctgccagggaacgccacggactggatctgggccggcctcgacccggacacggactacgacgtggcgctagtgcctgagtccaacgtgcgcctcctgaggccccagatcctgcgggtgcgcacgcggcccggtgaggcagggccgggggcttcgggcccggagtcgggggctgggccggcccccacgcagctcgccgccctccccgccccagaggaggccgggccagagcgcatcgtcatctcccacgcccggccgcgcagcctccgcgtgagttgggccccagcgctgggctcagccgcggcgctcggctaccacgtgcagttcgggccgctgcggggcggggaggcgcagcgggtggaggtgcccgcgggccgcaactgcaccacgctgcagggcctggcgccgggcaccgcctacctggtgaccgtgaccgccgccttccgctcgggccgcgagagcgcgctgtccgccaaggcctgcacgcccgacggcccgcgcccgcgcccacgccccgtgccccgcgccccgaccccggggaccgccagccgtgagccgtaagccggcgtccccgcccagccgagagggccggcgcctacctgagggcccctgtgtcccgaacccggagcggaggcgcccaacccggcagacgggtgcaggcccggcctttccccacgcggactccgcgcgaccccggccctctccctgcggccgcagggcttccccgcctggcgcctgccctccagggctggggcctcgcctggcgggaccccgcagcagccccggccccatccccgcccagagccgggcgtcgtgtgggtccgtgggtgataattgagagcgtcagacccaggactgttcagggaggagccccggtcagactcccacgtgtgaagaccgggccccaagtggcaagggctggcctggggcgggcagcttgggtcctggacgttgataggaagcggaaggggaatcgcgggaagctggcccaggtcaggtccgcaaaggcttctgaagaagaggaagggcgagtaggggcacctggacgctgatggtggccaggatgctcagctggccaggagggcagcacctgctggggacggtggccctgccttcatgcccaggacaccagctgggtccagctagcagccactgggaatcagaggaatggggcagagctgggcattcaggaccttgaggacacgtgaccccacccgcccaccgccactatcaggccccgggaccgcactgacaggaaaccttccgtcgtgagggagcacttcccaggggccgcagggacgacactctccagggaggccccagcaaccacaccatcttcttgctgtgagaggtctcaccccgggctacctcctgtcactactcactgccctggggtccgtgggcaagttgcccagggtgggggtgcctagccaggtgcagtccccgccccgcctagtcctcggcgtcacgcaatgctcacctcgcctcttccccactaacatcccagactttaaaattcagtaaatcagatgtacaccga

SEQ ID NO: 34430 - DNA, 2129 bp, Homo sapiens
ctgcccctgtggtctcccatctcctagctgcagctcagagagccgggctgacctcagaccccggcctggccactcaggctggggctggtcctctgctctcaggcaccaccgtggactctgccgtctttgaggacctttgtcctggtcactgatctggccactgcacctctccacaaaggactgggtttggggctaagggaggcaggggcgcttctgacagggcctgagggggctgcaccctttcctccgtcctcccccagccaaggcacgttctgagaatccccagcatctgcggggcatggctccagcagctccttggccgcggggccccgtctttcctagtggggcctccaatctccagatcttccccatcagccagggccgccctccagcagcggaggaggaactgaccgctgttccctgaccccctgcaccacccacagacgcgatgcggccgcagcagctccatgccacggagatcacgtccagcggcttccgcctggcctggccacccctgctgaccgcagactcgggctactatgtgctggagctggtgcccagcgcccagccgggggctgcaagacgccagcagctgccagggaacgccacggactggatctgggccggcctcgacccggacacggactacgacgtggcgctagtgcctgagtccaacgtgcgcctcctgaggccccagatcctgcgggtgcgcacgcggcccggtgaggcagggccgggggcttcgggcccggagtcgggggctgggccggcccccacgcagctcgccgccctccccgccccagaggaggccgggccagagcgcatcgtcatctcccacgcccggccgcgcagcctccgcgtgagttgggccccagcgctgggctcagccgcggcgctcggctaccacgtgcagttcgggccgctgcggggcggggaggcgcagcgggtggaggtgcccgcgggccgcaactgcaccacgctgcagggcctggcgccgggcaccgcctacctggtgaccgtgaccgccgccttccgctcgggccgcgagagcgcgctgtccgccaaggcctgcacgcccgacggcccgcgcccgcgcccacgccccgtgccccgcgccccgaccccggggaccgccagccgtgagccgtaagccggcgtccccgcccagccgagagggccggcgcctacctgagggcccctgtgtcccgaacccggagcggaggcgcccaacccggcagacgggtgcaggcccggcctttccccacgcggactccgcgcgaccccggccctctccctgcggccgcagggcttccccgcctggcgcctgccctccagggctggggcctcgcctggcgggaccccgcagcagccccggccccatccccgcccagagccgggcgtcgtgtgggtccgtgggtgataattgagagcgtcagacccaggactgttcagggaggagccccggtcagactcccacgtgtgaagaccgggccccaagtggcaagggctggcctggggcgggcagcttgggtcctggacgttgataggaagcggaaggggaatcgcgggaagctggcccaggtcaggtccgcaaaggcttctgaagaagaggaagggcgagtaggggcacctggacgctgatggtggccaggatgctcagctggccaggagggcagcacctgctggggacggtggccctgccttcatgcccaggacaccagctgggtccagctagcagccactgggaatcagaggaatggggcagagctgggcattcaggaccttgaggacacgtgaccccacccgcccaccgccactatcaggccccgggaccgcactgacaggaaaccttccgtcgtgagggagcacttcccaggggccgcagggacgacactctccagggaggccccagcaaccacaccatcttcttgctgtgagaggtctcaccccgggctacctcctgtcactactcactgccctggggtccgtgggcaagttgcccagggtgggggtgcctagccaggtgcagtccccgccccgcctagtcctcggcgtcacgcaatgctcacctcgcctcttccccactaacatcccagactttaaaattcagtaaatcagatgtacaccga

SEQ ID NO: 34431 - DNA, 2299 bp, Homo sapiens
agccccgagcgagcggagcgagcgagcgagttgccgagcgcgccccgtccctcgcgcgcgatgctcccctggacggcgctcggcctggccctgagcttgcggctggcgctggcgcggagcggcgcggagcgcggtccaccagcatcagccccccgaggggacctgatgttcctgctggacagctcagccagcgtctctcactacgagttctcccgggttcgggagtttgtggggcagctggtggctccactgcccctgggcaccggggccctgcgtgccagtctggtgcacgtgggcagtcggccatacaccgagttccccttcggccagcacagctcgggtgaggctgcccaggatgcggtgcgtgcttctgcccagcgcatgggtgacacccacactggcctggcgctggtctatgccaaggaacagctgtttgctgaagcatcaggtgcccggccaggggtgcccaaagtgctggtgtgggtgacagatggcggctccagcgaccctgtgggcccccccatgcaggagctcaaggacctgggcgtcaccgtgttcattgtcagcaccggccgaggcaacttcctggagctgtcagccgctgcctcagcccctgccgagaagcacctgcactttgtggacgtggatgacctgcacatcattgtccaagagctgaggggctccattctcgacgcgatgcggccgcagcagctccatgccacggagatcacgtccagcggcttccgcctggcctggccacccctgctgaccgcagactcgggctactatgtgctggagctggtgcccagcgcccagccgggggctgcaagacgccagcagctgccagggaacgccacggactggatctgggccggcctcgacccggacacggactacgacgtggcgctagtgcctgagtccaacgtgcgcctcgcctggcgggaccccgcagcagccccggccccatccccgcccagagccgggcgtcgtgtgggtccgtgggtgataattgagagcgtcagacccaggactgttcagggaggagccccggtcagactcccacgtgtgaagaccgggccccaagtggcaagggctggcctggggcgggcagcttgggtcctggacgttgataggaagcggaaggggaatcgcgggaagctggcgccgggcaccgcctacctggtgaccgtgaccgccgccttccgctcgggccgcgagagcgcgctgtccgccaaggcctgcacgcccgacggcccgcgcccgcgcccacgccccgtgccccgcgccccgaccccggggaccgccagccgtgagccgtaagccggcgtccccgcccagccgagagggccggcgcctacctgagggcccctgtgtcccgaacccggagcggaggcgcccaacccggcagacgggtgcaggcccggcctttccccacgcggactccgcgcgaccccggccctctccctgcggccgcagggcttccccgcctggcgcctgccctccagggctggggcctcgcctggcgggaccccgcagcagccccggccccatccccgcccagagccgggcgtcgtgtgggtccgtgggtgataattgagagcgtcagacccaggactgttcagggaggagccccggtcagactcccacgtgtgaagaccgggccccaagtggcaagggctggcctggggcgggcagcttgggtcctggacgttgataggaagcggaaggggaatcgcgggaagctggcccaggtcaggtccgcaaaggcttctgaagaagaggaagggcgagtaggggcacctggacgctgatggtggccaggatgctcagctggccaggagggcagcacctgctggggacggtggccctgccttcatgcccaggacaccagctgggtccagctagcagccactgggaatcagaggaatggggcagagctgggcattcaggaccttgaggacacgtgaccccacccgcccaccgccactatcaggccccgggaccgcactgacaggaaaccttccgtcgtgagggagcacttcccaggggccgcagggacgacactctccagggaggccccagcaaccacaccatcttcttgctgtgagaggtctcaccccgggctacctcctgtcactactcactgccctggggtccgtgggcaagttgcccagggtgggggtgcctagccaggtgcagtccccgccccgcctagtcctcggcgtcacgcaatgctcacctcgcctcttccccactaacatcccagactttaaaattcagtaaatcagatgtacaccga

SEQ ID NO: 34432 - DNA, 1135 bp, Homo sapiens
caagaattcgacacgaggcgggcacgaggcgccgccttccgctcgggccgcgagagcgcgctgtccgccaaggcctgcacgcccgacggcccgcgcccgcgcccacgccccgtgccccgcgccccgaccccggggaccgccagccgtgagccgtaagccggcgtccccgcccagccgagagggccggcgcctacctgagggcccctgtgtcccgaacccggagcggaggcgcccaacccggcagacgggtgcaggcccggcctttccccacgcggactccgcgcgaccccggccctctccctgcggccgcagggcttccccgcctggcgcctgccctccagggctggggcctcgcctggcgggaccccgcagcagccccggccccatccccgcccagagccgggcgtcgtgtgggtccgtgggtgataattgagagcgtcagacccaggactgttcagggaggagccccggtcagactcccacgtgtgaagaccgggccccaagtggcaagggctggcctggggcgggcagcttgggtcctggacgttgataggaagcggaaggggaatcgcgggaagctggcccaggtcaggtccgcaaaggcttctgaagaagaggaagggcgagtaggggcacctggacgctgatggtggccaggatgctcagctggccaggagggcagcacctgctggggacggtggccctgccttcatgcccaggacaccagctgggtccagctagcagccactgggaatcagaggaatggggcagagctgggcattcaggaccttgaggacacgtgaccccacccgcccaccgccactatcaggccccgggaccgcactgacaggaaaccttccgtcgtgagggagcacttcccaggggccgcagggacgacactctccagggaggccccagcaaccacaccatcttcttgctgtgagaggtctcaccccgggctacctcctgtcactactcactgccctggggtccgtgggcaagttgcccagggtgggggtgcctagccaggtgcagtccccgccccgcctagtcctcggcgtcacgcaatgctcacctcgcctcttccccactaacatcccagactttaaaattcagtaaatcagatgtacaccga

SEQ ID NO: 34433 - DNA, 4267 bp, Homo sapiens
agccccgagcgagcggagcgagcgagcgagttgccgagcgcgccccgtccctcgcgcgcgatgctcccctggacggcgctcggcctggccctgagcttgcggctggcgctggcgcggagcggcgcggagcgcggtccaccagcatcagccccccgaggggacctgatgttcctgctggacagctcagccagcgtctctcactacgagttctcccgggttcgggagtttgtggggcagctggtggctccactgcccctgggcaccggggccctgcgtgccagtctggtgcacgtgggcagtcggccatacaccgagttccccttcggccagcacagctcgggtgaggctgcccaggatgcggtgcgtgcttctgcccagcgcatgggtgacacccacactggcctggcgctggtctatgccaaggaacagctgtttgctgaagcatcaggtgcccggccaggggtgcccaaagtgctggtgtgggtgacagatggcggctccagcgaccctgtgggcccccccatgcaggagctcaaggacctgggcgtcaccgtgttcattgtcagcaccggccgaggcaacttcctggagctgtcagccgctgcctcagcccctgccgagaagcacctgcactttgtggacgtggatgacctgcacatcattgtccaagagctgaggggctccattctcgacgcgatgcggccgcagcagctccatgccacggagatcacgtccagcggcttccgcctggcctggccacccctgctgaccgcagactcgggctactatgtgctggagctggtgcccagcgcccagccgggggctgcaagacgccagcagctgccagggaacgccacggactggatctgggccggcctcgacccggacacggactacgacgtggcgctagtgcctgagtccaacgtgcgcctcctgaggccccagatcctgcgggtgcgcacgcggcccggtgaggcagggccgggggcttcgggcccggagtcgggggctgggccggcccccacgcagctcgccgccctccccgccccagaggaggccgggccagagcgcatcgtcatctcccacgcccggccgcgcagcctccgcgtgagttgggccccagcgctgggctcagccgcggcgctcggctaccacgtgcagttcgggccgctgcggggcggggaggcgcagcgggtggaggtgcccgcgggccgcaactgcaccacgctgcagggcctggcgccgggcaccgcctacctggtgaccgtgaccgccgccttccgctcgggccgcgagagcgcgctgtccgccaaggcctgcacgcccgacggcccgcgcccgcgcccacgccccgtgccccgcgccccgaccccggggaccgccagccgtgagccgtaagccggcgtccccgcccagccgagagggccggcgcctacctgagggcccctgtgtcccgaacccggagcggaggcgcccaacccggcagacgggtgcaggcccggcctttccccacgcggactccgcgcgaccccggccctctccctgcggccgcagggcttccccgcctggcgcctgccctccagggctggggcctcgcctggcgggaccccgcagcagccccggccccatccccgcccagagccgggcgtcgtgtgggtccgtgggtgataattgagagcgtcagacccaggactgttcagggaggagccccggtcagactcccacgtgtgaagaccgggccccaagtggcaagggctggcctggggcgggcagcttgggtcctggacgttgataggaagcggaaggggaatcgcgggaagctggcccaggtcaggtccgcaaaggcttctgaagaagaggaagggcgagtaggggcacctggacgctgatggtggccaggatgctcagctggccaggagggcagcacctgctggggacggtggccctgccttcatgcccaggacaccagctgggtccagctagcagccactgggaatcagaggaatggggcaagttgcccagggtgggggtgcctagccaggtgcagtccccgccccgcctagtcctcggcgtcacgcaatgctcacctcgcctcttccccactaacatcccagactttaaaattcagtaaatcagatgtacaccgagcctgcagtctcgctaggatgctttactcctccacaaacagcagccgccgacaggacagcttgtgaacgtctccgccttttggggtgtccggggagaggaggtggagctgtcccctcccagtgtcaggcctccttggtcctcatgtgcaccttttattcagagagcttgggcccccttcctttggagctgggcccagggcaggtggctggaatgcagaggacaagggggctggggcctctgcagggccattcccaccgcagtctctgccacggcccggagccctgggcccagggccacgcgggctccctctgctggcaaagccacaccctgcaccgcatggggtccactgcccctttccccacgtggactctgcgtgaccccaggaactgcagcattgaggtggtctcagtccctccctcaggtctggtgggcattgtgccaggggccaccttcgggacagctggccttggcaccgtctcccaagaacccagctctgtgcatcccgtggccccaccagaaacccaaggccacaccgcccaccagctgggtgtggtcaccattcatggagggccggctggggccaggctcaccacgcagagtttgccctccggtgtgatgatgcatgagacacagtaggcccccctgcctgtgtgtgcagggggtgtctgtgggggggccctgctggctggactttgggtttctcctgagctccccttagcccccaagtcaggccacggaggcctgagtaggacccatgggctgtgtgtgtcactgcaggtggcgtgctcacaactgcactgctggtcggcaggtggccagggttgcaggcccgggcctcgggccccacctcctctggaggggtaggatctccttcgtgcagcccctgccccctaccctgttctccggagtgttggcagatctgagcccacggtcacgtgagaggagatgcctcttgcacactgagcccaggcccagctcacggagcaccctgcaggtggcagcggggcaccaggggctcattcctggtggcctcagtggcttctgtggacgactcagactcacatgagaagctgggaggagctccagctctgcaatcccgagagggcagagcgggggccctggccacaaccctgctccccacatacccgtctggcagaggctctgcctcccctctgcccatctctgcacaccaaggctgagcacagcacaaggcctcacggagagggtgaaaaggcactgccgtctccatctcagtgccaaggaatgcccctttcagaagccctcgtctgagaagtgctgccccttatgtagccccaggcattttaaaatctttgaatctgcaccaagtctcagaacagctctggccccggagtgctccgtccaggccgctgtgaaccggctgtccccgcgtctcctccacctcccctgacacaatcctggccccgactcagtccacccagggtgcagtgcagaggctgatacccgccaggacttccttgccaagggcccggccacgtcacaaggccactgcacgcttttcgacatgcacctggaaatcgggaagggccatgctgcagttgcttctagttgagacgagaagagcgacaaggttgtgatccacgtggcaggtgttcagaaggctgggggcgggcagcgctggggagagccctgggtacttcgaggagaccccgaagggaggctgctcccacacctgcgccagtttccaccctctctgtgagcagggctgcggtcacctcccacatctgaagagaaccaacctgaggatttcacgctggctgcgtgccagaccagtccctgacaggttgtgcgaggcccttcgctggacagcccattgctggccactggacggagaggcagagggggctgaaattcgggcccatgcctctgtgagcgatgacggagcaacagctctccagcacgtgaagctctccagacagctgttcgtgagaagccagacagaggcctggggtctcagtccagatttctggggagtggggtgtccaagcgtgggccacgctgctgggagccacctagggaagcaggtcgcctgtttctatagtgacggtaataaaccaagtcaattttctatagtgaaaat

SEQ ID NO: 34434 - DNA, 2024 bp, Homo sapiens
agccccgagcgagcggagcgagcgagcgagttgccgagcgcgccccgtccctcgcgcgcgatgctcccctggacggcgctcggcctggccctgagcttgcggctggcgctggcgcggagcggcgcggagcgcggtccaccagcatcagccccccgaggggacctgatgttcctgctggacagctcagccagcgtctctcactacgagttctcccgggttcgggagtttgtggggcagctggtggctccactgcccctgggcaccggggccctgcgtgccagtctggtgcacgtgggcagtcggccatacaccgagttccccttcggccagcacagctcgggtgaggctgcccaggatgcggtgcgtgcttctgcccagcgcatgggtgacacccacactggcctggcgctggtctatgccaaggaacagctgtttgctgaagcatcaggtgcccggccaggggtgcccaaagtgctggtgtgggtgacagatggcggctccagcgaccctgtgggcccccccatgcaggagctcaaggacctgggcgtcaccgtgttcattgtcagcaccggccgaggcaacttcctggagctgtcagccgctgcctcagcccctgccgagaagcacctgcactttgtggacgtggatgacctgcacatcattgtccaagagctgaggggctccattctcgacgcgatgcggccgcagcagctccatgccacggagatcacgtccagcggcttccgcctggcctggccacccctgctgaccgcagactcgggctactatgtgctggagctggtgcccagcgcccagccgggggctgcaagacgccagcagctgccagggaacgccacggactggatctgggccggcctcgacccggacacggactacgacgtggcgctagtgcctgagtccaacgtgcgcctcctgaggccccagatcctgcgggtgcgcacgcggcccggtgaggcagggccgggggcttcgggcccggagtcgggggctgggccggcccccacgcagctcgccgccctccccgccccagaggaggccgggccagagcgcatcgtcatctcccacgcccggccgcgcagcctccgcgtgagttgggccccagcgctgggctcagccgcggcgctcggctaccacgtgcagttcgggccgctgcggggcggggaggcgcagcgggtggaggtgcccgcgggccgcaactgcaccacgctgcagggcctggcgccgggcaccgcctacctggtgaccgtgaccgccgccttccgctcgggccgcgagagcgcgctgtccgccaaggcctgcacgcccgacggcccgcgcccgcgcccacgccccgtgccccgcgccccgaccccggggaccgccagccgtgagccgtaagccggcgtccccgcccagccgagagggccggcgcctacctgagggcccctgtgtcccgaacccggagcggaggcgcccaacccggcagacgggtgcaggcccggcctttccccacgcggactccgcgcgaccccggccctctccctgcggccgcagggcttccccgcctggcgcctgccctccagggctggggcctcgcctggcgggaccccgcagcagccccggccccatccccgcccagagccgggcgtcgtgtgggtccgtgggtgataattgagagcgtcagacccaggactgttcagggaggagccccggtcagactcccacgtgtgaagaccgggccccaagtggcaagggctggcctggggcgggcagcttgggtcctggacgttgataggaagcggaaggggaatcgcgggaagctggcccaggtcaggtccgcaaaggcttctgaagaagaggaagggcgagtaggggcacctggacgctgatggtggccaggatgctcagctggccaggagtgcagtccccgccccgcctagtcctcggcgtcacgcaatgctcacctcgcctcttccccactaacatcccagactttaaaattcagtaaatcagatgtacaccga

SEQ ID NO: 34435 - DNA, 1239 bp, Homo sapiens
agccccgagcgagcggagcgagcgagcgagttgccgagcgcgccccgtccctcgcgcgcgatgctcccctggacggcgctcggcctggccctgagcttgcggctggcgctggcgcggagcggcgcggagcgcggtccaccagcatcagccccccgaggggacctgatgttcctgctggacagctcagccagcgtctctcactacgagttctcccgggttcgggagtttgtggggcagctggtggctccactgcccctgggcaccggggccctgcgtgccagtctggtgcacgtgggcagtcggccatacaccgagttccccttcggccagcacagctcgggtgaggctgcccaggatgcggtgcgtgcttctgcccagcgcatgggtgacacccacactggcctggcgctggtctatgccaaggaacagctgtttgctgaagcatcaggtgcccggccaggggtgcccaaagtgctggtgtgggtgacagatggcggctccagcgaccctgtgggcccccccatgcaggagctcaaggacctgggcgtcaccgtgttcattgtcagcaccggccgaggcaacttcctggagctgtcagccgctgcctcagcccctgccgagaagcacctgcactttgtggacgtggatgacctgcacatcattgtccaagagctgaggggctccattctcgacgcgatgcggccgcagcagctccatgccacggagatcacgtccagcggcttccgcctggcctggccacccctgctgaccgcagactcggggcagcacctgctggggacggtggccctgccttcatgcccaggacaccagctgggtccagctagcagccactgggaatcagaggaatggggcagagctgggcattcaggaccttgaggacacgtgaccccacccgcccaccgccactatcaggccccgggaccgcactgacaggaaaccttccgtcgtgagggagcacttcccaggggccgcagggacgacactctccagggaggccccagcaaccacaccatcttcttgctgtgagaggtctcaccccgggctacctcctgtcactactcactgccctggggtccgtgggcaagttgcccagggtgggggtgcctagccaggtgcagtccccgccccgcctagtcctcggcgtcacgcaatgctcacctcgcctcttccccactaacatcccagactttaaaattcagtaaatcagatgtacaccga

SEQ ID NO: 34436 - DNA, 2725 bp, Homo sapiens
agccccgagcgagcggagcgagcgagcgagttgccgagcgcgccccgtccctcgcgcgcgatgctcccctggacggcgctcggcctggccctgagcttgcggctggcgctggcgcggagcggcgcggagcgcggtccaccagcatcagccccccgaggggacctgatgttcctgctggacagctcagccagcgtctctcactacgagttctcccgggttcgggagtttgtggggcagctggtggctccactgcccctgggcaccggggccctgcgtgccagtctggtgcacgtgggcagtcggccatacaccgagttccccttcggccagcacagctcgggtgaggctgcccaggatgcggtgcgtgcttctgcccagcgcatgggtgacacccacactggcctggcgctggtctatgccaaggaacagctgtttgctgaagcatcaggtgcccggccaggggtgcccaaagtgctggtgtgggtgacagatggcggctccagcgaccctgtgggcccccccatgcaggagctcaaggacctgggcgtcaccgtgttcattgtcagcaccggccgaggcaacttcctggagctgtcagccgctgcctcagcccctgccgagaagcacctgcactttgtggacgtggatgacctgcacatcattgtccaagagctgaggggctccattctcgacgcgatgcggccgcagcagctccatgccacggagatcacgtccagcggcttccgcctggcctggccacccctgctgaccgcagactcgggctactatgtgctggagctggtgcccagcgcccagccgggggctgcaagacgccagcagctgccagggaacgccacggactggatctgggccggcctcgacccggacacggactacgacgtggcgctagtgcctgagtccaacgtgcgcctcctgaggccccagatcctgcgggtgcgcacgcggcccggtgaggcagggccgggggcttcgggcccggagtcgggggctgggccggcccccacgcagctcgccgccctccccgccccagaggaggccgggccagagcgcatcgtcatctcccacgcccggccgcgcagcctccgcgtgagttgggccccagcgctgggctcagccgcggcgctcggctaccacgtgcagttcgggccgctgcggggcggggaggcgcagcgggtggaggtgcccgcgggccgcaactgcaccacgctgcagggcctggcgccgggcaccgcctacctggtgaccgtgaccgccgccttccgctcgggccgcgagagcgcgctgtccgccaaggcctgcacgcccgacggcccgcgcccgcgcccacgccccgtgccccgcgccccgaccccggggaccgccagccgtgagccgtaagccggcgtccccgcccagccgagagggccggcgcctacctgagggcccctgtgtcccgaacccggagcggaggcgcccaacccggcagacgggtgcaggcccggcctttccccacgcggactccgcgcgaccccggccctctccctgcggccgcagggcttccccgcctggcgcctgccctccagggctggggcctcgcctggcgggaccccgcagcagccccggccccatccccgcccagagccgggcgtcgtgtgggtccgtgggtgataattgagagcgtcagacccaggactgttcagggaggagccccggtcagactcccacgtgtgaagaccgggccccaagtggcaagggctggcctggggcgggcagcttgggtcctggacgttgataggaagcggaaggggaatcgcgggaagctggcccaggtcaggtccgcaaaggcttctgaagaagaggaagggcgagtaggggcacctggacgctgatggtggccaggatgctcagctggccaggagggcagcacctgctggggacggtggccctgccttcatgcccaggacaccagctgggtccagctagcagccactgggaatcagaggaatggggcagagctgggcattcaggaccttgaggacacgtgaccccacccgcccaccgccactatcaggccccgggaccgcactgacaggaaaccttccgtcgtgagggagcacttcccaggggccgcagggacgacactctccagggaggccccagcaaccacaccatcttcttgctgtgagaggtctcaccccgggctacctcctgtcactactcactgccctggggtccgtgggcaagttgcccagggtgggggtgcctagccaggtgcagtccccgccccgcctagtcctcggcgtcacgcaatgctcacctcgcctcttccccactaacatcccagactttaaaattcagtaaatcagatgtacaccgaaaaaaaaaaaaaaaaaggaaaaaaaaaaaaaaaaaaaaaaaaaaagcaagttggaggggcgacagccgacacgacgaaagaaaagttcatcagaccaccagtcgacgtgggagcgcgcgaccacacaagatgaagatagcacaacatcgaccacacggtgtgacccaaagagaaagcaaccgggacaccaaaaaacgaggggggagtcacccaccaaaagaaacaaacgccgaggggaaccacgagaggtatgcgaaccaacaccaccgaagagatagtaggcgcacaaacggcggatacaaaccaaggagaccacaagagaccgattgataaatacccccgcgtgta

SEQ ID NO: 34437 - DNA, 1756 bp, Homo sapiens
agccccgagcgagcggagcgagcgagcgagttgccgagcgcgccccgtccctcgcgcgcgatgctcccctggacggcgctcggcctggccctgagcttgcggctggcgctggcgcggagcggcgcggagcgcggtccaccagcatcagccccccgaggggacctgatgttcctgctggacagctcagccagcgtctctcactacgagttctcccgggttcgggagtttgtggggcagctggtggctccactgcccctgggcaccggggccctgcgtgccagtctggtgcacgtgggcagtcggccatacaccgagttccccttcggccagcacagctcgggtgaggctgcccaggatgcggtgcgtgcttctgcccagcgcatgggtgacacccacactggcctggcgctggtctatgccaaggaacagctgtttgctgaagcatcaggtgcccggccaggggtgcccaaagtgctggtgtgggtgacagatggcggctccacgctgggctcagccgcggcgctcggctaccacgtgcagttcgggccgctgcggggcggggaggcgcagcgggtggaggtgcccgcgggccgcaactgcaccacgctgcagggcctggcgccgggcaccgcctacctggtgaccgtgaccgccgccttccgctcgggccgcgagagcgcgctgtccgccaaggcctgcacgcccgacggcccgcgcccgcgcccacgccccgtgccccgcgccccgaccccggggaccgccagccgtgagccgtaagccggcgtccccgcccagccgagagggccggcgcctacctgagggcccctgtgtcccgaacccggagcggaggcgcccaacccggcagacgggtgcaggcccggcctttccccacgcggactccgcgcgaccccggccctctccctgcggccgcagggcttccccgcctggcgcctgccctccagggctggggcctcgcctggcgggaccccgcagcagccccggccccatccccgcccagagccgggcgtcgtgtgggtccgtgggtgataattgagagcgtcagacccaggactgttcagggaggagccccggtcagactcccacgtgtgaagaccgggccccaagtggcaagggctggcctggggcgggcagcttgggtcctggacgttgataggaagcggaaggggaatcgcgggaagctggcccaggtcaggtccgcaaaggcttctgaagaagaggaagggcgagtaggggcacctggacgctgatggtggccaggatgctcagctggccaggagggcagcacctgctggggacggtggccctgccttcatgcccaggacaccagctgggtccagctagcagccactgggaatcagaggaatggggcagagctgggcattcaggaccttgaggacacgtgaccccacccgcccaccgccactatcaggccccgggaccgcactgacaggaaaccttccgtcgtgagggagcacttcccaggggccgcagggacgacactctccagggaggccccagcaaccacaccatcttcttgctgtgagaggtctcaccccgggctacctcctgtcactactcactgccctggggtccgtgggcaagttgcccagggtgggggtgcctagccaggtgcagtccccgccccgcctagtcctcggcgtcacgcaatgctcacctcgcctcttccccactaacatcccagactttaaaattcagtaaatcagatgtacaccga

SEQ ID NO: 34438 - DNA, 2147 bp, Homo sapiens
agccccgagcgagcggagcgagcgagcgagttgccgagcgcgccccgtccctcgcgcgcgatgctcccctggacggcgctcggcctggccctgagcttgcggctggcgctggcgcggagcggcgcggagcgcggtccaccagcatcagccccccgaggggacctgatgttcctgctggacagctcagccagcgtctctcactacgagttctcccgggttcgggagtttgtggggcagctggtggctccactgcccctgggcaccggggccctgcgtgccagtctggtgcacgtgggcagtcggccatacaccgagttccccttcggccagcacagctcgggtgaggctgcccaggatgcggtgcgtgcttctgcccagcgcatgggtgacacccacactggcctggcgctggtctatgccaaggaacagctgtttgctgaagcatcaggtgcccggccaggggtgcccaaagtgctggtgtgggtgacagatggcggctccagcgaccctgtgggcccccccatgcaggagctcaaggacctgggcgtcaccgtgttcattgtcagcaccggccgaggcaacttcctggagctgtcagccgctgcctcagcccctgccgagaagcacctgcactttgtggacgtggatgacctgcacatcattgtccaagagctgaggggctccattctcgacgcgatgcggccgcagcagctccatgccacggagatcacgtccagcggcttccgcctggcctggccacccctgctgaccgcagactcgggctactatgtgctggagctggtgcccagcgcccagccgggggctgcaagacgccagcagctgccagggaacgccacggactggatctgggccggcctcgacccggacacggactacgacgtggcgctagtgcctgagtccaacgtgcgcctcctgaggccccagatcctgcgggtgcgcacgcggcccggtgaggcagggccgggggcttcgggcccggagtcgggggctgggccggcccccacgcagctcgccgccctccccgccccagaggaggccgggccagagcgcatcgtcatctcccacgcccggccgcgcagcctccgcgtgagttgggccccagcgctgggctcagccgcggcgctcggctaccacgtgcagttcgggccgctgcggggcggggaggcgcagcgggtggaggtgcccgcgggccgcaactgcaccacgctgcagggcctggcgccgggcaccgcctacctggtgaccgtgaccgccgccttccgctcgggccgcgagagcgcgctgtccgccaaggcctgcacgcccgacggcccgcgcccgcgcccacgccccgtgccccgcgccccgaccccggggaccgccagccgtgagccgtaagccggcgtccccgcccagccgagagggccggcgcctacctgagggcccctgtgtcccgaacccggagcggaggcgcccaacccggcagacgggtgcaggcccggcctttccccacgcggactccgcgcgaccccggccctctccctgcggccgcagggcttccccgcctggcgcctgccctccagggctggggcctcgcctggcgggaccccgcagcagccccggccccatccccgcccagagccgggcgtcgtgtgggtccgtgggtgataattgagagcgtcagacccaggactgttcagggaggagccccggtcagactcccacgtgtgaagaccgggccccaagtggcaagggctggcctggggcgggcagcttgggtcctggacgttgataggaagcggaaggggaatcgcgggaagctggcccaggtcaggtccgcaaaggcttctgaagaagaggaagggcgagtaggggcacctggacgctgatggtggccaggatgctcagctggccaggagggcagcacctgctggggacggtggccctgccttcatgcccaggacaccagctgggtccagctagcagccactgggaatcagaggaatggggcaagttgcccagggtgggggtgcctagccaggtgcagtccccgccccgcctagtcctcggcgtcacgcaatgctcacctcgcctcttccccactaacatcccagactttaaaattcagtaaatcagatgtacaccga

SEQ ID NO: 34439 - DNA, 624 bp, Homo sapiens
tttaactcttcagagacagggtgatgataatttctgtttagcatttataagatgactcactattagtagtcctatccccatattatttaagctctaaatttcctgtggaaatttagacttggaatatagacttggaaaacccctcaagcgttgcttctcaatgtgctctccatattttctaagagatgcttcttactaagcatatattttattgactaacagcataactatatacacagaataacaaacaccatttatactgtattacttaggatcctttttatggtccttttatcgtttttaattataccacttatctttctaatattttcctatggtgacagattttaatgtagagtatattcagcggggtggcttgagagatcctctgattttcaagaattctgatggactcggaataaagtaagtgttttcagcctggctggatgtagttgcaaaatggcctcgttacacccagggcaataaacagtggtggtattgataacccaaaacaatagtaattgaaaataatttcccactttgttttaaaagtatatgcttttcttttgatacacaagtgtttcatattagaggtaaatgagaaaatatagatgaaccaaaaaa

SEQ ID NO: 34440 - DNA, 562 bp, Homo sapiens
agcaactgtttgctcccttttcctggtcgctctgaccctctctggatactgggttgatccacggaaaaaccgaagacgacgtttgggatttaattattcctctcagctttggaatcttttacttctcacttggacaagaactcaagagcagaatctccgtgttgcaatctggttcctaaggaggaagaggaaggcagccctggagtggtttctttacagtaatttcaacagaagagtgagagatggaacccgaagaagaaaggattcgttacagccagagattgtagagacggggttggctggtcttgaactcgtgacctcaggtgatcctcccgcctccgcctcccaaggtgttgggattacagccgtgagccactgcatctggcctgtctgttcatttcataaacatctgagagggtctttgctacaggacttcaggagcactagcatcgatggtggcagatgaaaaagcagatttttttcccctgaagctctttaataatggcaaaagttaaaaagtgttttctctgtagtcctgaatttactgaatgtattcccttcc

SEQ ID NO: 34441 - DNA, 659 bp, Homo sapiens
caggaagccgcggctgagctgaagggctcgagaaggagcccagagcgctgcacgctgctccctctgggtagtctgaagggtcagagctggactgccctgccctatgtgctctgggagattccagaatattcaagtaaatccggattttcccagaggcagaatatctaactccttcaggagaacttccagtacagaaaacaaaacaaagacgctggggaaacttcaccaagagcctcggcagctccagagcgacgggaaacgaaagattttgctggaggagcttgccaacagcgatcccaagttagccctcactggagttcctatagtacagtggccaaaaagggataagtgtggaatggaaaagagaagaaaggggccgggcatggtggctcacacctgtaatcccagcactttgggaggcccaggcaggtggatcacctgaggtcaggagttcaagaccagcctggccaacatggtgaaacaccgtctgtaccaaaaatacaaaaattaagccaggcgtggtggcatgcgcctataatcccagctacttgcaaggctggggcaggagaatcacttgaacccaggaggcagaggttgcagtgagccgagatcgcaccattgcacttcagcctgggggacaagagcgaaactgtctcaaa

SEQ ID NO: 34442 - DNA, 359 bp, Homo sapiens
tctggtctctgagccaggtagttgtgggacaaagagggcttttgtttagcattttgaaggaaagacggctacaggaattgaatggcagaggaaagctgtgtgtatgtgagcactgtcattatgtccactttcccgacaggttgcaataaattgacagaccagaccctgatctacctacggcgcattgccaacgtcaccttgatcgaccttcgaggatgcaagcagatcactcgaaaagcctgcgagcacttcatctcagacttgtccatcaacagcctctactgcctgtctgacgagaagctgatacagaagatcagctaagacacacccgtactggcccgcacatccgtactggcccg

SEQ ID NO: 34443 - DNA, 299 bp, Homo sapiens
tagcaggcaagaggaagggttacttttatggaaggaaaagattttaatgtagagtatattcagcggggtggcttgagagatcctctgattttcaagaattctgatggactcggaataaaaatgccggatccagacttcactgtgaatgatgtcaaaatgtgtgtggacgacgtttgggattcaattattcctctcagctttggaatctttacttctcacttgacaagactcagagcagatctccgtgttgcctctggttcctaaggaggagaggaagcagcctggagtgttctacagta

SEQ ID NO: 34444 - DNA, 293 bp, Homo sapiens
agcttacagtcctttgatgtgggaagccatagactctgagcattgggggtttagcctttatccagctaaaatattgcctgttgatgttatctatctattttctcttgttatacaatgccatttgcatgcacttatcccccagtcctcccaccctgtgagtcattctctcctatattagaagtaatctttttattagggcaggagtattgttggatttttttgcctaacggcctcttcctccttcttctatcccttggtttaaatttaattaaaaatagtacaatagaaatcct

SEQ ID NO: 34445 - DNA, 6482 bp, Homo sapiens
gtactgaactgggaaagacagcagagcaacagctcaaaatctcgcgtcattctagaagtcaagccaggcacaagggctcatcgggcaaccccaggatggggagaggccaagacaggcgggtcactcgcgcctgcaaccccaggacggggggaggccgagcgggtcactttgaaccctcggaaatccaagagtctgagacctacctaggctacatggggagaccttgtgtctaccaaatatatgctattgaaacttctgaaactaggtttagaagtttcaagagcagaatctccgtgttgcaatctggttcctaaggaggaagaggaaggcagccctggagtggtttctttacagtaatttcaacagaagagtgagagatggaacccgaagaagaaaggattcgttacagccagagattgcgtggtaccatgcgacgacgctatgaagatgatggcatttcagatgatgaaattgaaggaaaaagaacttttgacttggaagagaaactgcacaccaacaaatataatgccaattttgttacttttatggaaggaaaagattttaatgtagagtatattcagcggggtggcttgagagatcctctgattttcaagaattctgatggactcggaataaaaatgccggatccagacttcactgtgaatgatgtcaaaatgtgtgtggggagtcgtcgcatggtggatgtcatggacgtgaacacacagaaaggcattgaaatgaccatggctcagtggacacgctactatgagaccccagaggaggagcgagagaaactctataatgtcatcagcctcgagtttagccacaccaggctggagaatatggtgcagaggccctccacggtggatttcattgactgggtagacaacatgtggccaaggcacttgaaggaaagccagactgaatcaacaaatgccatcttggagatgcagtaccctaaagtgcagaagtactgtctaatgagtgttcgaggctgctatactgacttccatgtggactttggtggtacctctgtttggtatcacatccatcaagggggaaaggtcttctggctcatcccccctacagcccacaacctggagctgtacgagaattggctgctgtcagggaaacagggagacatctttctgggtgaccgggtatcagattgtcagcgcattgagctcaagcagggctataccttcgtcattccctcaggctggattcatgctgtgtatactcctacagacacattagtgtttgggggcaattttttgcatagcttcaacatccctatgcagttaaaaatatacaacattgaagatcggacacgggttccaaataagtttcgctatccattctactatgagatgtgttggtatgtgttggagcgctatgtgtactgcataaccaaccgttcccacctaaccaaggaatttcagaaagagtccctcagcatggatttggagttaaatgggttggagtctgggaatggggatgaggaagcagtggatcgagaaccccgacgcttgagcagcaggcgttctgtcctcactagccctgtagcgaatggagtcaacctggattatgatggactgggcaaaacctgccgaagtcttccaagtctgaagaaaactttggctggggactcatcttctgactgtagccggggctcccacaatggacaagtgtgggatccccagtgtgctccccgaaaggacaggcaagtgcatctgacccattttgagcttgaaggccttcgctgccttgtagataagttggagtctctgccactgcacaagaaatgtgtccccacagggatagaagatgaagatgctctcattgctgatgtaaagattttgctggaggagcttgccaacagcgatcccaagttagccctcactggagttcctatagtacagtggccaaaaagggataagcttaaattccccactcggccaaaggtgcgggttcctaccatccccattacgaagcctcacactatgaaaccagctccacggttaacacctgtgaggccagctgctgcctccccgattgtgtcaggagccagacggagacgagtgcgatgtcgaaaatgcaaagcctgtgtgcaaggagagtgtggtgtttgccactactgcagagacatgaagaagtttggggggcctggacgcatgaagcagtcctgtgtcctccgacagtgcttggcacccagactgcctcactcagtcacatgttccctctgtggagaggtggatcagaatgaagagacacaagactttgagaagaaactcatggaatgctgtatctgcaatgagattgttcatcctggctgcctccagatggacggagaggggttgcttaacgaagaattgccaaattgctgggaatgtccaaagtgctaccaggaggacagctcggagaaagcccagaagcggaaaatggaagagagtgacgaagaagctgtgcaagccaaagtcctgcggcccctgcggagctgcgatgagcctctcacgcccccgcctcattcacccacttccatgctgcagctcatccatgacccggtttccccccggggtatggtgactcggtcatcccctggggctggccccagcgaccaccacagtgccagccgcgatgagcgcttcaaacggcggcagttgctgcggctgcaggccacagagcgcaccatggtacgggaaaaggagaacaatcccagcggcaaaaaggagctgtctgaagttgagaaagccaagatccggggatcgtacctcactgtcacgctacagaggcccaccaaagagctccacgggacatccattgtgcccaagctgcaggccatcacggcctcctctgccaaccttcgccattccccccgtgtgctagtgcagcactgcccagcccgaaccccccagcgtggggatgaggaggggctggggggagaggaggaggaagaggaggaggaggaggaggaagatgacagtgcagaggaggggggtgcagccaggctgaatggccggggcagttgggctcaggatggagacgaaagctggatgcagcgggaggtctggatgtctgtcttccgctacctcagccgcagagaactttgtgaatgtatgcgagtgtgcaagacgtggtataaatggtgctgcgacaagagactttggacaaaaattgacttgagtaggtgtaaggccattgtgccccaggccctcagtggcatcatcaagaggcagccagtcagccttgacctcagttggaccaacatctctaaaaagcaactgacatggctcgtcaataggctgccaggactgaaagacctcctcctagcaggctgctcctggtctgcagtctctgccctcagcacctccagctgcccccttctcaggacccttgatcttcggtgggcagtaggaatcaaggaccctcaaattcgggacttgcttactccaccggctgataaaccaggtcaggacaatcgcagcaagctccggaacatgaccgacttccggctggcaggccttgacatcacagatgccacgcttcgcctcataattcgccacatgcccctcctgtctcgactcgacctcagtcactgcagccaccttacagatcagtcctccaatctactcactgctgtcgggtcttccactcgctactctctcacagagctcaatatggcaggttgcaataaattgacagaccagaccctgatctacctacggcgcattgccaacgtcaccttgatcgaccttcgaggatgcaagcagatcactcgaaaagcctgcgagcacttcatctcagacttgtccatcaacagcctctactgcctgtctgacgagaagctgatacagaagatcagctaagacacacccagcccagattcaacaggaaaccgatcttcccctgactccccaccgaggagagcctctcctcgaccctgcacgggctctgaggccagcgtcacactccctctctgctctcctgtcccttgagcccttcctctacaggtggggcagagagggtggtggacaccaggcttatctgcctgctcctctccctcctaaggaaaagggagtagcagattgatctgaggggaaagcacaggctgtgctgtcgaggcgcctgctcgcttactcgcctgccaggaggccgggctctcagtttggggtgtttgtgcaaccttcatctgcactgggccctgtgcccctcctccccatccatggtccccagcagtgcctggttctgagcaaactcccagggaagaaaacggccctgtctccatggccaggttcttgtggtgtccagtgcgcgtctctcctccatcacactctcccggcttgcgcaggaggggccagcagccccaggagtcccagacccgtgccgatcacactggtgctgttgagatctcccaaacctcacgtccttaactgtgctctccctcctttcctctcccttgagcttggttctgcccagcactcgtgcttgttcacataattaggtttcccaccccagcctacccgacttacttgctagtctctatgaggtccttattgcacttattggggttgaagctcttcagaggagctggaactgtctaccccagggacacacccatttcgttgctacccaagtggattctgagacaggcaccatctccttgttccccctctctcttttgcctcccactgactgcccttttccatgtgtcttcattctgcctgaagaaggctttcccaggatgcacgtcctcagagggagcagcctatctcccccaagctggaggcggcagaggactgggccaagccccaacctgcctcccagccaggctcctccaggcctctggtttagcggagccccctgagcccaggcctgtgtctagccccagtggctcactgaactttcagggcagtcagggggtcctgcttagaagccagtcaccagccctctgcctgcagccatggaagggggtgtgcacgtgcctctgtgtgtgtggctgagtgtattctgcgcgtgtgtgtggagggagggagggaggggagcatggtgtctcccgctccaccgccctttgttgagccccatcagctgcccccttttactttgcattgaacggcctgtccaaagatcctctctctagggcagcagagagctttttgcactttaaaaaaaaaaagaaagaaagaaaggtcggaatttcttttgggtcaatatttttaagtgtgtgaggagatgctcagtagcagcagcctatggcaagagcttataaatgattgatgcaaatttgcactctgctccccctctgtaaggatactgatagcacaacctcttccccccaccccgccccgccttttggtcgtccatccctgtccctttctggccctcttcctgtagcccagtctcaggctttcctcttcctgaagccctacagagttagggaatggagcccaggcaccaggggtctaaagtgtgagccactgagaagagagacgccaactgcacccttgccacttccaaagcaatagaggcagagtggtcccctctttgccacctaggccagttttgaccctggcattaactggccttagaagaaactggatcctggtagggggtggcattttgtttgtttcttccaatctgctgaatcttttgactgcaccttacaaacagcagtctgctcccatgaccctctgcccacttccattggtctccaggccccaataatctggggttgaaactttgaggaaatgccagtgacttattccagagtgcctcagttaggggaacttctctgtaaagaaccctgggtattgagcaaaaaccttattatcgttaatgacctataattggaagcttcctgcctttttctttggttgctcctgtggaaaatactgaaaagattactttgttttattttgttgtctttttataaaaggggaggtggagagaccccttcagagcagggattgtgccgggagagtgcctctgactttgggacatttcatccacagaaatttccaagccaatggtttcttttgggttttggtttttatgtttgttttttggggtttggaaaaacatgcatttttaccgtgcacgtaaattggtcagcagaaaagggagcccagaaaaggcagcagatggaccatgcccttgctgggttttccttttctttgggactgtgaggggaaatggtttttagaggtgagggttggtccatgtggaggaaagaagtgtctctgttgggggacagaggaacctggggagtccatcgcatgtcctacaatctgctcttagacacggccttgccaggagagcctgccctcagactgcaggaccagaacccctgcctccatctttccaagcaccggggcgaaaaaccacaaaggaaaggaagaaaatttatatatatataatataaaatcacttggtgattaaaaaaataactgctccataaataaaactcctaaagtcacttatgttta

SEQ ID NO: 34446 - DNA, 6756 bp, Homo sapiens
agcaactgtttgctcccttttcctggtcgctctgaccctctctggatactgggttgatccacggaaaaaccgaagacgacgtttgggatttaattattcctctcagctttggaatcttttacttctcacttggacaagaactcaagagcagaatctccgtgttgcaatctggttcctaaggaggaagaggaaggcagccctggagtggtttctttacagtaatttcaacagaagagtgagagatggaacccgaagaagaaaggattcgttacagccagagattgcgtggtaccatgcgacgacgctatgaagatgatggcatttcagatgatgaaattgaaggaaaaagaacttttgacttggaagagaaactgcacaccaacaaatataatgccaattttgttacttttatggaaggaaaagattttaatgtagagtatattcagcggggtggcttgagagatcctctgattttcaagaattctgatggactcggaataaaaatgccggatccagacttcactgtgaatgatgtcaaaatgtgtgtggggagtcgtcgcatggtggatgtcatggacgtgaacacacagaaaggcattgaaatgaccatggctcagtggacacgctactatgagaccccagaggaggagcgagagaaactctataatgtcatcagcctcgagtttagccacaccaggctggagaatatggtgcagaggccctccacggtggatttcattgactgggtagacaacatgtggccaaggcacttgaaggaaagccagactgaatcaacaaatgccatcttggagatgcagtaccctaaagtgcagaagtaagtgatgcgccctgcatcttcctccgtgtgctgtgggagaccaaagcaatagcaaggattggcttctcccttacgagctttgctctgtgtcttgaatgattaaaaagatgaattatttaaagatgagactttacagttccacaaggaagagtgtatgtgagcataccatagcacacaaccacacagttaaaggaaaaaaaacttacattttagtcaatacggtagaaaaaaaaaaaacctttttctgataatgtgatgacttgaaaatgcattgctttttctccttctggaacttaagattaagtggaagataaagggagtatataagaggagagtatggcattttggtggggcagatgtacttttttccatcagtacactaatgctgctgctttttttgggtcaggtactgtctaatgagtgttcgaggctgctatactgacttccatgtggactttggtggtacctctgtttggtatcacatccatcaagggggaaaggtcttctggctcatcccccctacagcccacaacctggagctgtacgagaattggctgctgtcagggaaacagggagacatctttctgggtgaccgggtatcagattgtcagcgcattgagctcaagcagggctataccttcgtcattccctcaggctggattcatgctgtgtatactcctacagacacattagtgtttgggggcaattttttgcatagcttcaacatccctatgcagttaaaaatatacaacattgaagatcggacacgggttccaaataagtttcgctatccattctactatgagatgtgttggtatgtgttggagcgctatgtgtactgcataaccaaccgttcccacctaaccaaggaatttcagaaagagtccctcagcatggatttggagttaaatgggttggagtctgggaatggggatgaggaagcagtggatcgagaaccccgacgcttgagcagcaggcgttctgtcctcactagccctgtagcgaatggagtcaacctggattatgatggactgggcaaaacctgccgaagtcttccaagtctgaagaaaactttggctggggactcatcttctgactgtagccggggctcccacaatggacaagtgtgggatccccagtgtgctccccgaaaggacaggcaagtgcatctgacccattttgagcttgaaggccttcgctgccttgtagataagttggagtctctgccactgcacaagaaatgtgtccccacagggatagaagatgaagatgctctcattgctgatgtaaagattttgctggaggagcttgccaacagcgatcccaagttagccctcactggagttcctatagtacagtggccaaaaagggataagcttaaattccccactcggccaaaggtgcgggttcctaccatccccattacgaagcctcacactatgaaaccagctccacggttaacacctgtgaggccagctgctgcctccccgattgtgtcaggagccagacggagacgagtgcgatgtcgaaaatgcaaagcctgtgtgcaaggagagtgtggtgtttgccactactgcagagacatgaagaagtttggggggcctggacgcatgaagcagtcctgtgtcctccgacagtgcttggcacccagactgcctcactcagtcacatgttccctctgtggagaggtggatcagaatgaagagacacaagactttgagaagaaactcatggaatgctgtatctgcaatgagattgttcatcctggctgcctccagatggacggagaggggttgcttaacgaagaattgccaaattgctgggaatgtccaaagtgctaccaggaggacagctcggagaaagcccagaagcggaaaatggaagagagtgacgaagaagctgtgcaagccaaagtcctgcggcccctgcggagctgcgatgagcctctcacgcccccgcctcattcacccacttccatgctgcagctcatccatgacccggtttccccccggggtatggtgactcggtcatcccctggggctggccccagcgaccaccacagtgccagccgcgatgagcgcttcaaacggcggcagttgctgcggctgcaggccacagagcgcaccatggtacgggaaaaggagaacaatcccagcggcaaaaaggagctgtctgaagttgagaaagccaagatccggggatcgtacctcactgtcacgctacagaggcccaccaaagagctccacgggacatccattgtgcccaagctgcaggccatcacggcctcctctgccaaccttcgccattccccccgtgtgctagtgcagcactgcccagcccgaaccccccagcgtggggatgaggaggggctggggggagaggaggaggaagaggaggaggaggaggaggaagatgacagtgcagaggaggggggtgcagccaggctgaatggccggggcagttgggctcaggatggagacgaaagctggatgcagcgggaggtctggatgtctgtcttccgctacctcagccgcagagaactttgtgaatgtatgcgagtgtgcaagacgtggtataaatggtgctgcgacaagagactttggacaaaaattgacttgagtaggtgtaaggccattgtgccccaggccctcagtggcatcatcaagaggcagccagtcagccttgacctcagttggaccaacatctctaaaaagcaactgacatggctcgtcaataggctgccaggactgaaagacctcctcctagcaggctgctcctggtctgcagtctctgccctcagcacctccagctgcccccttctcaggacccttgatcttcggtgggcagtaggaatcaaggaccctcaaattcgggacttgcttactccaccggctgataaaccaggtcaggacaatcgcagcaagctccggaacatgaccgacttccggctggcaggccttgacatcacagatgccacgcttcgcctcataattcgccacatgcccctcctgtctcgactcgacctcagtcactgcagccaccttacagatcagtcctccaatctactcactgctgtcgggtcttccactcgctactctctcacagagctcaatatggcaggttgcaataaattgacagaccagaccctgatctacctacggcgcattgccaacgtcaccttgatcgaccttcgaggatgcaagcagatcactcgaaaagcctgcgagcacttcatctcagacttgtccatcaacagcctctactgcctgtctgacgagaagctgatacagaagatcagctaagacacacccagcccagattcaacaggaaaccgatcttcccctgactccccaccgaggagagcctctcctcgaccctgcacgggctctgaggccagcgtcacactccctctctgctctcctgtcccttgagcccttcctctacaggtggggcagagagggtggtggacaccaggcttatctgcctgctcctctccctcctaaggaaaagggagtagcagattgatctgaggggaaagcacaggctgtgctgtcgaggcgcctgctcgcttactcgcctgccaggaggccgggctctcagtttggggtgtttgtgcaaccttcatctgcactgggccctgtgcccctcctccccatccatggtccccagcagtgcctggttctgagcaaactcccagggaagaaaacggccctgtctccatggccaggttcttgtggtgtccagtgcgcgtctctcctccatcacactctcccggcttgcgcaggaggggccagcagccccaggagtcccagacccgtgccgatcacactggtgctgttgagatctcccaaacctcacgtccttaactgtgctctccctcctttcctctcccttgagcttggttctgcccagcactcgtgcttgttcacataattaggtttcccaccccagcctacccgacttacttgctagtctctatgaggtccttattgcacttattggggttgaagctcttcagaggagctggaactgtctaccccagggacacacccatttcgttgctacccaagtggattctgagacaggcaccatctccttgttccccctctctcttttgcctcccactgactgcccttttccatgtgtcttcattctgcctgaagaaggctttcccaggatgcacgtcctcagagggagcagcctatctcccccaagctggaggcggcagaggactgggccaagccccaacctgcctcccagccaggctcctccaggcctctggtttagcggagccccctgagcccaggcctgtgtctagccccagtggctcactgaactttcagggcagtcagggggtcctgcttagaagccagtcaccagccctctgcctgcagccatggaagggggtgtgcacgtgcctctgtgtgtgtggctgagtgtattctgcgcgtgtgtgtggagggagggagggaggggagcatggtgtctcccgctccaccgccctttgttgagccccatcagctgcccccttttactttgcattgaacggcctgtccaaagatcctctctctagggcagcagagagctttttgcactttaaaaaaaaaaagaaagaaagaaaggtcggaatttcttttgggtcaatatttttaagtgtgtgaggagatgctcagtagcagcagcctatggcaagagcttataaatgattgatgcaaatttgcactctgctccccctctgtaaggatactgatagcacaacctcttccccccaccccgccccgccttttggtcgtccatccctgtccctttctggccctcttcctgtagcccagtctcaggctttcctcttcctgaagccctacagagttagggaatggagcccaggcaccaggggtctaaagtgtgagccactgagaagagagacgccaactgcacccttgccacttccaaagcaatagaggcagagtggtcccctctttgccacctaggccagttttgaccctggcattaactggccttagaagaaactggatcctggtagggggtggcattttgtttgtttcttccaatctgctgaatcttttgactgcaccttacaaacagcagtctgctcccatgaccctctgcccacttccattggtctccaggccccaataatctggggttgaaactttgaggaaatgccagtgacttattccagagtgcctcagttaggggaacttctctgtaaagaaccctgggtattgagcaaaaaccttattatcgttaatgacctataattggaagcttcctgcctttttctttggttgctcctgtggaaaatactgaaaagattactttgttttattttgttgtctttttataaaaggggaggtggagagaccccttcagagcagggattgtgccgggagagtgcctctgactttgggacatttcatccacagaaatttccaagccaatggtttcttttgggttttggtttttatgtttgttttttggggtttggaaaaacatgcatttttaccgtgcacgtaaattggtcagcagaaaagggagcccagaaaaggcagcagatggaccatgcccttgctgggttttccttttctttgggactgtgaggggaaatggtttttagaggtgagggttggtccatgtggaggaaagaagtgtctctgttgggggacagaggaacctggggagtccatcgcatgtcctacaatctgctcttagacacggccttgccaggagagcctgccctcagactgcaggaccagaacccctgcctccatctttccaagcaccggggcgaaaaaccacaaaggaaaggaagaaaatttatatatatataatataaaatcacttggtgattaaaaaaataactgctccataaataaaactcctaaagtcacttatgttta

SEQ ID NO: 34447 - DNA, 6899 bp, Homo sapiens
gtactgaactgggaaagacagcagagcaacagctcaaaatctcgcgtcattctagaagtcaagccaggcacaagggctcatcgggcaaccccaggatggggagaggccaagacaggcgggtcactcgcgcctgcaaccccaggacggggggaggccgagcgggtcactttgaaccctcggaaatccaagagtctgagacctacctaggctacatggggagaccttgtgtctaccaaatatatgctattgaaacttctgaaactaggtttagaagtttcaagagcagaatctccgtgttgcaatctggttcctaaggaggaagaggaaggcagccctggagtggtttctttacagtaatttcaacagaagagtgagagatggaacccgaagaagaaaggattcgttacagccagagattgcgtggtaccatgcgacgacgctatgaagatgatggcatttcagatgatgaaattgaaggaaaaagaacttttgacttggaagagaaactgcacaccaacaaatataatgccaattttgttacttttatggaaggaaaagattttaatgtagagtatattcagcggggtggcttgagagatcctctgattttcaagaattctgatggactcggaataaaaatgccggatccagacttcactgtgaatgatgtcaaaatgtgtgtggggagtcgtcgcatggtggatgtcatggacgtgaacacacagaaaggcattgaaatgaccatggctcagtggacacgctactatgagaccccagaggaggagcgagagaaactctataatgtcatcagcctcgagtttagccacaccaggctggagaatatggtgcagaggccctccacggtggatttcattgactgggtagacaacatgtggccaaggcacttgaaggaaagccagactgaatcaacaaatgccatcttggagatgcagtaccctaaagtgcagaagtactgtctaatgagtgttcgaggctgctatactgacttccatgtggactttggtggtacctctgtttggtatcacatccatcaagggggaaaggtcttctggctcatcccccctacagcccacaacctggagctgtacgagaattggctgctgtcagggaaacagggagacatctttctgggtgaccgggtatcagattgtcagcgcattgagctcaagcagggctataccttcgtcattccctcaggctggattcatgctgtgtatactcctacagacacattagtgtttgggggcaattttttgcatagcttcaacatccctatgcagttaaaaatatacaacattgaagatcggacacgggttccaaataagtttcgctatccattctactatgagatgtgttggtatgtgttggagcgctatgtgtactgcataaccaaccgttcccacctaaccaaggaatttcagaaagagtccctcagcatggatttggagttaaatgggttggagtctgggaatggggatgaggaagcagtggatcgagaaccccgacgcttgagcagcaggcgttctgtcctcactagccctgtagcgaatggagtcaacctggattatgatggactgggcaaaacctgccgaagtcttccaagtctgaagaaaactttggctggggactcatcttctgactgtagccggggctcccacaatggacaagtgtgggatccccagtgtgctccccgaaaggacaggcaagtgcatctgacccattttgagcttgaaggccttcgctgccttgtagataagttggagtctctgccactgcacaagaaatgtgtccccacagggatagaagatgaagatgctctcattgctgatgtaaagattttgctggaggagcttgccaacagcgatcccaagttagccctcactggagttcctatagtacagtggccaaaaagggataagcttaaattccccactcggccaaaggtgcgggttcctaccatccccattacgaagcctcacactatgaaaccagctccacggttaacacctgtgaggccagctgctgcctccccgattgtgtcaggagccagacggagacgagtgcgatgtcgaaaatgcaaagcctgtgtgcaaggagagtgtggtgtttgccactactgcagagacatgaagaagtttggggggcctggacgcatgaagcagtcctgtgtcctccgacagtgcttggcacccagactgcctcactcagtcacatgttccctctgtggagaggtggatcagaatgaagagacacaagactttgagaagaaactcatggaatgctgtatctgcaatgagattgttcatcctggctgcctccagatggacggagaggggttgcttaacgaagaattgccaaattgctgggaatgtccaaagtgctaccaggaggacagctcggagaaagcccagaagcggaaaatggaagagagtgacgaagaagctgtgcaagccaaagtcctgcggcccctgcggagctgcgatgagcctctcacgcccccgcctcattcacccacttccatgctgcagctcatccatgacccggtttccccccggggtatggtgactcggtcatcccctggggctggccccagcgaccaccacagtgccagccgcgatgagcgcttcaaacggcggcagttgctgcggctgcaggccacagagcgcaccatggtacgggaaaaggagaacaatcccagcggcaaaaaggagctgtctgaagttgagaaagccaagatccggggatcgtacctcactgtcacgctacagaggcccaccaaagagctccacgggacatccattgtgcccaagctgcaggccatcacggcctcctctgccaaccttcgccattccccccgtgtgctagtgcagcactgcccagcccgaaccccccagcgtggggatgaggaggggctggggggagaggaggaggaagaggaggaggaggaggaggaagatgacagtgcagaggaggggggtgcagccaggctgaatggccggggcagttgggctcaggatggagacgaaagctggatgcagcgggaggtctggatgtctgtcttccgctacctcagccgcagagaactttgtgaatgtatgcgagtgtgcaagacgtggtataaatggtgctgcgacaagagactttggacaaaaattgacttgagtaggtgtaaggccattgtgccccaggccctcagtggcatcatcaagaggcagccagtcagccttgacctcagttggaccaacatctctaaaaagcaactgacatggctcgtcaataggctgccaggactgaaagacctcctcctagcaggctgctcctggtctgcagtctctgccctcagcacctccagctgcccccttctcaggacccttgatcttcggtgggcagtaggaatcaaggaccctcaaattcgggacttgcttactccaccggctgataaaccaggtcaggacaatcgcagcaagctccggaacatgaccgacttccggctggcaggccttgacatcacagatgccacgcttcgcctcataattcgccacatgcccctcctgtctcgactcgacctcagtcactgcagccaccttacagatcagtcctccaatctactcactgctgtcgggtcttccactcgctactctctcacagagctcaatatggcaggttgcaataaattgacagaccagaccctgatctacctacggcgcattgccaacgtcaccttgatcgaccttcgaggatgcaagcagatcactcgaaaagcctgcgagcacttcatctcagacttgtccatcaacagcctctactgcctgtctgacgagaagctgatacagaagatcagctaagacacacccagcccagattcaacaggaaaccgatcttcccctgactccccaccgaggagagcctctcctcgaccctgcacgggctctgaggccagcgtcacactccctctctgctctcctgtcccttgagcccttcctctacaggtggggcagagagggtggtggacaccaggcttatctgcctgctcctctccctcctaaggaaaagggagtagcagattgatctgaggggaaagcacaggctgtgctgtcgaggcgcctgctcgcttactcgcctgccaggaggccgggctctcagtttggggtgtttgtgcaaccttcatctgcactgggccctgtgcccctcctccccatccatggtccccagcagtgcctggttctgagcaaactcccagggaagaaaacggccctgtctccatggccaggttcttgtggtgtccagtgcgcgtctctcctccatcacactctcccggcttgcgcaggaggggccagcagccccaggagtcccagacccgtgccgatcacactggtgctgttgagatctcccaaacctcacgtccttaactgtgctctccctcctttcctctcccttgagcttggttctgcccagcactcgtgcttgttcacataattaggtttcccaccccagcctacccgacttacttgctagtctctatgaggtccttattgcacttattggggttgaagctcttcagaggagctggaactgtctaccccagggacacacccatttcgttgctacccaagtggattctgagacaggcaccatctccttgttccccctctctcttttgcctcccactgactgcccttttccatgtgtcttcattctgcctgaagaaggctttcccaggatgcacgtcctcagagggagcagcctatctcccccaagctggaggcggcagaggactgggccaagccccaacctgcctcccagccaggctcctccaggcctctggtttagcggagccccctgagcccaggcctgtgtctagccccagtggctcactgaactttcagggcagtcagggggtcctgcttagaagccagtcaccagccctctgcctgcagccatggaagggggtgtgcacgtgcctctgtgtgtgtggctgagtgtattctgcgcgtgtgtgtggagggagggagggaggggagcatggtgtctcccgctccaccgccctttgttgagccccatcagctgcccccttttactttgcattgaacggcctgtccaaagatcctctctctagggcagcagagagctttttgcactttaaaaaaaaaaagaaagaaagaaaggtcggaatttcttttgggtcaatatttttaagtgtgtgaggagatgctcagtagcagcagcctatggcaagagcttataaatgattgatgcaaatttgcactctgctccccctctgtaaggatactgatagcacaacctcttccccccaccccgccccgccttttggtcgtccatccctgtccctttctggccctcttcctgtagcccagtctcaggctttcctcttcctgaagccctacagagttagggaatggagcccaggcaccaggggtctaaagtgtgagccactgagaagagagacgccaactgcacccttgccacttccaaagcaatagaggcagagtggtcccctctttgccacctaggccagttttgaccctggcattaactggccttagaagaaactggatcctggtagggggtggcattttgtttgtttcttccaatctgctgaatcttttgactgcaccttacaaacagcagtctgctcccatgaccctctgcccacttccattggtctccaggccccaataatctggggttgaaactttgaggaaatgccagtgacttattccagagtgcctcagttaggggaacttctctgtaaagaaccctgggtattgagcaaaaaccttattatcgttaatgacctataattggaagcttcctgcctttttctttggttgctcctgtggaaaatactgaaaagattactttgttttattttgttgtctttttataaaaggggaggtggagagaccccttcagagcagggattgtgccgggagagtgcctctgactttgggacatttcatccacagaaatttccaagccaatggtttcttttgggttttggtttttatgtttgttttttggggtttggaaaaacatgcatttttaccgtgcacgtaaattggtcagcagaaaagggagcccagaaaaggcagcagatggaccatgcccttgctgggttttccttttctttgggactgtgaggggaaatggtttttagaggtgagggttggtccatgtggaggaaagaagtgtctctgttgggggacagaggaacctggggagtccatcgcatgtcctacaatctgctcttagacacggccttgccaggagagcctgccctcagactgcaggaccagaacccctgcctccatctttccaagcaccggggcgaaaaaccacaaaggaaaggaagaaaatttatatatatataatataaaatcacttggtgattaaaaaaataactgctccataaataaaactcctaaagtcacttatgtttaaagggtttggttgtgttttttgtttttcggagaaatattgtaaatatatatttttttgttgctgatttagagtcaatctccaatgttgtgctaaaaagtttaaattaaatgtaagcattaaggggataagtcttatgctatctcagttgacacattgaggttattttgggccagagaaggaggaagctagttggactttgttttgttttccaaaagttctccactattggttttagagagagcaaggacatctttcctctgacacgtgggaatgggtgatatttgtgtaataaaatttttaaaagacaaaaaaagaaatagcctccaatgggaaatattttaatttaggttttgtttttgtttgggggtttttgtttttttaaaaaaataaaaaggctttaaaaacaaaaaataaac

SEQ ID NO: 34448 - DNA, 5690 bp, Homo sapiens
agcgggtcgtggagctggatactggctatgatgtggcctcgatcgctctacaatagccacaccaggctggagaatatggtgcagaggccctccacggtggatttcattgactgggtagacaacatgtggccaaggcacttgaaggaaagccagactgaatcaacaaatgccatcttggagatgcagtaccctaaagtgcagaagtactgtctaatgagtgttcgaggctgctatactgacttccatgtggactttggtggtacctctgtttggtatcacatccatcaagggggaaagcccacaacctggagctgtacgagaattggctgctgtcagggaaacagggagacatctttctgggtgaccgggtatcagattgtcagcgcattgagctcaagcagggctataccttcgtcattccctcaggctggattcatgctgtgtatactcctacagacacattagtgtttgggggcaattttttgcatagcttcaacatccctatgcagttaaaaatatacaacattgaagatcggacacgggttccaaataagtttcgctatccattctactatgagatgtgttggtatgtgttggagcgctatgtgtactgcataaccaaccgttcccacctaaccaaggaatttcagaaagagtccctcagcatggatttggagttaaatgggttggagtctgggaatggggatgaggaagcagtggatcgagaaccccgacgcttgagcagcaggcgttctgtcctcactagccctgtagcgaatggagtcaacctggattatgatggactgggcaaaacctgccgaagtcttccaagtctgaagaaaactttggctggggactcatcttctgactgtagccggggctcccacaatggacaagtgtgggatccccagtgtgctccccgaaaggacaggcaagtgcatctgacccattttgagcttgaaggccttcgctgccttgtagataagttggagtctctgccactgcacaagaaatgtgtccccacagggatagaagatgaagatgctctcattgctgatgtaaagattttgctggaggagcttgccaacagcgatcccaagttagccctcactggagttcctatagtacagtggccaaaaagggataagcttaaattccccactcggccaaaggtgcgggttcctaccatccccattacgaagcctcacactatgaaaccagctccacggttaacacctgtgaggccagctgctgcctccccgattgtgtcaggagccagacggagacgagtgcgatgtcgaaaatgcaaagcctgtgtgcaaggagagtgtggtgtttgccactactgcagagacatgaagaagtttggggggcctggacgcatgaagcagtcctgtgtcctccgacagtgcttggcacccagactgcctcactcagtcacatgttccctctgtggagaggtggatcagaatgaagagacacaagactttgagaagaaactcatggaatgctgtatctgcaatgagattgttcatcctggctgcctccagatggacggagaggggttgcttaacgaagaattgccaaattgctgggaatgtccaaagtgctaccaggaggacagctcggagaaagcccagaagcggaaaatggaagagagtgacgaagaagctgtgcaagccaaagtcctgcggcccctgcggagctgcgatgagcctctcacgcccccgcctcattcacccacttccatgctgcagctcatccatgacccggtttccccccggggtatggtgactcggtcatcccctggggctggccccagcgaccaccacagtgccagccgcgatgagcgcttcaaacggcggcagttgctgcggctgcaggccacagagcgcaccatggtacgggaaaaggagaacaatcccagcggcaaaaaggagctgtctgaagttgagaaagccaagatccggggatcgtacctcactgtcacgctacagaggcccaccaaagagctccacgggacatccattgtgcccaagctgcaggccatcacggcctcctctgccaaccttcgccattccccccgtgtgctagtgcagcactgcccagcccgaaccccccagcgtggggatgaggaggggctggggggagaggaggaggaagaggaggaggaggaggaggaagatgacagtgcagaggaggggggtgcagccaggctgaatggccggggcagttgggctcaggatggagacgaaagctggatgcagcgggaggtctggatgtctgtcttccgctacctcagccgcagagaactttgtgaatgtatgcgagtgtgcaagacgtggtataaatggtgctgcgacaagagactttggacaaaaattgacttgagtaggtgtaaggccattgtgccccaggccctcagtggcatcatcaagaggcagccagtcagccttgacctcagttggaccaacatctctaaaaagcaactgacatggctcgtcaataggctgccaggactgaaagacctcctcctagcaggctgctcctggtctgcagtctctgccctcagcacctccagctgcccccttctcaggacccttgatcttcggtgggcagtaggaatcaaggaccctcaaattcgggacttgcttactccaccggctgataaaccaggtcaggacaatcgcagcaagctccggaacatgaccgacttccggctggcaggccttgacatcacagatgccacgcttcgcctcataattcgccacatgcccctcctgtctcgactcgacctcagtcactgcagccaccttacagatcagtcctccaatctactcactgctgtcgggtcttccactcgctactctctcacagagctcaatatggcaggttgcaataaattgacagaccagaccctgatctacctacggcgcattgccaacgtcaccttgatcgaccttcgaggatgcaagcagatcactcgaaaagcctgcgagcacttcatctcagacttgtccatcaacagcctctactgcctgtctgacgagaagctgatacagaagatcagctaagacacacccagcccagattcaacaggaaaccgatcttcccctgactccccaccgaggagagcctctcctcgaccctgcacgggctctgaggccagcgtcacactccctctctgctctcctgtcccttgagcccttcctctacaggtggggcagagagggtggtggacaccaggcttatctgcctgctcctctccctcctaaggaaaagggagtagcagattgatctgaggggaaagcacaggctgtgctgtcgaggcgcctgctcgcttactcgcctgccaggaggccgggctctcagtttggggtgtttgtgcaaccttcatctgcactgggccctgtgcccctcctccccatccatggtccccagcagtgcctggttctgagcaaactcccagggaagaaaacggccctgtctccatggccaggttcttgtggtgtccagtgcgcgtctctcctccatcacactctcccggcttgcgcaggaggggccagcagccccaggagtcccagacccgtgccgatcacactggtgctgttgagatctcccaaacctcacgtccttaactgtgctctccctcctttcctctcccttgagcttggttctgcccagcactcgtgcttgttcacataattaggtttcccaccccagcctacccgacttacttgctagtctctatgaggtccttattgcacttattggggttgaagctcttcagaggagctggaactgtctaccccagggacacacccatttcgttgctacccaagtggattctgagacaggcaccatctccttgttccccctctctcttttgcctcccactgactgcccttttccatgtgtcttcattctgcctgaagaaggctttcccaggatgcacgtcctcagagggagcagcctatctcccccaagctggaggcggcagaggactgggccaagccccaacctgcctcccagccaggctcctccaggcctctggtttagcggagccccctgagcccaggcctgtgtctagccccagtggctcactgaactttcagggcagtcagggggtcctgcttagaagccagtcaccagccctctgcctgcagccatggaagggggtgtgcacgtgcctctgtgtgtgtggctgagtgtattctgcgcgtgtgtgtggagggagggagggaggggagcatggtgtctcccgctccaccgccctttgttgagccccatcagctgcccccttttactttgcattgaacggcctgtccaaagatcctctctctagggcagcagagagctttttgcactttaaaaaaaaaaagaaagaaagaaaggtcggaatttcttttgggtcaatatttttaagtgtgtgaggagatgctcagtagcagcagcctatggcaagagcttataaatgattgatgcaaatttgcactctgctccccctctgtaaggatactgatagcacaacctcttccccccaccccgccccgccttttggtcgtccatccctgtccctttctggccctcttcctgtagcccagtctcaggctttcctcttcctgaagccctacagagttagggaatggagcccaggcaccaggggtctaaagtgtgagccactgagaagagagacgccaactgcacccttgccacttccaaagcaatagaggcagagtggtcccctctttgccacctaggccagttttgaccctggcattaactggccttagaagaaactggatcctggtagggggtggcattttgtttgtttcttccaatctgctgaatcttttgactgcaccttacaaacagcagtctgctcccatgaccctctgcccacttccattggtctccaggccccaataatctggggttgaaactttgaggaaatgccagtgacttattccagagtgcctcagttaggggaacttctctgtaaagaaccctgggtattgagcaaaaaccttattatcgttaatgacctataattggaagcttcctgcctttttctttggttgctcctgtggaaaatactgaaaagattactttgttttattttgttgtctttttataaaaggggaggtggagagaccccttcagagcagggattgtgccgggagagtgcctctgactttgggacatttcatccacagaaatttccaagccaatggtttcttttgggttttggtttttatgtttgttttttggggtttggaaaaacatgcatttttaccgtgcacgtaaattggtcagcagaaaagggagcccagaaaaggcagcagatggaccatgcccttgctgggttttccttttctttgggactgtgaggggaaatggtttttagaggtgagggttggtccatgtggaggaaagaagtgtctctgttgggggacagaggaacctggggagtccatcgcatgtcctacaatctgctcttagacacggccttgccaggagagcctgccctcagactgcaggaccagaacccctgcctccatctttccaagcaccggggcgaaaaaccacaaaggaaaggaagaaaatttatatatatataatataaaatcacttggtgattaaaaaaataactgctccataaataaaactcctaaagtcacttatgttta

SEQ ID NO: 34449 - DNA, 5422 bp, Homo sapiens
gaggtctgcttgagcccaggagtttgagaccatcctgacctcaagtgatccacccgtctgggcctcccaagtaccctttatcttcagtgattgtttctcaagaccaacgttttctaagttgatggttctgcttaagtttttgcttcagatgccaagctgggtttgcaggttgactggtgagagtatttcctgggttaatgattacagtaattccatttgttgtactctctttccttgaaaatcgtcatcttttctctattttattcctctgtaggttccaaataagtttcgctatccattctactatgagatgtgttggtatgtgttggagcgctatgtgtactgcataaccaaccgttcccacctaaccaaggaatttcagaaagagtccctcagcatggatttggagttaaatgggttggagtctgggaatggggatgaggaagcagtggatcgagaaccccgacgcttgagcagcaggcgttctgtcctcactagccctgtagcgaatggagtcaacctggattatgatggactgggcaaaacctgccgaagtcttccaagtctgaagaaaactttggctggggactcatcttctgactgtagccggggctcccacaatggacaagtgtgggatccccagtgtgctccccgaaaggacaggcaagtgcatctgacccattttgagcttgaaggccttcgctgccttgtagataagttggagtctctgccactgcacaagaaatgtgtccccacagggatagaagatgaagatgctctcattgctgatgtaaagattttgctggaggagcttgccaacagcgatcccaagttagccctcactggagttcctatagtacagtggccaaaaagggataagcttaaattccccactcggccaaaggtgcgggttcctaccatccccattacgaagcctcacactatgaaaccagctccacggttaacacctgtgaggccagctgctgcctccccgattgtgtcaggagccagacggagacgagtgcgatgtcgaaaatgcaaagcctgtgtgcaaggagagtgtggtgtttgccactactgcagagacatgaagaagtttggggggcctggacgcatgaagcagtcctgtgtcctccgacagtgcttggcacccagactgcctcactcagtcacatgttccctctgtggagaggtggatcagaatgaagagacacaagactttgagaagaaactcatggaatgctgtatctgcaatgagattgttcatcctggctgcctccagatggacggagaggggttgcttaacgaagaattgccaaattgctgggaatgtccaaagtgctaccaggaggacagctcggagaaagcccagaagcggaaaatggaagagagtgacgaagaagctgtgcaagccaaagtcctgcggcccctgcggagctgcgatgagcctctcacgcccccgcctcattcacccacttccatgctgcagctcatccatgacccggtttccccccggggtatggtgactcggtcatcccctggggctggccccagcgaccaccacagtgccagccgcgatgagcgcttcaaacggcggcagttgctgcggctgcaggccacagagcgcaccatggtacgggaaaaggagaacaatcccagcggcaaaaaggagctgtctgaagttgagaaagccaagatccggggatcgtacctcactgtcacgctacagaggcccaccaaagagctccacgggacatccattgtgcccaagctgcaggccatcacggcctcctctgccaaccttcgccattccccccgtgtgctagtgcagcactgcccagcccgaaccccccagcgtggggatgaggaggggctggggggagaggaggaggaagaggaggaggaggaggaggaagatgacagtgcagaggaggggggtgcagccaggctgaatggccggggcagttgggctcaggatggagacgaaagctggatgcagcgggaggtctggatgtctgtcttccgctacctcagccgcagagaactttgtgaatgtatgcgagtgtgcaagacgtggtataaatggtgctgcgacaagagactttggacaaaaattgacttgagtaggtgtaaggccattgtgccccaggccctcagtggcatcatcaagaggcagccagtcagccttgacctcagttggaccaacatctctaaaaagcaactgacatggctcgtcaataggctgccaggactgaaagacctcctcctagcaggctgctcctggtctgcagtctctgccctcagcacctccagctgcccccttctcaggacccttgatcttcggtgggcagtaggaatcaaggaccctcaaattcgggacttgcttactccaccggctgataaaccaggtcaggacaatcgcagcaagctccggaacatgaccgacttccggctggcaggccttgacatcacagatgccacgcttcgcctcataattcgccacatgcccctcctgtctcgactcgacctcagtcactgcagccaccttacagatcagtcctccaatctactcactgctgtcgggtcttccactcgctactctctcacagagctcaatatggcaggttgcaataaattgacagaccagaccctgatctacctacggcgcattgccaacgtcaccttgatcgaccttcgaggatgcaagcagatcactcgaaaagcctgcgagcacttcatctcagacttgtccatcaacagcctctactgcctgtctgacgagaagctgatacagaagatcagctaagacacacccagcccagattcaacaggaaaccgatcttcccctgactccccaccgaggagagcctctcctcgaccctgcacgggctctgaggccagcgtcacactccctctctgctctcctgtcccttgagcccttcctctacaggtggggcagagagggtggtggacaccaggcttatctgcctgctcctctccctcctaaggaaaagggagtagcagattgatctgaggggaaagcacaggctgtgctgtcgaggcgcctgctcgcttactcgcctgccaggaggccgggctctcagtttggggtgtttgtgcaaccttcatctgcactgggccctgtgcccctcctccccatccatggtccccagcagtgcctggttctgagcaaactcccagggaagaaaacggccctgtctccatggccaggttcttgtggtgtccagtgcgcgtctctcctccatcacactctcccggcttgcgcaggaggggccagcagccccaggagtcccagacccgtgccgatcacactggtgctgttgagatctcccaaacctcacgtccttaactgtgctctccctcctttcctctcccttgagcttggttctgcccagcactcgtgcttgttcacataattaggtttcccaccccagcctacccgacttacttgctagtctctatgaggtccttattgcacttattggggttgaagctcttcagaggagctggaactgtctaccccagggacacacccatttcgttgctacccaagtggattctgagacaggcaccatctccttgttccccctctctcttttgcctcccactgactgcccttttccatgtgtcttcattctgcctgaagaaggctttcccaggatgcacgtcctcagagggagcagcctatctcccccaagctggaggcggcagaggactgggccaagccccaacctgcctcccagccaggctcctccaggcctctggtttagcggagccccctgagcccaggcctgtgtctagccccagtggctcactgaactttcagggcagtcagggggtcctgcttagaagccagtcaccagccctctgcctgcagccatggaagggggtgtgcacgtgcctctgtgtgtgtggctgagtgtattctgcgcgtgtgtgtggagggagggagggaggggagcatggtgtctcccgctccaccgccctttgttgagccccatcagctgcccccttttactttgcattgaacggcctgtccaaagatcctctctctagggcagcagagagctttttgcactttaaaaaaaaaaagaaagaaagaaaggtcggaatttcttttgggtcaatatttttaagtgtgtgaggagatgctcagtagcagcagcctatggcaagagcttataaatgattgatgcaaatttgcactctgctccccctctgtaaggatactgatagcacaacctcttccccccaccccgccccgccttttggtcgtccatccctgtccctttctggccctcttcctgtagcccagtctcaggctttcctcttcctgaagccctacagagttagggaatggagcccaggcaccaggggtctaaagtgtgagccactgagaagagagacgccaactgcacccttgccacttccaaagcaatagaggcagagtggtcccctctttgccacctaggccagttttgaccctggcattaactggccttagaagaaactggatcctggtagggggtggcattttgtttgtttcttccaatctgctgaatcttttgactgcaccttacaaacagcagtctgctcccatgaccctctgcccacttccattggtctccaggccccaataatctggggttgaaactttgaggaaatgccagtgacttattccagagtgcctcagttaggggaacttctctgtaaagaaccctgggtattgagcaaaaaccttattatcgttaatgacctataattggaagcttcctgcctttttctttggttgctcctgtggaaaatactgaaaagattactttgttttattttgttgtctttttataaaaggggaggtggagagaccccttcagagcagggattgtgccgggagagtgcctctgactttgggacatttcatccacagaaatttccaagccaatggtttcttttgggttttggtttttatgtttgttttttggggtttggaaaaacatgcatttttaccgtgcacgtaaattggtcagcagaaaagggagcccagaaaaggcagcagatggaccatgcccttgctgggttttccttttctttgggactgtgaggggaaatggtttttagaggtgagggttggtccatgtggaggaaagaagtgtctctgttgggggacagaggaacctggggagtccatcgcatgtcctacaatctgctcttagacacggccttgccaggagagcctgccctcagactgcaggaccagaacccctgcctccatctttccaagcaccggggcgaaaaaccacaaaggaaaggaagaaaatttatatatatataatataaaatcacttggtgattaaaaaaataactgctccataaataaaactcctaaagtcacttatgttta

SEQ ID NO: 34450 - DNA, 5251 bp, Homo sapiens
gccattgataatacatacacaagatgagttgtgtgtcaataaaatttattctagaaacaagcagtgggcagatctggccatagtgggccaagccccaggctaggtatgctaccatgtaatcttctaccctatccagtcttaaagcaacctgatatatttgacctcactgctttctctttccagcttaaattccccactcggccaaaggtgcgggttcctaccatccccattacgaagcctcacactatgaaaccagctccacggttaacacctgtgaggccagctgctgcctccccgattgtgtcaggagccagacggagacgagtgcgatgtcgaaaatgcaaagcctgtgtgcaaggagagtgtggtgtttgccactactgcagagacatgaagaagtttggggggcctggacgcatgaagcagtcctgtgtcctccgacagtgcttggcagtgagtgatctgctgggtaaagaattttggggaggggtggcagtgccaaaggaactgaaatacatatagtgtagagttaaagagacttcagagttggaaagaaaaggtttatactctctttttggctttattttgtaccttttttccccaggtttagatagaaggtatctagtactaaaaatccgatttaatctttaggctttacctaattttcaaacaagagattagcatttgaagggcaaatcattgctttctttcccctcttcaggtagattagaaaggaccggggaggccaagtataggccaactgaaaataaactagtctctggtgcccaggtggttgagtcctcctcttccccagtcatttttcctacccaaaacctccgttctctccaccctgcctccatgcttccaggtgtttagtagagaattataggacccaaatctcccatcttcagtttaagggaaactgaaatgataaagatctgagtcagttctcttggattctatctttgtcctcttgtagcccagactgcctcactcagtcacatgttccctctgtggagaggtggatcagaatgaagagacacaagactttgagaagaaactcatggaatgctgtatctgcaatgagattgttcatcctggctgcctccagatggacggagaggggttgcttaacgaagaattgccaaattgctgggaatgtccaaagtgctaccaggaggacagctcggagaaagcccagaagcggaaaatggaagagagtgacgaagaagctgtgcaagccaaagtcctgcggcccctgcggagctgcgatgagcctctcacgcccccgcctcattcacccacttccatgctgcagctcatccatgacccggtttccccccggggtatggtgactcggtcatcccctggggctggccccagcgaccaccacagtgccagccgcgatgagcgcttcaaacggcggcagttgctgcggctgcaggccacagagcgcaccatggtacgggaaaaggagaacaatcccagcggcaaaaaggagctgtctgaagttgagaaagccaagatccggggatcgtacctcactgtcacgctacagaggcccaccaaagagctccacgggacatccattgtgcccaagctgcaggccatcacggcctcctctgccaaccttcgccattccccccgtgtgctagtgcagcactgcccagcccgaaccccccagcgtggggatgaggaggggctggggggagaggaggaggaagaggaggaggaggaggaggaagatgacagtgcagaggaggggggtgcagccaggctgaatggccggggcagttgggctcaggatggagacgaaagctggatgcagcgggaggtctggatgtctgtcttccgctacctcagccgcagagaactttgtgaatgtatgcgagtgtgcaagacgtggtataaatggtgctgcgacaagagactttggacaaaaattgacttgagtaggtgtaaggccattgtgccccaggccctcagtggcatcatcaagaggcagccagtcagccttgacctcagttggaccaacatctctaaaaagcaactgacatggctcgtcaataggctgccaggactgaaagacctcctcctagcaggctgctcctggtctgcagtctctgccctcagcacctccagctgcccccttctcaggacccttgatcttcggtgggcagtaggaatcaaggaccctcaaattcgggacttgcttactccaccggctgataaaccaggtcaggacaatcgcagcaagctccggaacatgaccgacttccggctggcaggccttgacatcacagatgccacgcttcgcctcataattcgccacatgcccctcctgtctcgactcgacctcagtcactgcagccaccttacagatcagtcctccaatctactcactgctgtcgggtcttccactcgctactctctcacagagctcaatatggcaggttgcaataaattgacagaccagaccctgatctacctacggcgcattgccaacgtcaccttgatcgaccttcgaggatgcaagcagatcactcgaaaagcctgcgagcacttcatctcagacttgtccatcaacagcctctactgcctgtctgacgagaagctgatacagaagatcagctaagacacacccagcccagattcaacaggaaaccgatcttcccctgactccccaccgaggagagcctctcctcgaccctgcacgggctctgaggccagcgtcacactccctctctgctctcctgtcccttgagcccttcctctacaggtggggcagagagggtggtggacaccaggcttatctgcctgctcctctccctcctaaggaaaagggagtagcagattgatctgaggggaaagcacaggctgtgctgtcgaggcgcctgctcgcttactcgcctgccaggaggccgggctctcagtttggggtgtttgtgcaaccttcatctgcactgggccctgtgcccctcctccccatccatggtccccagcagtgcctggttctgagcaaactcccagggaagaaaacggccctgtctccatggccaggttcttgtggtgtccagtgcgcgtctctcctccatcacactctcccggcttgcgcaggaggggccagcagccccaggagtcccagacccgtgccgatcacactggtgctgttgagatctcccaaacctcacgtccttaactgtgctctccctcctttcctctcccttgagcttggttctgcccagcactcgtgcttgttcacataattaggtttcccaccccagcctacccgacttacttgctagtctctatgaggtccttattgcacttattggggttgaagctcttcagaggagctggaactgtctaccccagggacacacccatttcgttgctacccaagtggattctgagacaggcaccatctccttgttccccctctctcttttgcctcccactgactgcccttttccatgtgtcttcattctgcctgaagaaggctttcccaggatgcacgtcctcagagggagcagcctatctcccccaagctggaggcggcagaggactgggccaagccccaacctgcctcccagccaggctcctccaggcctctggtttagcggagccccctgagcccaggcctgtgtctagccccagtggctcactgaactttcagggcagtcagggggtcctgcttagaagccagtcaccagccctctgcctgcagccatggaagggggtgtgcacgtgcctctgtgtgtgtggctgagtgtattctgcgcgtgtgtgtggagggagggagggaggggagcatggtgtctcccgctccaccgccctttgttgagccccatcagctgcccccttttactttgcattgaacggcctgtccaaagatcctctctctagggcagcagagagctttttgcactttaaaaaaaaaaagaaagaaagaaaggtcggaatttcttttgggtcaatatttttaagtgtgtgaggagatgctcagtagcagcagcctatggcaagagcttataaatgattgatgcaaatttgcactctgctccccctctgtaaggatactgatagcacaacctcttccccccaccccgccccgccttttggtcgtccatccctgtccctttctggccctcttcctgtagcccagtctcaggctttcctcttcctgaagccctacagagttagggaatggagcccaggcaccaggggtctaaagtgtgagccactgagaagagagacgccaactgcacccttgccacttccaaagcaatagaggcagagtggtcccctctttgccacctaggccagttttgaccctggcattaactggccttagaagaaactggatcctggtagggggtggcattttgtttgtttcttccaatctgctgaatcttttgactgcaccttacaaacagcagtctgctcccatgaccctctgcccacttccattggtctccaggccccaataatctggggttgaaactttgaggaaatgccagtgacttattccagagtgcctcagttaggggaacttctctgtaaagaaccctgggtattgagcaaaaaccttattatcgttaatgacctataattggaagcttcctgcctttttctttggttgctcctgtggaaaatactgaaaagattactttgttttattttgttgtctttttataaaaggggaggtggagagaccccttcagagcagggattgtgccgggagagtgcctctgactttgggacatttcatccacagaaatttccaagccaatggtttcttttgggttttggtttttatgtttgttttttggggtttggaaaaacatgcatttttaccgtgcacgtaaattggtcagcagaaaagggagcccagaaaaggcagcagatggaccatgcccttgctgggttttccttttctttgggactgtgaggggaaatggtttttagaggtgagggttggtccatgtggaggaaagaagtgtctctgttgggggacagaggaacctggggagtccatcgcatgtcctacaatctgctcttagacacggccttgccaggagagcctgccctcagactgcaggaccagaacccctgcctccatctttccaagcaccggggcgaaaaaccacaaaggaaaggaagaaaatttatatatatataatataaaatcacttggtgattaaaaaaataactgctccataaataaaactcctaaagtcacttatgttta

SEQ ID NO: 34451 - DNA, 6828 bp, Homo sapiens
gtactgaactgggaaagacagcagagcaacagctcaaaatctcgcgtcattctagaagtcaagccaggcacaagggctcatcgggcaaccccaggatggggagaggccaagacaggcgggtcactcgcgcctgcaaccccaggacggggggaggccgagcgggtcactttgaaccctcggaaatccaagagtctgagacctacctaggctacatggggagaccttgtgtctaccaaatatatgctattgaaacttctgaaactaggtttagaagtttcaagagcagaatctccgtgttgcaatctggttcctaaggaggaagaggaaggcagccctggagtggtttctttacagtaatttcaacagaagagtgagagatggaacccgaagaagaaaggattcgttacagccagagattgcgtggtaccatgcgacgacgctatgaagatgatggcatttcagatgatgaaattgaaggaaaaagaacttttgacttggaagagaaactgcacaccaacaaatataatgccaattttgttacttttatggaaggaaaagattttaatgtagagtatattcagcggggtggcttgagagatcctctgattttcaagaattctgatggactcggaataaaaatgccggatccagacttcactgtgaatgatgtcaaaatgtgtgtggggagtcgtcgcatggtggatgtcatggacgtgaacacacagaaaggcattgaaatgaccatggctcagtggacacgctactatgagaccccagaggaggagcgagagaaactctataatgtcatcagcctcgagtttagccacaccaggctggagaatatggtgcagaggccctccacggtggatttcattgactgggtagacaacatgtggccaaggcacttgaaggaaagccagactgaatcaacaaatgccatcttggagatgcagtaccctaaagtgcagaagtactgtctaatgagtgttcgaggctgctatactgacttccatgtggactttggtggtacctctgtttggtatcacatccatcaagggggaaaggtcttctggctcatcccccctacagcccacaacctggagctgtacgagaattggctgctgtcagggaaacagggagacatctttctgggtgaccgggtatcagattgtcagcgcattgagctcaagcagggctataccttcgtcattccctcaggctggattcatgctgtgtatactcctacagacacattagtgtttgggggcaattttttgcatagcttcaacatccctatgcagttaaaaatatacaacattgaagatcggacacgggttccaaataagtttcgctatccattctactatgagatgtgttggtatgtgttggagcgctatgtgtactgcataaccaaccgttcccacctaaccaaggaatttcagaaagagtccctcagcatggatttggagttaaatgggttggagtctgggaatggggatgaggaagcagtggatcgagaaccccgacgcttgagcagcaggcgttctgtcctcactagccctgtagcgaatggagtcaacctggattatgatggactgggcaaaacctgccgaagtcttccaagtctgaagaaaactttggctggggactcatcttctgactgtagccggggctcccacaatggacaagtgtgggatccccagtgtgctccccgaaaggacaggcaagtgcatctgacccattttgagcttgaaggccttcgctgccttgtagataagttggagtctctgccactgcacaagaaatgtgtccccacagggatagaagatgaagatgctctcattgctgatgtaaagattttgctggaggagcttgccaacagcgatcccaagttagccctcactggagttcctatagtacagtggccaaaaagggataagcttaaattccccactcggccaaaggtgcgggttcctaccatccccattacgaagcctcacactatgaaaccagctccacggttaacacctgtgaggccagctgctgcctccccgattgtgtcaggagccagacggagacgagtgcgatgtcgaaaatgcaaagcctgtgtgcaaggagagtgtggtgtttgccactactgcagagacatgaagaagtttggggggcctggacgcatgaagcagtcctgtgtcctccgacagtgcttggcacccagactgcctcactcagtcacatgttccctctgtggagaggtggatcagaatgaagagacacaagactttgagaagaaactcatggaatgctgtatctgcaatgagattgttcatcctggctgcctccagatggacggagaggggttgcttaacgaagaattgccaaattgctgggaatgtccaaagtgctaccaggaggacagctcggagaaagcccagaagcggaaaatggaagagagtgacgaagaagctgtgcaagccaaagtcctgcggcccctgcggagctgcgatgagcctctcacgcccccgcctcattcacccacttccatgctgcagctcatccatgacccggtttccccccggggtatggtgactcggtcatcccctggggctggccccagcgaccaccacagtgccagccgcgatgagcgcttcaaacggcggcagttgctgcggctgcaggccacagagcgcaccatggtacgggaaaaggagaacaatcccagcggcaaaaaggagctgtctgaagttgagaaagccaagatccggggatcgtacctcactgtcacgctacagaggcccaccaaagagctccacgggacatccattgtgcccaagctgcaggccatcacggcctcctctgccaaccttcgccattccccccgtgtgctagtgcagcactgcccagcccgaaccccccagcgtggggatgaggaggggctggggggagaggaggaggaagaggaggaggaggaggaggaagatgacagtgcagaggaggggggtgcagccaggctgaatggccggggcagttgggctcaggatggagacgaaagctggatgcagcgggaggtctggatgtctgtcttccgctacctcagccgcagagaactttgtgaatgtatgcgagtgtgcaagacgtggtataaatggtgctgcgacaagagactttggacaaaaattgacttgagtaggtgtaaggccattgtgccccaggccctcagtggcatcatcaagaggcagccagtcagccttgacctcagttggaccaacatctctaaaaagcaactgacatggctcgtcaataggctgccaggactgaaagacctcctcctagcaggctgctcctggtctgcagtctctgccctcagcacctccagctgcccccttctcaggacccttgatcttcggtgggcagtaggaatcaaggaccctcaaattcgggacttgcttactccaccggctgataaaccaggtcaggacaatcgcagcaagctccggaacatgaccgacttccggctggcaggccttgacatcacagatgccacgcttcgcctcataattcgccacatgcccctcctgtctcgactcgacctcagtcactgcagccaccttacagatcagtcctccaatctactcactgctgtcgggtcttccactcgctactctctcacagagctcaatatggcaggttgcaataaattgacagaccagaccctgatctacctacggcgcattgccaacgtcaccttgatcgaccttcgaggatgcaagcagatcactcgaaaagcctgcgagcacttcatctcagacttgtccatcaacagcctctactgcctgtctgacgagaagctgatacagaagatcagctaagacacacccagcccagattcaacaggaaaccgatcttcccctgactccccaccgaggagagcctctcctcgaccctgcacgggctctgaggccagcgtcacactccctctctgctctcctgtcccttgagcccttcctctacaggtggggcagagagggtggtggacaccaggcttatctgcctgctcctctccctcctaaggaaaagggagtagcagattgatctgaggggaaagcacaggctgtgctgtcgaggcgcctgctcgcttactcgcctgccaggaggccgggctctcagtttggggtgtttgtgcaaccttcatctgcactgggccctgtgcccctcctccccatccatggtccccagcagtgcctggttctgagcaaactcccagggaagaaaacggccctgtctccatggccaggttcttgtggtgtccagtgcgcgtctctcctccatcacactctcccggcttgcgcaggaggggccagcagccccaggagtcccagacccgtgccgatcacactggtgctgttgagatctcccaaacctcacgtccttaactgtgctctccctcctttcctctcccttgagcttggttctgcccagcactcgtgcttgttcacataattaggtttcccaccccagcctacccgacttacttgctagtctctatgaggtccttattgcacttattggggttgaagctcttcagaggagctggaactgtctaccccagggacacacccatttcgttgctacccaagtggattctgagacaggcaccatctccttgttccccctctctcttttgcctcccactgactgcccttttccatgtgtcttcattctgcctgaagaaggctttcccaggatgcacgtcctcagagggagcagcctatctcccccaagctggaggcggcagaggactgggccaagccccaacctgcctcccagccaggctcctccaggcctctggtttagcggagccccctgagcccaggcctgtgtctagccccagtggctcactgaactttcagggcagtcagggggtcctgcttagaagccagtcaccagccctctgcctgcagccatggaagggggtgtgcacgtgcctctgtgtgtgtggctgagtgtattctgcgcgtgtgtgtggagggagggagggaggggagcatggtgtctcccgctccaccgccctttgttgagccccatcagctgcccccttttactttgcattgaacggcctgtccaaagatcctctctctagggcagcagagagctttttgcactttaaaaaaaaaaagaaagaaagaaaggtcggaatttcttttgggtcaatatttttaagtgtgtgaggagatgctcagtagcagcagcctatggcaagagcttataaatgattgatgcaaatttgcactctgctccccctctgtaaggatactgatagcacaacctcttccccccaccccgccccgccttttggtcgtccatccctgtccctttctggccctcttcctgtagcccagtctcaggctttcctcttcctgaagccctacagagttagggaatggagcccaggcaccaggggtctaaagtgtgagccactgagaagagagacgccaactgcacccttgccacttccaaagcaatagaggcagagtggtcccctctttgccacctaggccagttttgaccctggcattaactggccttagaagaaactggatcctggtagggggtggcattttgtttgtttcttccaatctgctgaatcttttgactgcaccttacaaacagcagtctgctcccatgaccctctgcccacttccattggtctccaggccccaataatctggggttgaaactttgaggaaatgccagtgacttattccagagtgcctcagttaggggaacttctctgtaaagaaccctgggtattgagcaaaaaccttattatcgttaatgacctataattggaagcttcctgcctttttctttggttgctcctgtggaaaatactgaaaagattactttgttttattttgttgtctttttataaaaggggaggtggagagaccccttcagagcagggattgtgccgggagagtgcctctgactttgggacatttcatccacagaaatttccaagccaatggtttcttttgggttttggtttttatgtttgttttttggggtttggaaaaacatgcatttttaccgtgcacgtaaattggtcagcagaaaagggagcccagaaaaggcagcagatggaccatgcccttgctgggttttccttttctttgggactgtgaggggaaatggtttttagaggtgagggttggtccatgtggaggaaagaagtgtctctgttgggggacagaggaacctggggagtccatcgcatgtcctacaatctgctcttagacacggccttgccaggagagcctgccctcagactgcaggaccagaacccctgcctccatctttccaagcaccggggcgaaaaaccacaaaggaaaggaagaaaatttatatatatataatataaaatcacttggtgattaaaaaaataactgctccataaataaaactcctaaagtcacttatgtttaaagggtttggttgtgttttttgtttttcggagaaatattgtaaatatatatttttttgttgctgatttagagtcaatctccaatgttgtgctaaaaagtttaaattaaatgtaagcattaaggggataagtcttatgctatctcagttgacacattgaggttattttgggccagagaaggaggaagctagttggactttgttttgttttccaaaagttctccactattggttttagagagagcaaggacatctttcctctgacacgtgggaatgggtgatatttgtgtaataaaatttttaaaagacaaaaaaagaaaagcggccgctcgttgtcgcgcggccgcg

SEQ ID NO: 34452 - DNA, 3707 bp, Homo sapiens
ctgactcaaggactcaggcgtgtagtggcatcatcaagaggcagccagtcagccttgacctcagttggaccaacatctctaaaaagcaactgacatggctcgtcaataggctgccaggactgaaagacctcctcctagcaggctgctcctggtctgcagtctctgccctcagcacctccagctgcccccttctcaggacccttgatcttcggtgggcagtaggaatcaaggaccctcaaattcgggacttgcttactccaccggctgataaaccaggtcaggacaatcgcagcaagctccggaacatgaccgacttccggctggcaggccttgacatcacagatgccacgcttcgcctcataattcgccacatgcccctcctgtctcgactcgacctcagtcactgcagccaccttacagatcagtcctccaatctactcactgctgtcgggtcttccactcgctactctctcacagagctcaatatggcaggttgcaataaattgacagaccagaccctgatctacctacggcgcattgccaacgtcaccttgatcgaccttcgaggatgcaagcagatcactcgaaaagcctgcgagcacttcatctcagacttgtccatcaacagcctctactgcctgtctgacgagaagctgatacagaagatcagctaagacacacccagcccagattcaacaggaaaccgatcttcccctgactccccaccgaggagagcctctcctcgaccctgcacgggctctgaggccagcgtcacactccctctctgctctcctgtcccttgagcccttcctctacaggtggggcagagagggtggtggacaccaggcttatctgcctgctcctctccctcctaaggaaaagggagtagcagattgatctgaggggaaagcacaggctgtgctgtcgaggcgcctgctcgcttactcgcctgccaggaggccgggctctcagtttggggtgtttgtgcaaccttcatctgcactgggccctgtgcccctcctccccatccatggtccccagcagtgcctggttctgagcaaactcccagggaagaaaacggccctgtctccatggccaggttcttgtggtgtccagtgcgcgtctctcctccatcacactctcccggcttgcgcaggaggggccagcagccccaggagtcccagacccgtgccgatcacactggtgctgttgagatctcccaaacctcacgtccttaactgtgctctccctcctttcctctcccttgagcttggttctgcccagcactcgtgcttgttcacataattaggtttcccaccccagcctacccgacttacttgctagtctctatgaggtccttattgcacttattggggttgaagctcttcagaggagctggaactgtctaccccagggacacacccatttcgttgctacccaagtggattctgagacaggcaccatctccttgttccccctctctcttttgcctcccactgactgcccttttccatgtgtcttcattctgcctgaagaaggctttcccaggatgcacgtcctcagagggagcagcctatctcccccaagctggaggcggcagaggactgggccaagccccaacctgcctcccagccaggctcctccaggcctctggtttagcggagccccctgagcccaggcctgtgtctagccccagtggctcactgaactttcagggcagtcagggggtcctgcttagaagccagtcaccagccctctgcctgcagccatggaagggggtgtgcacgtgcctctgtgtgtgtggctgagtgtattctgcgcgtgtgtgtggagggagggagggaggggagcatggtgtctcccgctccaccgccctttgttgagccccatcagctgcccccttttactttgcattgaacggcctgtccaaagatcctctctctagggcagcagagagctttttgcactttaaaaaaaaaaagaaagaaagaaaggtcggaatttcttttgggtcaatatttttaagtgtgtgaggagatgctcagtagcagcagcctatggcaagagcttataaatgattgatgcaaatttgcactctgctccccctctgtaaggatactgatagcacaacctcttccccccaccccgccccgccttttggtcgtccatccctgtccctttctggccctcttcctgtagcccagtctcaggctttcctcttcctgaagccctacagagttagggaatggagcccaggcaccaggggtctaaagtgtgagccactgagaagagagacgccaactgcacccttgccacttccaaagcaatagaggcagagtggtcccctctttgccacctaggccagttttgaccctggcattaactggccttagaagaaactggatcctggtagggggtggcattttgtttgtttcttccaatctgctgaatcttttgactgcaccttacaaacagcagtctgctcccatgaccctctgcccacttccattggtctccaggccccaataatctggggttgaaactttgaggaaatgccagtgacttattccagagtgcctcagttaggggaacttctctgtaaagaaccctgggtattgagcaaaaaccttattatcgttaatgacctataattggaagcttcctgcctttttctttggttgctcctgtggaaaatactgaaaagattactttgttttattttgttgtctttttataaaaggggaggtggagagaccccttcagagcagggattgtgccgggagagtgcctctgactttgggacatttcatccacagaaatttccaagccaatggtttcttttgggttttggtttttatgtttgttttttggggtttggaaaaacatgcatttttaccgtgcacgtaaattggtcagcagaaaagggagcccagaaaaggcagcagatggaccatgcccttgctgggttttccttttctttgggactgtgaggggaaatggtttttagaggtgagggttggtccatgtggaggaaagaagtgtctctgttgggggacagaggaacctggggagtccatcgcatgtcctacaatctgctcttagacacggccttgccaggagagcctgccctcagactgcaggaccagaacccctgcctccatctttccaagcaccggggcgaaaaaccacaaaggaaaggaagaaaatttatatatatataatataaaatcacttggtgattaaaaaaataactgctccataaataaaactcctaaagtcacttatgtttaaagggtttggttgtgttttttgtttttcggagaaatattgtaaatatatatttttttgttgctgatttagagtcaatctccaatgttgtgctaaaaagtttaaattaaatgtaagcattaaggggataagtcttatgctatctcagttgacacattgaggttattttgggccagagaaggaggaagctagttggactttgttttgttttccaaaagttctccactattggttttagagagagcaaggacatctttcctctgacacgtgggaatgggtgatatttgtgtaataaaatttttaaaagacaaaaaaagaaatagcctccaatgggaaatattttaatttaggttttgtttttgtttgggggtttttgtttttttaaaaaaataaaaaggctttaaaaacaaaaaataaac

SEQ ID NO: 34453 - DNA, 6495 bp, Homo sapiens
agcaactgtttgctcccttttcctggtcgctctgaccctctctggatactgggttgatccacggaaaaaccgaagacgacgtttgggatttaattattcctctcagctttggaatcttttacttctcacttggacaagaactcaagagcagaatctccgtgttgcaatctggttcctaaggaggaagaggaaggcagccctggagtggtttctttacagtaatttcaacagaagagtgagagatggaacccgaagaagaaaggattcgttacagccagagattgcgtggtaccatgcgacgacgctatgaagatgatggcatttcagatgatgaaattgaaggaaaaagaacttttgacttggaagagaaactgcacaccaacaaatataatgccaattttgttacttttatggaaggaaaagattttaatgtagagtatattcagcggggtggcttgagagatcctctgattttcaagaattctgatggactcggaataaaaatgccggatccagacttcactgtgaatgatgtcaaaatgtgtgtggggagtcgtcgcatggtggatgtcatggacgtgaacacacagaaaggcattgaaatgaccatggctcagtggacacgctactatgagaccccagaggaggagcgagagaaactctataatgtcatcagcctcgagtttagccacaccaggctggagaatatggtgcagaggccctccacggtggatttcattgactgggtagacaacatgtggccaaggcacttgaaggaaagccagactgaatcaacaaatgccatcttggagatgcagtaccctaaagtgcagaagtaagtgatgcgccctgcatcttcctccgtgtgctgtgggagaccaaagcaatagcaaggattggcttctcccttacgagctttgctctgtgtcttgaatgattaaaaagatgaattatttaaagatgagactttacagttccacaaggaagagtgtatgtgagcataccatagcacacaaccacacagttaaaggaaaaaaaacttacattttagtcaatacggtagaaaaaaaaaaaacctttttctgataatgtgatgacttgaaaatgcattgctttttctccttctggaacttaagattaagtggaagataaagggagtatataagaggagagtatggcattttggtggggcagatgtacttttttccatcagtacactaatgctgctgctttttttgggtcaggtactgtctaatgagtgttcgaggctgctatactgacttccatgtggactttggtggtacctctgtttggtatcacatccatcaagggggaaaggtcttctggctcatcccccctacagcccacaacctggagctgtacgagaattggctgctgtcagggaaacagggagacatctttctgggtgaccgggtatcagattgtcagcgcattgagctcaagcagggctataccttcgtcattccctcaggctggattcatgctgtgtatactcctacagacacattagtgtttgggggcaattttttgcatagcttcaacatccctatgcagttaaaaatatacaacattgaagatcggacacgggttccaaataagtttcgctatccattctactatgagatgtgttggtatgtgttggagcgctatgtgtactgcataaccaaccgttcccacctaaccaaggaatttcagaaagagtccctcagcatggatttggagttaaatgggttggagtctgggaatggggatgaggaagcagtggatcgagaaccccgacgcttgagcagcaggcgttctgtcctcactagccctgtagcgaatggagtcaacctggattatgatggactgggcaaaacctgccgaagtcttccaagtctgaagaaaactttggctggggactcatcttctgactgtagccggggctcccacaatggacaagtgtgggatccccagtgtgctccccgaaaggacaggcaagtgcatctgacccattttgagcttgaaggccttcgctgccttgtagataagttggagtctctgccactgcacaagaaatgtgtccccacagggatagaagatgaagatgctctcattgctgatgtaaagattttgctggaggagcttgccaacagcgatcccaagttagccctcactggagttcctatagtacagtggccaaaaagggataagcttaaattccccactcggccaaaggtgcgggttcctaccatccccattacgaagcctcacactatgaaaccagctccacggttaacacctgtgaggccagctgctgcctccccgattgtgtcaggagccagacggagacgagtgcgatgtcgaaaatgcaaagcctgtgtgcaaggagagtgtggtgtttgccactactgcagagacatgaagaagtttggggggcctggacgcatgaagcagtcctgtgtcctccgacagtgcttggcacccagactgcctcactcagtcacatgttccctctgtggagaggtggatcagaatgaagagacacaagactttgagaagaaactcatggaatgctgtatctgcaatgagattgttcatcctggctgcctccagatggacggagaggggttgcttaacgaagaattgccaaattgctgggaatgtccaaagtgctaccaggaggacagctcggagaaagcccagaagcggaaaatggaagagagtgacgaagaagctgtgcaagccaaagtcctgcggcccctgcggagctgcgatgagcctctcacgcccccgcctcattcacccacttccatgctgcagctcatccatgacccggtttccccccggggtatggtgactcggtcatcccctggggctggccccagcgaccaccacagtgccagccgcgatgagcgcttcaaacggcggcagttgctgcggctgcaggccacagagcgcaccatggtacgggaaaaggagaacaatcccagcggcaaaaaggagctgtctgaagttgagaaagccaagatccggggatcgtacctcactgtcacgctacagaggcccaccaaagagctccacgggacatccattgtgcccaagctgcaggccatcacggcctcctctgccaaccttcgccattccccccgtgtgctagtgcagcactgcccagcccgaaccccccagcgtggggatgaggaggggctggggggagaggaggaggaagaggaggaggaggaggaggaagatgacagtgcagaggaggggggtgcagccaggctgaatggccggggcagttgggctcaggatggagacgaaagctggatgcagcgggaggtctggatgtctgtcttccgctacctcagccgcagagaactttgtgaatgtatgcgagtgtgcaagacgtggtataaatggtgctgcgacaagagactttggacaaaaattgacttgagtaggtgtaaggccattgtgccccaggccctcagtggcatcatcaagaggcagccagtcagccttgacctcagttggaccaacatctctaaaaagcaactgacatggctcgtcaataggctgccaggactgaaagacctcctcctagcaggctgctcctggtctgcagtctctgccctcagcacctccagctgcccccttctcaggacccttgatcttcggtgggcagtaggaatcaaggaccctcaaattcgggacttgcttactccaccggctgataaaccaggtcaggacaatcgcagcaagctccggaacatgaccgacttccggctggcaggccttgacatcacagatgccacgcttcgcctcataattcgccacatgcccctcctgtctcgactcgacctcagtcactgcagccaccttacagatcagtcctccaatctactcactgctgtcgggtcttccactcgctactctctcacagagctcaatatggcaggttgcaataaattgacagaccagaccctgatctacctacggcgcattgccaacgtcaccttgatcgaccttcgaggatgcaagcagatcactcgaaaagcctgcgagcacttcatctcagacttgtccatcaacagcctctactgcctgtctgacgagaagctgatacagaagatcagctaagacacacccagcccagattcaacaggaaaccgatcttcccctgactccccaccgaggagagcctctcctcgaccctgcacgggctctgaggccagcgtcacactccctctctgctctcctgtcccttgagcccttcctctacaggtggggcagagagggtggtggacaccaggcttatctgcctgctcctctccctcctaaggaaaagggagtagcagattgatctgaggggaaagcacaggctgtgctgtcgaggcgcctgctcgcttactcgcctgccaggaggccgggctctcagtttggggtgtttgtgcaaccttcatctgcactgggccctgtgcccctcctccccatccatggtccccagcagtgcctggttctgagcaaactcccagggaagaaaacggccctgtctccatggccaggttcttgtggtgtccagtgcgcgtctctcgagtgtattctgcgcgtgtgtgtggagggagggagggaggggagcatggtgtctcccgctccaccgccctttgttgagccccatcagctgcccccttttactttgcattgaacggcctgtccaaagatcctctctctagggcagcagagagctttttgcactttaaaaaaaaaaagaaagaaagaaaggtcggaatttcttttgggtcaatatttttaagtgtgtgaggagatgctcagtagcagcagcctatggcaagagcttataaatgattgatgcaaatttgcactctgctccccctctgtaaggatactgatagcacaacctcttccccccaccccgccccgccttttggtcgtccatccctgtccctttctggccctcttcctgtagcccagtctcaggctttcctcttcctgaagccctacagagttagggaatggagcccaggcaccaggggtctaaagtgtgagccactgagaagagagacgccaactgcacccttgccacttccaaagcaatagaggcagagtggtcccctctttgccacctaggccagttttgaccctggcattaactggccttagaagaaactggatcctggtagggggtggcattttgtttgtttcttccaatctgctgaatcttttgactgcaccttacaaacagcagtctgctcccatgaccctctgcccacttccattggtctccaggccccaataatctggggttgaaactttgaggaaatgccagtgacttattccagagtgcctcagttaggggaacttctctgtaaagaaccctgggtattgagcaaaaaccttattatcgttaatgacctataattggaagcttcctgcctttttctttggttgctcctgtggaaaatactgaaaagattactttgttttattttgttgtctttttataaaaggggaggtggagagaccccttcagagcagggattgtgccgggagagtgcctctgactttgggacatttcatccacagaaatttccaagccaatggtttcttttgggttttggtttttatgtttgttttttggggtttggaaaaacatgcatttttaccgtgcacgtaaattggtcagcagaaaagggagcccagaaaaggcagcagatggaccatgcccttgctgggttttccttttctttgggactgtgaggggaaatggtttttagaggtgagggttggtccatgtggaggaaagaagtgtctctgttgggggacagaggaacctggggagtccatcgcatgtcctacaatctgctcttagacacggccttgccaggagagcctgccctcagactgcaggaccagaacccctgcctccatctttccaagcaccggggcgaaaaaccacaaaggaaaggaagaaaatttatatatatataatataaaatcacttggtgattaaaaaaataactgctccataaataaaactcctaaagtcacttatgtttaaagggtttggttgtgttttttgtttttcggagaaatattgtaaatatatatttttttgttgctgatttagagtcaatctccaatgttgtgctaaaaagtttaaattaaatgtaagcattaaggggataagtcttatgctatctcagttgacacattgaggttattttgggccagagaaggaggaagctagttggactttgttttgttttccaaaagttctccactattggttttagagagagcaaggacatctttcctctgacacgtgggaatgggtgatatttgtgtaataaaatttttaaaagacaaaaaaagaaatagcctccaatgggaaatattttaatttaggttttgtttttgtttgggggtttttgtttttttaaaaaaataaaaaggctttaaaaacaaaaaataaac

SEQ ID NO: 34454 - DNA, 1222 bp, Homo sapiens
tctagttgacctctagttagatctagttgaccaggccccaataatctggggttgaaactttgaggaaatgccagtgacttattccagagtgcctcagttaggggaacttctctgtaaagaaccctgggtattgagcaaaaaccttattatcgttaatgacctataattggaagcttcctgcctttttctttggttgctcctgtggaaaatactgaaaagattactttgttttattttgttgtctttttataaaaggggaggtggagagaccccttcagagcagggattgtgccgggagagtgcctctgactttgggacatttcatccacagaaatttccaagccaatggtttcttttgggttttggtttttatgtttgttttttggggtttggaaaaacatgcatttttaccgtgcacgtaaattggtcagcagaaaagggagcccagaaaaggcagcagatggaccatgcccttgctgggttttccttttctttgggactgtgaggggaaatggtttttagaggtgagggttggtccatgtggaggaaagaagtgtctctgttgggggacagaggaacctggggagtccatcgcatgtcctacaatctgctcttagacacggccttgccaggagagcctgccctcagactgcaggaccagaacccctgcctccatctttccaagcaccggggcgaaaaaccacaaaggaaaggaagaaaatttatatatatataatataaaatcacttggtgattaaaaaaataactgctccataaataaaactcctaaagtcacttatgtttaaagggtttggttgtgttttttgtttttcggagaaatattgtaaatatatatttttttgttgctgatttagagtcaatctccaatgttgtgctaaaaagtttaaattaaatgtaagcattaaggggataagtcttatgctatctcagttgacacattgaggttattttgggccagagaaggaggaagctagttggactttgttttgttttccaaaagttctccactattggttttagagagagcaaggacatctttcctctgacacgtgggaatgggtgatatttgtgtaataaaatttttaaaagacaaaaaaagaaatagcctccaatgggaaatattttaatttaggttttgtttttgtttgggggtttttgtttttttaaaaaaataaaaaggctttaaaaacaaaaaataaac

SEQ ID NO: 34455 - DNA, 3470 bp, Homo sapiens
agcaactgtttgctcccttttcctggtcgctctgaccctctctggatactgggttgatccacggaaaaaccgaagacgacgtttgggatttaattattcctctcagctttggaatcttttacttctcacttggacaagaactcaagagcagaatctccgtgttgcaatctggttcctaaggaggaagaggaaggcagccctggagtggtttctttacagtaatttcaacagaagagtgagagatggaacccgaagaagaaaggattcgttacagccagagattgcgtggtaccatgcgacgacgctatgaagatgatggcatttcagatgatgaaattgaaggaaaaagaacttttgacttggaagagaaactgcacaccaacaaatataatgccaattttgttacttttatggaaggaaaagattttaatgtagagtatattcagcggggtggcttgagagatcctctgattttcaagaattctgatggactcggaataaaaatgccggatccagacttcactgtgaatgatgtcaaaatgtgtgtggggagtcgtcgcatggtggatgtcatggacgtgaacacacagaaaggcattgaaatgaccatggctcagtggacacgctactatgagaccccagaggaggagcgagagaaactctataatgtcatcagcctcgagtttagccacaccaggctggagaatatggtgcagaggccctccacggtggatttcattgactgggtagacaacatgtggccaaggcacttgaaggaaagccagactgaatcaacaaatgccatcttggagatgcagtaccctaaagtgcagaagtaagtgatgcgccctgcatcttcctccgtgtgctgtgggagaccaaagcaatagcaaggattggcttctcccttacgagctttgctctgtgtcttgaatgattaaaaagatgaattatttaaagatgagactttacagttccacaaggaagagtgtatgtgagcataccatagcacacaaccacacagttaaaggaaaaaaaacttacattttagtcaatacggtagaaaaaaaaaaaacctttttctgataatgtgatgacttgaaaatgcattgctttttctccttctggaacttaagattaagtggaagataaagggagtatataagaggagagtatggcattttggtggggcagatgtacttttttccatcagtacactaatgctgctgctttttttgggtcaggtactgtctaatgagtgttcgaggctgctatactgacttccatgtggactttggtggtacctctgtttggtatcacatccatcaagggggaaaggtcttctggctcatcccccctacagcccacaacctggagctgtacgagaattggctgctgtcagggaaacagggagacatctttctgggtgaccgggtatcagattgtcagcgcattgagctcaagcagggctataccttcgtcattccctcaggctggattcatgctgtgtatactcctacagacacattagtgtttgggggcaattttttgcatagcttcaacatccctatgcagttaaaaatatacaacattgaagatcggacacgggttccaaataagtttcgctatccattctactatgagatgtgttggtatgtgttggagcgctatgtgtactgcataaccaaccgttcccacctaaccaaggaatttcagaaagagtccctcagcatggatttggagttaaatgggttggagtctgggaatggggatgaggaagcagtggatcgagaaccccgacgcttgagcagcaggcgttctgtcctcactagccctgtagcgaatggagtcaacctggattatgatggactgggcaaaacctgccgaagtcttccaagtctgaagaaaactttggctggggactcatcttctgactgtagccggggctcccacaatggacaagtgtgggatccccagtgtgctccccgaaaggacaggcaagtgcatctgacccattttgagcttgaaggccttcgctgccttgtagataagttggagtctctgccactgcacaagaaatgtgtccccacagggatagaagatgaagatgctctcattgctgatgtaaagattttgctggaggagcttgccaacagcgatcccaagttagccctcactggagttcctatagtacagtggccaaaaagggataagcttaaattccccactcggccaaaggtgcgggttcctaccatccccattacgaagcctcacactatgaaaccagctccacggttaacacctgtgaggccagctgctgcctccccgattgtgtcaggagccagacggagacgagtgcgatgtcgaaaatgcaaagcctgtgtgcaaggagagtgtggtgtttgccactactgcagagacatgaagaagtttggggggcctggacgcatgaagcagtcctgtgtcctccgacagtgcttggcacccagactgcctcactcagtcacatgttccctctgtggagaggtggatcagaatgaagagacacaagactttgagaagaaactcatggaatgctgtatctgcaatgagattgttcatcctggctgcctccagatggacggagaggggttgcttaacgaagaattgccaaattgctgggaatgtccaaagtgctaccaggaggacagctcggagaaagcccagaagcggaaaatggaagagagtgacgaagaagctgtgcaagccaaagtcctgcggcccctgcggagctgcgatgagcctctcacgcccccgcctcattcacccacttccatgctgcagctcatccatgacccggtttccccccggggtatggtgactcggtcatcccctggggctggccccagcgaccaccacagtgccagccgcgatgagcgcttcaaacggcggcagttgctgcggctgcaggccacagagcgcaccatggtacgggaaaaggagaacaatcccagcggcaaaaaggagctgtctgaagttgagaaagccaagatccggggatcgtacctcactgtcacgctacagaggcccaccaaagagctccacgggacatccattgtgcccaagctgcaggccatcacggcctcctctgccaaccttcgccattccccccgtgtgctagtgcagcactgcccagcccgaaccccccagcgtggggatgaggaggggctggggggagaggaggaggaagaggaggaggaggaggaggaagatgacagtgcagaggaggggggtgcagccaggctgaatggccggggcagttgggctcaggatggagacgaaagctggatgcagcgggaggtctggatgtctgtcttccgctacctcagccgcagagaactttgtgaatgtatgcgagtgtgcaagacgtggtataaatggtctgcgacaagagactttgacacgggacacgaataacagggccgagctga

SEQ ID NO: 34456 - DNA, 1166 bp, Homo sapiens
  misc_feature (1146)..(1146): n is a, c, g, or t
  misc_feature (1149)..(1149): n is a, c, g, or t
agcaactgtttgctcccttttcctggtcgctctgaccctctctggatactgggttgatccacggaaaaaccgaagacgacgtttgggatttaattattcctctcagctttggaatcttttacttctcacttggacaagaactcaagagcagaatctccgtgttgcaatctggttcctaaggaggaagaggaaggcagccctggagtggtttctttacagtaatttcaacagaagagtgagagatggaacccgaagaagaaaggattcgttacagccagagattgcgtggtaccatgcgacgacgctatgaagatgatggcatttcagatgatgaaattgaaggaaaaagaacttttgacttggaagagaaactgcacaccaacaaatataatgccaattttgttacttttatggaaggaaaagattttaatgtagagtatattcagcggggtggcttgagagatcctctgattttcaagaattctgatggactcggaataaaaatgccggatccagacttcactgtgaatgatgtcaaaatgtgtgtggggagtcgtcgcatggtggatgtcatggacgtgaacacacagaaaggcattgaaatgaccatggctcagtggacacgctactatgagaccccagaggaggagcgagagaaactctataatgtcatcagcctcgagtttagccacaccaggctggagaatatggtgcagaggccctccacggtggatttcattgactgggtagacaacatgtggccaaggcacttgaaggaaagccagactgaatcaacaaatgccatcttggagatgcagtaccctaaagtgcagaagtactgtctaatgagtgttcgaggctgctatactgacttccatgtggactttggtggtacctctgtttggtatcacatccatcaagggggaaaggtcttctggctcatcccccctacagcccacaacctggagctgtacgagaattggctgctgtcagggaaacagggagacatctttctgggtgaccgggtatcagattgtcagcgcattgagctcaagcagggctataccttcgtcattccctcaggctggattcatgctgtgtatactcctacagacacattagtgtttgggggcaaatctacctggncgnatcctcggatcacctca

SEQ ID NO: 34457 - DNA, 649 bp, Homo sapiens
gttccaaataagtttcgctatccattctactatgagatgtgttggtatgtgttggagcgctatgtgtactgcataaccaaccgttcccacctaaccaaggaatttcagaaagagtccctcagcatgggtaagtattctgcctataggagctttgaagacaccgcttaggtctgagggtgaggcccgaaatactcagtaggctgtcactcaatatgttcttggttttttaattcatctacttggaagtaccaaattcatcactggaattgaataccagttacctacccagatgtgagttaatggccaaatgaaatactctggatctgatctttgtctgagttgctattacttagctcctcaagaaggatgatcaagccggacacgctggttcacgcctgtaatcctagcactttgggaggccaaggtgggcgaatggcttgagcccaggagttaagaccagcctgggaaacatggcaaaaccccatctctacagaaactacagaaaattgggtaggcatggtggctcgagtcccagctgctcaggaggctgaggtgggaggatcactggaacccaggaggttgaggctgcagtgagccgaagatcatgccactgcactctagcctgggcgacagagtgaaaccctgttgc

SEQ ID NO: 34458 - DNA, 224 bp, Homo sapiens
ggagttggagaccagcctgggccgactctgagggaatgaccccctctccaacgtgacctttcttctctctggtcccctgagagcaagggaggtccaccctgtcggttcagagggtttggaagaaaggaagcactgatgttgcttttctgggcctgttttgcagaagcggaaaatggaagagagtgacgaagaagctgtgcaagccaaagtcctgcggcccctgc

SEQ ID NO: 34459 - DNA, 686 bp, Homo sapiens
ggacccaaatctcccatcttcagtttaagggaaactgaaatgataaagatctgagtcagttctcttggattctatctttgtcctcttgtagcccagactgcctcactcagtcacatgttccctctgtggagaggtggatcagaatgaagagacacaagactttgagaagaaactcatggaatgctgtatctgcaatgagattgttcatcctggctgcctccaggtgaggagagctatgaggggttcctgaagtctcagctaatggagtgagtgacacaacagaatgggacacttgtgatgggagtgccagcatccctactgtaggccatcagctctgtggtcacataatgcagtggtctaacatcagcccttgattcatatatgtacaatgtgtcaggcactgcgttagaccctgaggatagaacagtacacaaaatagacccagttcctgtcctcatggagcttagaatctggactctggattgggtatgtagagttcccaggccataatggaactgcatggtgtgttttgggatgcctcaagcctttaggcatctctgatacatacttcagtgtacctctggatattagttcctaagggagagtgaggataataatatcagataacatttaatgagtgctgagtctgtatcagactcagtgcagagctaaatagctttaaaaaa

SEQ ID NO: 34460 - DNA, 396 bp, Homo sapiens
aaattatctttgaccccaacctttcccttggagcccaagtgtttcctccttctatttaaaggtggatttcattgactgggtagacaacatgtggccaaggcacttgaaggaaagccagactgaatcaacaaatgccatcttggagatgcagtaccctaaagtgcagaagtaagtgatgcgccctgcatcttcctccgtgtgctgtgggagaccaaagcaatagcaaggattggcttctcccttacgagctttgctctgtgtcttgaatgattaaaaagatgaattatttaaagatgagactttacagttccacaaggaagagtgtatgtgagcataccatagcacacaaccacacagttaaaggaaaaaaaacttacattttagtcaatacggtag

SEQ ID NO: 34461 - DNA, 523 bp, Homo sapiens
gaccctctttggtcctgtttttattgtgaatttatatctctaggctcaaagaattagcaagggtaaaattcatagaggacccagtggctcattgaaacttcattatattctgtggattctgagaatatcagctatcttgagagaaagaaaagatccataaggcaaggaaaatagcaactgagtttgaaagtagcactttgcacatgtagggaaatctatgaccacttgtaggtaggcatgaaaaagtgcatgatttcatcagtatgttcctttctttcctagcgtggtaccatgcgacgacgctatgaagatgatggcatttcagatgatgaaattgaaggaaaaagaacttttgacttggaagagaaactgcacaccaacaaatataatgccaattttgttacttttatggaaggaaaaggtcagtattgttttggttccagcttacagtcctttgatgtgggaagccatagactctgagcattgggggtttagcctttatccagctaaaatattgcctgtt

SEQ ID NO: 34462 - DNA, 213 bp, Homo sapiens
aaagctggatgcagcgggaggtctggatgtctgtcttccgctacctcagccgcagagaactttgtgaatgtatgcgagtgtgcaagacgtggtataaatggtgagcagggattcagggggtcaggaattaggggtatgggagtaggtggcaggttttccatatgagaacagcatgcaccttggcatctgaaagcctgtggggtcttatgagga

SEQ ID NO: 34463 - DNA, 6677 bp, Homo sapiens
tttaactcttcagagacagggtgatgataatttctgtttagcatttataagatgactcactattagtagtcctatccccatattatttaagctctaaatttcctgtggaaatttagacttggaatatagacttggaaaacccctcaagcgttgcttctcaatgtgctctccatattttctaagagatgcttcttactaagcatatattttattgactaacagcataactatatacacagaataacaaacaccatttatactgtattacttaggatcctttttatggtccttttatcgtttttaattataccacttatctttctaatattttcctatggtgacagattttaatgtagagtatattcagcggggtggcttgagagatcctctgattttcaagaattctgatggactcggaataaaaatgccggatccagacttcactgtgaatgatgtcaaaatgtgtgtggggagtcgtcgcatggtggatgtcatggacgtgaacacacagaaaggcattgaaatgaccatggctcagtggacacgctactatgagaccccagaggaggagcgagagaaactctataatgtcatcagcctcgagtttagccacaccaggctggagaatatggtgcagaggccctccacggtggatttcattgactgggtagacaacatgtggccaaggcacttgaaggaaagccagactgaatcaacaaatgccatcttggagatgcagtaccctaaagtgcagaagtaagtgatgcgccctgcatcttcctccgtgtgctgtgggagaccaaagcaatagcaaggattggcttctcccttacgagctttgctctgtgtcttgaatgattaaaaagatgaattatttaaagatgagactttacagttccacaaggaagagtgtatgtgagcataccatagcacacaaccacacagttaaaggaaaaaaaacttacattttagtcaatacggtagaaaaaaaaaaaacctttttctgataatgtgatgacttgaaaatgcattgctttttctccttctggaacttaagattaagtggaagataaagggagtatataagaggagagtatggcattttggtggggcagatgtacttttttccatcagtacactaatgctgctgctttttttgggtcaggtactgtctaatgagtgttcgaggctgctatactgacttccatgtggactttggtggtacctctgtttggtatcacatccatcaagggggaaaggtcttctggctcatcccccctacagcccacaacctggagctgtacgagaattggctgctgtcagggaaacagggagacatctttctgggtgaccgggtatcagattgtcagcgcattgagctcaagcagggctataccttcgtcattccctcaggctggattcatgctgtgtatactcctacagacacattagtgtttgggggcaattttttgcatagcttcaacatccctatgcagttaaaaatatacaacattgaagatcggacacgggttccaaataagtttcgctatccattctactatgagatgtgttggtatgtgttggagcgctatgtgtactgcataaccaaccgttcccacctaaccaaggaatttcagaaagagtccctcagcatggatttggagttaaatgggttggagtctgggaatggggatgaggaagcagtggatcgagaaccccgacgcttgagcagcaggcgttctgtcctcactagccctgtagcgaatggagtcaacctggattatgatggactgggcaaaacctgccgaagtcttccaagtctgaagaaaactttggctggggactcatcttctgactgtagccggggctcccacaatggacaagtgtgggatccccagtgtgctccccgaaaggacaggcaagtgcatctgacccattttgagcttgaaggccttcgctgccttgtagataagttggagtctctgccactgcacaagaaatgtgtccccacagggatagaagatgaagatgctctcattgctgatgtaaagattttgctggaggagcttgccaacagcgatcccaagttagccctcactggagttcctatagtacagtggccaaaaagggataagcttaaattccccactcggccaaaggtgcgggttcctaccatccccattacgaagcctcacactatgaaaccagctccacggttaacacctgtgaggccagctgctgcctccccgattgtgtcaggagccagacggagacgagtgcgatgtcgaaaatgcaaagcctgtgtgcaaggagagtgtggtgtttgccactactgcagagacatgaagaagtttggggggcctggacgcatgaagcagtcctgtgtcctccgacagtgcttggcacccagactgcctcactcagtcacatgttccctctgtggagaggtggatcagaatgaagagacacaagactttgagaagaaactcatggaatgctgtatctgcaatgagattgttcatcctggctgcctccagatggacggagaggggttgcttaacgaagaattgccaaattgctgggaatgtccaaagtgctaccaggaggacagctcggagaaagcccagaagcggaaaatggaagagagtgacgaagaagctgtgcaagccaaagtcctgcggcccctgcggagctgcgatgagcctctcacgcccccgcctcattcacccacttccatgctgcagctcatccatgacccggtttccccccggggtatggtgactcggtcatcccctggggctggccccagcgaccaccacagtgccagccgcgatgagcgcttcaaacggcggcagttgctgcggctgcaggccacagagcgcaccatggtacgggaaaaggagaacaatcccagcggcaaaaaggagctgtctgaagttgagaaagccaagatccggggatcgtacctcactgtcacgctacagaggcccaccaaagagctccacgggacatccattgtgcccaagctgcaggccatcacggcctcctctgccaaccttcgccattccccccgtgtgctagtgcagcactgcccagcccgaaccccccagcgtggggatgaggaggggctggggggagaggaggaggaagaggaggaggaggaggaggaagatgacagtgcagaggaggggggtgcagccaggctgaatggccggggcagttgggctcaggatggagacgaaagctggatgcagcgggaggtctggatgtctgtcttccgctacctcagccgcagagaactttgtgaatgtatgcgagtgtgcaagacgtggtataaatggtgctgcgacaagagactttggacaaaaattgacttgagtaggtgtaaggccattgtgccccaggccctcagtggcatcatcaagaggcagccagtcagccttgacctcagttggaccaacatctctaaaaagcaactgacatggctcgtcaataggctgccaggactgaaagacctcctcctagcaggctgctcctggtctgcagtctctgccctcagcacctccagctgcccccttctcaggacccttgatcttcggtgggcagtaggaatcaaggaccctcaaattcgggacttgcttactccaccggctgataaaccaggtcaggacaatcgcagcaagctccggaacatgaccgacttccggctggcaggccttgacatcacagatgccacgcttcgcctcataattcgccacatgcccctcctgtctcgactcgacctcagtcactgcagccaccttacagatcagtcctccaatctactcactgctgtcgggtcttccactcgctactctctcacagagctcaatatggcaggttgcaataaattgacagaccagaccctgatctacctacggcgcattgccaacgtcaccttgatcgaccttcgaggatgcaagcagatcactcgaaaagcctgcgagcacttcatctcagacttgtccatcaacagcctctactgcctgtctgacgagaagctgatacagaagatcagctaagacacacccagcccagattcaacaggaaaccgatcttcccctgactccccaccgaggagagcctctcctcgaccctgcacgggctctgaggccagcgtcacactccctctctgctctcctgtcccttgagcccttcctctacaggtggggcagagagggtggtggacaccaggcttatctgcctgctcctctccctcctaaggaaaagggagtagcagattgatctgaggggaaagcacaggctgtgctgtcgaggcgcctgctcgcttactcgcctgccaggaggccgggctctcagtttggggtgtttgtgcaaccttcatctgcactgggccctgtgcccctcctccccatccatggtccccagcagtgcctggttctgagcaaactcccagggaagaaaacggccctgtctccatggccaggttcttgtggtgtccagtgcgcgtctctcctccatcacactctcccggcttgcgcaggaggggccagcagccccaggagtcccagacccgtgccgatcacactggtgctgttgagatctcccaaacctcacgtccttaactgtgctctccctcctttcctctcccttgagcttggttctgcccagcactcgtgcttgttcacataattaggtttcccaccccagcctacccgacttacttgctagtctctatgaggtccttattgcacttattggggttgaagctcttcagaggagctggaactgtctaccccagggacacacccatttcgttgctacccaagtggattctgagacaggcaccatctccttgttccccctctctcttttgcctcccactgactgcccttttccatgtgtcttcattctgcctgaagaaggctttcccaggatgcacgtcctcagagggagcagcctatctcccccaagctggaggcggcagaggactgggccaagccccaacctgcctcccagccaggctcctccaggcctctggtttagcggagccccctgagcccaggcctgtgtctagccccagtggctcactgaactttcagggcagtcagggggtcctgcttagaagccagtcaccagccctctgcctgcagccatggaagggggtgtgcacgtgcctctgtgtgtgtggctgagtgtattctgcgcgtgtgtgtggagggagggagggaggggagcatggtgtctcccgctccaccgccctttgttgagccccatcagctgcccccttttactttgcattgaacggcctgtccaaagatcctctctctagggcagcagagagctttttgcactttaaaaaaaaaaagaaagaaagaaaggtcggaatttcttttgggtcaatatttttaagtgtgtgaggagatgctcagtagcagcagcctatggcaagagcttataaatgattgatgcaaatttgcactctgctccccctctgtaaggatactgatagcacaacctcttccccccaccccgccccgccttttggtcgtccatccctgtccctttctggccctcttcctgtagcccagtctcaggctttcctcttcctgaagccctacagagttagggaatggagcccaggcaccaggggtctaaagtgtgagccactgagaagagagacgccaactgcacccttgccacttccaaagcaatagaggcagagtggtcccctctttgccacctaggccagttttgaccctggcattaactggccttagaagaaactggatcctggtagggggtggcattttgtttgtttcttccaatctgctgaatcttttgactgcaccttacaaacagcagtctgctcccatgaccctctgcccacttccattggtctccaggccccaataatctggggttgaaactttgaggaaatgccagtgacttattccagagtgcctcagttaggggaacttctctgtaaagaaccctgggtattgagcaaaaaccttattatcgttaatgacctataattggaagcttcctgcctttttctttggttgctcctgtggaaaatactgaaaagattactttgttttattttgttgtctttttataaaaggggaggtggagagaccccttcagagcagggattgtgccgggagagtgcctctgactttgggacatttcatccacagaaatttccaagccaatggtttcttttgggttttggtttttatgtttgttttttggggtttggaaaaacatgcatttttaccgtgcacgtaaattggtcagcagaaaagggagcccagaaaaggcagcagatggaccatgcccttgctgggttttccttttctttgggactgtgaggggaaatggtttttagaggtgagggttggtccatgtggaggaaagaagtgtctctgttgggggacagaggaacctggggagtccatcgcatgtcctacaatctgctcttagacacggccttgccaggagagcctgccctcagactgcaggaccagaacccctgcctccatctttccaagcaccggggcgaaaaaccacaaaggaaaggaagaaaatttatatatatataatataaaatcacttggtgattaaaaaaataactgctccataaataaaactcctaaagtcacttatgttta

SEQ ID NO: 34464 - DNA, 6416 bp, Homo sapiens
agcagttgctctaagccacagtggttcaggtaaggaggagcgcagtctccgtgcgtcagaggagacctcgattgtctctgtgcattgagggccctggtgagtctactgggtttcgagggccctcgaaacccagttcaagaattctgatggactcggaataaaaatgccggatccagacttcactgtgaatgatgtcaaaatgtgtgtggggagtcgtcgcatggtggatgtcatggacgtgaacacacagaaaggcattgaaatgaccatggctcagtggacacgctactatgagaccccagaggaggagcgagagaaactctataatgtcatcagcctcgagtttagccacaccaggctggagaatatggtgcagaggccctccacggtggatttcattgactgggtagacaacatgtggccaaggcacttgaaggaaagccagactgaatcaacaaatgccatcttggagatgcagtaccctaaagtgcagaagtaagtgatgcgccctgcatcttcctccgtgtgctgtgggagaccaaagcaatagcaaggattggcttctcccttacgagctttgctctgtgtcttgaatgattaaaaagatgaattatttaaagatgagactttacagttccacaaggaagagtgtatgtgagcataccatagcacacaaccacacagttaaaggaaaaaaaacttacattttagtcaatacggtagaaaaaaaaaaaacctttttctgataatgtgatgacttgaaaatgcattgctttttctccttctggaacttaagattaagtggaagataaagggagtatataagaggagagtatggcattttggtggggcagatgtacttttttccatcagtacactaatgctgctgctttttttgggtcaggtactgtctaatgagtgttcgaggctgctatactgacttccatgtggactttggtggtacctctgtttggtatcacatccatcaagggggaaaggtcttctggctcatcccccctacagcccacaacctggagctgtacgagaattggctgctgtcagggaaacagggagacatctttctgggtgaccgggtatcagattgtcagcgcattgagctcaagcagggctataccttcgtcattccctcaggctggattcatgctgtgtatactcctacagacacattagtgtttgggggcaattttttgcatagcttcaacatccctatgcagttaaaaatatacaacattgaagatcggacacgggttccaaataagtttcgctatccattctactatgagatgtgttggtatgtgttggagcgctatgtgtactgcataaccaaccgttcccacctaaccaaggaatttcagaaagagtccctcagcatggatttggagttaaatgggttggagtctgggaatggggatgaggaagcagtggatcgagaaccccgacgcttgagcagcaggcgttctgtcctcactagccctgtagcgaatggagtcaacctggattatgatggactgggcaaaacctgccgaagtcttccaagtctgaagaaaactttggctggggactcatcttctgactgtagccggggctcccacaatggacaagtgtgggatccccagtgtgctccccgaaaggacaggcaagtgcatctgacccattttgagcttgaaggccttcgctgccttgtagataagttggagtctctgccactgcacaagaaatgtgtccccacagggatagaagatgaagatgctctcattgctgatgtaaagattttgctggaggagcttgccaacagcgatcccaagttagccctcactggagttcctatagtacagtggccaaaaagggataagcttaaattccccactcggccaaaggtgcgggttcctaccatccccattacgaagcctcacactatgaaaccagctccacggttaacacctgtgaggccagctgctgcctccccgattgtgtcaggagccagacggagacgagtgcgatgtcgaaaatgcaaagcctgtgtgcaaggagagtgtggtgtttgccactactgcagagacatgaagaagtttggggggcctggacgcatgaagcagtcctgtgtcctccgacagtgcttggcacccagactgcctcactcagtcacatgttccctctgtggagaggtggatcagaatgaagagacacaagactttgagaagaaactcatggaatgctgtatctgcaatgagattgttcatcctggctgcctccagatggacggagaggggttgcttaacgaagaattgccaaattgctgggaatgtccaaagtgctaccaggaggacagctcggagaaagcccagaagcggaaaatggaagagagtgacgaagaagctgtgcaagccaaagtcctgcggcccctgcggagctgcgatgagcctctcacgcccccgcctcattcacccacttccatgctgcagctcatccatgacccggtttccccccggggtatggtgactcggtcatcccctggggctggccccagcgaccaccacagtgccagccgcgatgagcgcttcaaacggcggcagttgctgcggctgcaggccacagagcgcaccatggtacgggaaaaggagaacaatcccagcggcaaaaaggagctgtctgaagttgagaaagccaagatccggggatcgtacctcactgtcacgctacagaggcccaccaaagagctccacgggacatccattgtgcccaagctgcaggccatcacggcctcctctgccaaccttcgccattccccccgtgtgctagtgcagcactgcccagcccgaaccccccagcgtggggatgaggaggggctggggggagaggaggaggaagaggaggaggaggaggaggaagatgacagtgcagaggaggggggtgcagccaggctgaatggccggggcagttgggctcaggatggagacgaaagctggatgcagcgggaggtctggatgtctgtcttccgctacctcagccgcagagaactttgtgaatgtatgcgagtgtgcaagacgtggtataaatggtgctgcgacaagagactttggacaaaaattgacttgagtaggtgtaaggccattgtgccccaggccctcagtggcatcatcaagaggcagccagtcagccttgacctcagttggaccaacatctctaaaaagcaactgacatggctcgtcaataggctgccaggactgaaagacctcctcctagcaggctgctcctggtctgcagtctctgccctcagcacctccagctgcccccttctcaggacccttgatcttcggtgggcagtaggaatcaaggaccctcaaattcgggacttgcttactccaccggctgataaaccaggtcaggacaatcgcagcaagctccggaacatgaccgacttccggctggcaggccttgacatcacagatgccacgcttcgcctcataattcgccacatgcccctcctgtctcgactcgacctcagtcactgcagccaccttacagatcagtcctccaatctactcactgctgtcgggtcttccactcgctactctctcacagagctcaatatggcaggttgcaataaattgacagaccagaccctgatctacctacggcgcattgccaacgtcaccttgatcgaccttcgaggatgcaagcagatcactcgaaaagcctgcgagcacttcatctcagacttgtccatcaacagcctctactgcctgtctgacgagaagctgatacagaagatcagctaagacacacccagcccagattcaacaggaaaccgatcttcccctgactccccaccgaggagagcctctcctcgaccctgcacgggctctgaggccagcgtcacactccctctctgctctcctgtcccttgagcccttcctctacaggtggggcagagagggtggtggacaccaggcttatctgcctgctcctctccctcctaaggaaaagggagtagcagattgatctgaggggaaagcacaggctgtgctgtcgaggcgcctgctcgcttactcgcctgccaggaggccgggctctcagtttggggtgtttgtgcaaccttcatctgcactgggccctgtgcccctcctccccatccatggtccccagcagtgcctggttctgagcaaactcccagggaagaaaacggccctgtctccatggccaggttcttgtggtgtccagtgcgcgtctctcctccatcacactctcccggcttgcgcaggaggggccagcagccccaggagtcccagacccgtgccgatcacactggtgctgttgagatctcccaaacctcacgtccttaactgtgctctccctcctttcctctcccttgagcttggttctgcccagcactcgtgcttgttcacataattaggtttcccaccccagcctacccgacttacttgctagtctctatgaggtccttattgcacttattggggttgaagctcttcagaggagctggaactgtctaccccagggacacacccatttcgttgctacccaagtggattctgagacaggcaccatctccttgttccccctctctcttttgcctcccactgactgcccttttccatgtgtcttcattctgcctgaagaaggctttcccaggatgcacgtcctcagagggagcagcctatctcccccaagctggaggcggcagaggactgggccaagccccaacctgcctcccagccaggctcctccaggcctctggtttagcggagccccctgagcccaggcctgtgtctagccccagtggctcactgaactttcagggcagtcagggggtcctgcttagaagccagtcaccagccctctgcctgcagccatggaagggggtgtgcacgtgcctctgtgtgtgtggctgagtgtattctgcgcgtgtgtgtggagggagggagggaggggagcatggtgtctcccgctccaccgccctttgttgagccccatcagctgcccccttttactttgcattgaacggcctgtccaaagatcctctctctagggcagcagagagctttttgcactttaaaaaaaaaaagaaagaaagaaaggtcggaatttcttttgggtcaatatttttaagtgtgtgaggagatgctcagtagcagcagcctatggcaagagcttataaatgattgatgcaaatttgcactctgctccccctctgtaaggatactgatagcacaacctcttccccccaccccgccccgccttttggtcgtccatccctgtccctttctggccctcttcctgtagcccagtctcaggctttcctcttcctgaagccctacagagttagggaatggagcccaggcaccaggggtctaaagtgtgagccactgagaagagagacgccaactgcacccttgccacttccaaagcaatagaggcagagtggtcccctctttgccacctaggccagttttgaccctggcattaactggccttagaagaaactggatcctggtagggggtggcattttgtttgtttcttccaatctgctgaatcttttgactgcaccttacaaacagcagtctgctcccatgaccctctgcccacttccattggtctccaggccccaataatctggggttgaaactttgaggaaatgccagtgacttattccagagtgcctcagttaggggaacttctctgtaaagaaccctgggtattgagcaaaaaccttattatcgttaatgacctataattggaagcttcctgcctttttctttggttgctcctgtggaaaatactgaaaagattactttgttttattttgttgtctttttataaaaggggaggtggagagaccccttcagagcagggattgtgccgggagagtgcctctgactttgggacatttcatccacagaaatttccaagccaatggtttcttttgggttttggtttttatgtttgttttttggggtttggaaaaacatgcatttttaccgtgcacgtaaattggtcagcagaaaagggagcccagaaaaggcagcagatggaccatgcccttgctgggttttccttttctttgggactgtgaggggaaatggtttttagaggtgagggttggtccatgtggaggaaagaagtgtctctgttgggggacagaggaacctggggagtccatcgcatgtcctacaatctgctcttagacacggccttgccaggagagcctgccctcagactgcaggaccagaacccctgcctccatctttccaagcaccggggcgaaaaaccacaaaggaaaggaagaaaatttatatatatataatataaaatcacttggtgattaaaaaaataactgctccataaataaaactcctaaagtcacttatgttta

SEQ ID NO: 34465 - DNA, 6662 bp, Homo sapiens
taaaggcagcaaatagtgaccaaacgaatgtttttaggcaaatacattggtgaaggcctccttcagtcaaaagttttgctcttgttgcccaggctggaatgcaatggcacgatcttggctcactgcaacctccacctcccaggttcaagcgattctcctgcgtcagcctcctgagtagctgggattacagcgtggtaccatgcgacgacgctatgaagatgatggcatttcagatgatgaaattgaaggaaaaagaacttttgacttggaagagaaactgcacaccaacaaatataatgccaattttgttacttttatggaaggaaaagattttaatgtagagtatattcagcggggtggcttgagagatcctctgattttcaagaattctgatggactcggaataaaaatgccggatccagacttcactgtgaatgatgtcaaaatgtgtgtggggagtcgtcgcatggtggatgtcatggacgtgaacacacagaaaggcattgaaatgaccatggctcagtggacacgctactatgagaccccagaggaggagcgagagaaactctataatgtcatcagcctcgagtttagccacaccaggctggagaatatggtgcagaggccctccacggtggatttcattgactgggtagacaacatgtggccaaggcacttgaaggaaagccagactgaatcaacaaatgccatcttggagatgcagtaccctaaagtgcagaagtaagtgatgcgccctgcatcttcctccgtgtgctgtgggagaccaaagcaatagcaaggattggcttctcccttacgagctttgctctgtgtcttgaatgattaaaaagatgaattatttaaagatgagactttacagttccacaaggaagagtgtatgtgagcataccatagcacacaaccacacagttaaaggaaaaaaaacttacattttagtcaatacggtagaaaaaaaaaaaacctttttctgataatgtgatgacttgaaaatgcattgctttttctccttctggaacttaagattaagtggaagataaagggagtatataagaggagagtatggcattttggtggggcagatgtacttttttccatcagtacactaatgctgctgctttttttgggtcaggtactgtctaatgagtgttcgaggctgctatactgacttccatgtggactttggtggtacctctgtttggtatcacatccatcaagggggaaaggtcttctggctcatcccccctacagcccacaacctggagctgtacgagaattggctgctgtcagggaaacagggagacatctttctgggtgaccgggtatcagattgtcagcgcattgagctcaagcagggctataccttcgtcattccctcaggctggattcatgctgtgtatactcctacagacacattagtgtttgggggcaattttttgcatagcttcaacatccctatgcagttaaaaatatacaacattgaagatcggacacgggttccaaataagtttcgctatccattctactatgagatgtgttggtatgtgttggagcgctatgtgtactgcataaccaaccgttcccacctaaccaaggaatttcagaaagagtccctcagcatggatttggagttaaatgggttggagtctgggaatggggatgaggaagcagtggatcgagaaccccgacgcttgagcagcaggcgttctgtcctcactagccctgtagcgaatggagtcaacctggattatgatggactgggcaaaacctgccgaagtcttccaagtctgaagaaaactttggctggggactcatcttctgactgtagccggggctcccacaatggacaagtgtgggatccccagtgtgctccccgaaaggacaggcaagtgcatctgacccattttgagcttgaaggccttcgctgccttgtagataagttggagtctctgccactgcacaagaaatgtgtccccacagggatagaagatgaagatgctctcattgctgatgtaaagattttgctggaggagcttgccaacagcgatcccaagttagccctcactggagttcctatagtacagtggccaaaaagggataagcttaaattccccactcggccaaaggtgcgggttcctaccatccccattacgaagcctcacactatgaaaccagctccacggttaacacctgtgaggccagctgctgcctccccgattgtgtcaggagccagacggagacgagtgcgatgtcgaaaatgcaaagcctgtgtgcaaggagagtgtggtgtttgccactactgcagagacatgaagaagtttggggggcctggacgcatgaagcagtcctgtgtcctccgacagtgcttggcacccagactgcctcactcagtcacatgttccctctgtggagaggtggatcagaatgaagagacacaagactttgagaagaaactcatggaatgctgtatctgcaatgagattgttcatcctggctgcctccagatggacggagaggggttgcttaacgaagaattgccaaattgctgggaatgtccaaagtgctaccaggaggacagctcggagaaagcccagaagcggaaaatggaagagagtgacgaagaagctgtgcaagccaaagtcctgcggcccctgcggagctgcgatgagcctctcacgcccccgcctcattcacccacttccatgctgcagctcatccatgacccggtttccccccggggtatggtgactcggtcatcccctggggctggccccagcgaccaccacagtgccagccgcgatgagcgcttcaaacggcggcagttgctgcggctgcaggccacagagcgcaccatggtacgggaaaaggagaacaatcccagcggcaaaaaggagctgtctgaagttgagaaagccaagatccggggatcgtacctcactgtcacgctacagaggcccaccaaagagctccacgggacatccattgtgcccaagctgcaggccatcacggcctcctctgccaaccttcgccattccccccgtgtgctagtgcagcactgcccagcccgaaccccccagcgtggggatgaggaggggctggggggagaggaggaggaagaggaggaggaggaggaggaagatgacagtgcagaggaggggggtgcagccaggctgaatggccggggcagttgggctcaggatggagacgaaagctggatgcagcgggaggtctggatgtctgtcttccgctacctcagccgcagagaactttgtgaatgtatgcgagtgtgcaagacgtggtataaatggtgctgcgacaagagactttggacaaaaattgacttgagtaggtgtaaggccattgtgccccaggccctcagtggcatcatcaagaggcagccagtcagccttgacctcagttggaccaacatctctaaaaagcaactgacatggctcgtcaataggctgccaggactgaaagacctcctcctagcaggctgctcctggtctgcagtctctgccctcagcacctccagctgcccccttctcaggacccttgatcttcggtgggcagtaggaatcaaggaccctcaaattcgggacttgcttactccaccggctgataaaccaggtcaggacaatcgcagcaagctccggaacatgaccgacttccggctggcaggccttgacatcacagatgccacgcttcgcctcataattcgccacatgcccctcctgtctcgactcgacctcagtcactgcagccaccttacagatcagtcctccaatctactcactgctgtcgggtcttccactcgctactctctcacagagctcaatatggcaggttgcaataaattgacagaccagaccctgatctacctacggcgcattgccaacgtcaccttgatcgaccttcgaggatgcaagcagatcactcgaaaagcctgcgagcacttcatctcagacttgtccatcaacagcctctactgcctgtctgacgagaagctgatacagaagatcagctaagacacacccagcccagattcaacaggaaaccgatcttcccctgactccccaccgaggagagcctctcctcgaccctgcacgggctctgaggccagcgtcacactccctctctgctctcctgtcccttgagcccttcctctacaggtggggcagagagggtggtggacaccaggcttatctgcctgctcctctccctcctaaggaaaagggagtagcagattgatctgaggggaaagcacaggctgtgctgtcgaggcgcctgctcgcttactcgcctgccaggaggccgggctctcagtttggggtgtttgtgcaaccttcatctgcactgggccctgtgcccctcctccccatccatggtccccagcagtgcctggttctgagcaaactcccagggaagaaaacggccctgtctccatggccaggttcttgtggtgtccagtgcgcgtctctcctccatcacactctcccggcttgcgcaggaggggccagcagccccaggagtcccagacccgtgccgatcacactggtgctgttgagatctcccaaacctcacgtccttaactgtgctctccctcctttcctctcccttgagcttggttctgcccagcactcgtgcttgttcacataattaggtttcccaccccagcctacccgacttacttgctagtctctatgaggtccttattgcacttattggggttgaagctcttcagaggagctggaactgtctaccccagggacacacccatttcgttgctacccaagtggattctgagacaggcaccatctccttgttccccctctctcttttgcctcccactgactgcccttttccatgtgtcttcattctgcctgaagaaggctttcccaggatgcacgtcctcagagggagcagcctatctcccccaagctggaggcggcagaggactgggccaagccccaacctgcctcccagccaggctcctccaggcctctggtttagcggagccccctgagcccaggcctgtgtctagccccagtggctcactgaactttcagggcagtcagggggtcctgcttagaagccagtcaccagccctctgcctgcagccatggaagggggtgtgcacgtgcctctgtgtgtgtggctgagtgtattctgcgcgtgtgtgtggagggagggagggaggggagcatggtgtctcccgctccaccgccctttgttgagccccatcagctgcccccttttactttgcattgaacggcctgtccaaagatcctctctctagggcagcagagagctttttgcactttaaaaaaaaaaagaaagaaagaaaggtcggaatttcttttgggtcaatatttttaagtgtgtgaggagatgctcagtagcagcagcctatggcaagagcttataaatgattgatgcaaatttgcactctgctccccctctgtaaggatactgatagcacaacctcttccccccaccccgccccgccttttggtcgtccatccctgtccctttctggccctcttcctgtagcccagtctcaggctttcctcttcctgaagccctacagagttagggaatggagcccaggcaccaggggtctaaagtgtgagccactgagaagagagacgccaactgcacccttgccacttccaaagcaatagaggcagagtggtcccctctttgccacctaggccagttttgaccctggcattaactggccttagaagaaactggatcctggtagggggtggcattttgtttgtttcttccaatctgctgaatcttttgactgcaccttacaaacagcagtctgctcccatgaccctctgcccacttccattggtctccaggccccaataatctggggttgaaactttgaggaaatgccagtgacttattccagagtgcctcagttaggggaacttctctgtaaagaaccctgggtattgagcaaaaaccttattatcgttaatgacctataattggaagcttcctgcctttttctttggttgctcctgtggaaaatactgaaaagattactttgttttattttgttgtctttttataaaaggggaggtggagagaccccttcagagcagggattgtgccgggagagtgcctctgactttgggacatttcatccacagaaatttccaagccaatggtttcttttgggttttggtttttatgtttgttttttggggtttggaaaaacatgcatttttaccgtgcacgtaaattggtcagcagaaaagggagcccagaaaaggcagcagatggaccatgcccttgctgggttttccttttctttgggactgtgaggggaaatggtttttagaggtgagggttggtccatgtggaggaaagaagtgtctctgttgggggacagaggaacctggggagtccatcgcatgtcctacaatctgctcttagacacggccttgccaggagagcctgccctcagactgcaggaccagaacccctgcctccatctttccaagcaccggggcgaaaaaccacaaaggaaaggaagaaaatttatatatatataatataaaatcacttggtgattaaaaaaataactgctccataaataaaactcctaaagtcacttatgttta

SEQ ID NO: 34466 - DNA, 7282 bp, Homo sapiens
agcaactgtttgctcccttttcctggtcgctctgaccctctctggatactgggttgatccacggaaaaaccgaagacgacgtttgggatttaattattcctctcagctttggaatcttttacttctcacttggacaagaactcaagagcagaatctccgtgttgcaatctggttcctaaggaggaagaggaaggcagccctggagtggtttctttacagtaatttcaacagaagagtgagagatggaacccgaagaagaaaggattcgttacagccagagattgcgtggtaccatgcgacgacgctatgaagatgatggcatttcagatgatgaaattgaaggaaaaagaacttttgacttggaagagaaactgcacaccaacaaatataatgccaattttgttacttttatggaaggaaaagattttaatgtagagtatattcagcggggtggcttgagagatcctctgattttcaagaattctgatggactcggaataaaaatgccggatccagacttcactgtgaatgatgtcaaaatgtgtgtggggagtcgtcgcatggtggatgtcatggacgtgaacacacagaaaggcattgaaatgaccatggctcagtggacacgctactatgagaccccagaggaggagcgagagaaactctataatgtcatcagcctcgagtttagccacaccaggctggagaatatggtgcagaggccctccacggtggatttcattgactgggtagacaacatgtggccaaggcacttgaaggaaagccagactgaatcaacaaatgccatcttggagatgcagtaccctaaagtgcagaagtaagtgatgcgccctgcatcttcctccgtgtgctgtgggagaccaaagcaatagcaaggattggcttctcccttacgagctttgctctgtgtcttgaatgattaaaaagatgaattatttaaagatgagactttacagttccacaaggaagagtgtatgtgagcataccatagcacacaaccacacagttaaaggaaaaaaaacttacattttagtcaatacggtagaaaaaaaaaaaacctttttctgataatgtgatgacttgaaaatgcattgctttttctccttctggaacttaagattaagtggaagataaagggagtatataagaggagagtatggcattttggtggggcagatgtacttttttccatcagtacactaatgctgctgctttttttgggtcaggtactgtctaatgagtgttcgaggctgctatactgacttccatgtggactttggtggtacctctgtttggtatcacatccatcaagggggaaaggtcttctggctcatcccccctacagcccacaacctggagctgtacgagaattggctgctgtcagggaaacagggagacatctttctgggtgaccgggtatcagattgtcagcgcattgagctcaagcagggctataccttcgtcattccctcaggctggattcatgctgtgtatactcctacagacacattagtgtttgggggcaattttttgcatagcttcaacatccctatgcagttaaaaatatacaacattgaagatcggacacgggttccaaataagtttcgctatccattctactatgagatgtgttggtatgtgttggagcgctatgtgtactgcataaccaaccgttcccacctaaccaaggaatttcagaaagagtccctcagcatggatttggagttaaatgggttggagtctgggaatggggatgaggaagcagtggatcgagaaccccgacgcttgagcagcaggcgttctgtcctcactagccctgtagcgaatggagtcaacctggattatgatggactgggcaaaacctgccgaagtcttccaagtctgaagaaaactttggctggggactcatcttctgactgtagccggggctcccacaatggacaagtgtgggatccccagtgtgctccccgaaaggacaggcaagtgcatctgacccattttgagcttgaaggccttcgctgccttgtagataagttggagtctctgccactgcacaagaaatgtgtccccacagggatagaagatgaagatgctctcattgctgatgtaaagattttgctggaggagcttgccaacagcgatcccaagttagccctcactggagttcctatagtacagtggccaaaaagggataagcttaaattccccactcggccaaaggtgcgggttcctaccatccccattacgaagcctcacactatgaaaccagctccacggttaacacctgtgaggccagctgctgcctccccgattgtgtcaggagccagacggagacgagtgcgatgtcgaaaatgcaaagcctgtgtgcaaggagagtgtggtgtttgccactactgcagagacatgaagaagtttggggggcctggacgcatgaagcagtcctgtgtcctccgacagtgcttggcagtgagtgatctgctgggtaaagaattttggggaggggtggcagtgccaaaggaactgaaatacatatagtgtagagttaaagagacttcagagttggaaagaaaaggtttatactctctttttggctttattttgtaccttttttccccaggtttagatagaaggtatctagtactaaaaatccgatttaatctttaggctttacctaattttcaaacaagagattagcatttgaagggcaaatcattgctttctttcccctcttcaggtagattagaaaggaccggggaggccaagtataggccaactgaaaataaactagtctctggtgcccaggtggttgagtcctcctcttccccagtcatttttcctacccaaaacctccgttctctccaccctgcctccatgcttccaggtgtttagtagagaattataggacccaaatctcccatcttcagtttaagggaaactgaaatgataaagatctgagtcagttctcttggattctatctttgtcctcttgtagcccagactgcctcactcagtcacatgttccctctgtggagaggtggatcagaatgaagagacacaagactttgagaagaaactcatggaatgctgtatctgcaatgagattgttcatcctggctgcctccagatggacggagaggggttgcttaacgaagaattgccaaattgctgggaatgtccaaagtgctaccaggaggacagctcggagaaagcccagaagcggaaaatggaagagagtgacgaagaagctgtgcaagccaaagtcctgcggcccctgcggagctgcgatgagcctctcacgcccccgcctcattcacccacttccatgctgcagctcatccatgacccggtttccccccggggtatggtgactcggtcatcccctggggctggccccagcgaccaccacagtgccagccgcgatgagcgcttcaaacggcggcagttgctgcggctgcaggccacagagcgcaccatggtacgggaaaaggagaacaatcccagcggcaaaaaggagctgtctgaagttgagaaagccaagatccggggatcgtacctcactgtcacgctacagaggcccaccaaagagctccacgggacatccattgtgcccaagctgcaggccatcacggcctcctctgccaaccttcgccattccccccgtgtgctagtgcagcactgcccagcccgaaccccccagcgtggggatgaggaggggctggggggagaggaggaggaagaggaggaggaggaggaggaagatgacagtgcagaggaggggggtgcagccaggctgaatggccggggcagttgggctcaggatggagacgaaagctggatgcagcgggaggtctggatgtctgtcttccgctacctcagccgcagagaactttgtgaatgtatgcgagtgtgcaagacgtggtataaatggtgctgcgacaagagactttggacaaaaattgacttgagtaggtgtaaggccattgtgccccaggccctcagtggcatcatcaagaggcagccagtcagccttgacctcagttggaccaacatctctaaaaagcaactgacatggctcgtcaataggctgccaggactgaaagacctcctcctagcaggctgctcctggtctgcagtctctgccctcagcacctccagctgcccccttctcaggacccttgatcttcggtgggcagtaggaatcaaggaccctcaaattcgggacttgcttactccaccggctgataaaccaggtcaggacaatcgcagcaagctccggaacatgaccgacttccggctggcaggccttgacatcacagatgccacgcttcgcctcataattcgccacatgcccctcctgtctcgactcgacctcagtcactgcagccaccttacagatcagtcctccaatctactcactgctgtcgggtcttccactcgctactctctcacagagctcaatatggcaggttgcaataaattgacagaccagaccctgatctacctacggcgcattgccaacgtcaccttgatcgaccttcgaggatgcaagcagatcactcgaaaagcctgcgagcacttcatctcagacttgtccatcaacagcctctactgcctgtctgacgagaagctgatacagaagatcagctaagacacacccagcccagattcaacaggaaaccgatcttcccctgactccccaccgaggagagcctctcctcgaccctgcacgggctctgaggccagcgtcacactccctctctgctctcctgtcccttgagcccttcctctacaggtggggcagagagggtggtggacaccaggcttatctgcctgctcctctccctcctaaggaaaagggagtagcagattgatctgaggggaaagcacaggctgtgctgtcgaggcgcctgctcgcttactcgcctgccaggaggccgggctctcagtttggggtgtttgtgcaaccttcatctgcactgggccctgtgcccctcctccccatccatggtccccagcagtgcctggttctgagcaaactcccagggaagaaaacggccctgtctccatggccaggttcttgtggtgtccagtgcgcgtctctcctccatcacactctcccggcttgcgcaggaggggccagcagccccaggagtcccagacccgtgccgatcacactggtgctgttgagatctcccaaacctcacgtccttaactgtgctctccctcctttcctctcccttgagcttggttctgcccagcactcgtgcttgttcacataattaggtttcccaccccagcctacccgacttacttgctagtctctatgaggtccttattgcacttattggggttgaagctcttcagaggagctggaactgtctaccccagggacacacccatttcgttgctacccaagtggattctgagacaggcaccatctccttgttccccctctctcttttgcctcccactgactgcccttttccatgtgtcttcattctgcctgaagaaggctttcccaggatgcacgtcctcagagggagcagcctatctcccccaagctggaggcggcagaggactgggccaagccccaacctgcctcccagccaggctcctccaggcctctggtttagcggagccccctgagcccaggcctgtgtctagccccagtggctcactgaactttcagggcagtcagggggtcctgcttagaagccagtcaccagccctctgcctgcagccatggaagggggtgtgcacgtgcctctgtgtgtgtggctgagtgtattctgcgcgtgtgtgtggagggagggagggaggggagcatggtgtctcccgctccaccgccctttgttgagccccatcagctgcccccttttactttgcattgaacggcctgtccaaagatcctctctctagggcagcagagagctttttgcactttaaaaaaaaaaagaaagaaagaaaggtcggaatttcttttgggtcaatatttttaagtgtgtgaggagatgctcagtagcagcagcctatggcaagagcttataaatgattgatgcaaatttgcactctgctccccctctgtaaggatactgatagcacaacctcttccccccaccccgccccgccttttggtcgtccatccctgtccctttctggccctcttcctgtagcccagtctcaggctttcctcttcctgaagccctacagagttagggaatggagcccaggcaccaggggtctaaagtgtgagccactgagaagagagacgccaactgcacccttgccacttccaaagcaatagaggcagagtggtcccctctttgccacctaggccagttttgaccctggcattaactggccttagaagaaactggatcctggtagggggtggcattttgtttgtttcttccaatctgctgaatcttttgactgcaccttacaaacagcagtctgctcccatgaccctctgcccacttccattggtctccaggccccaataatctggggttgaaactttgaggaaatgccagtgacttattccagagtgcctcagttaggggaacttctctgtaaagaaccctgggtattgagcaaaaaccttattatcgttaatgacctataattggaagcttcctgcctttttctttggttgctcctgtggaaaatactgaaaagattactttgttttattttgttgtctttttataaaaggggaggtggagagaccccttcagagcagggattgtgccgggagagtgcctctgactttgggacatttcatccacagaaatttccaagccaatggtttcttttgggttttggtttttatgtttgttttttggggtttggaaaaacatgcatttttaccgtgcacgtaaattggtcagcagaaaagggagcccagaaaaggcagcagatggaccatgcccttgctgggttttccttttctttgggactgtgaggggaaatggtttttagaggtgagggttggtccatgtggaggaaagaagtgtctctgttgggggacagaggaacctggggagtccatcgcatgtcctacaatctgctcttagacacggccttgccaggagagcctgccctcagactgcaggaccagaacccctgcctccatctttccaagcaccggggcgaaaaaccacaaaggaaaggaagaaaatttatatatatataatataaaatcacttggtgattaaaaaaataactgctccataaataaaactcctaaagtcacttatgttta

SEQ ID NO: 34467 - DNA, 7198 bp, Homo sapiens
agcaactgtttgctcccttttcctggtcgctctgaccctctctggatactgggttgatccacggaaaaaccgaagacgacgtttgggatttaattattcctctcagctttggaatcttttacttctcacttggacaagaactcaagagcagaatctccgtgttgcaatctggttcctaaggaggaagaggaaggcagccctggagtggtttctttacagtaatttcaacagaagagtgagagatggaacccgaagaagaaaggattcgttacagccagagattgcgtggtaccatgcgacgacgctatgaagatgatggcatttcagatgatgaaattgaaggaaaaagaacttttgacttggaagagaaactgcacaccaacaaatataatgccaattttgttacttttatggaaggaaaagattttaatgtagagtatattcagcggggtggcttgagagatcctctgattttcaagaattctgatggactcggaataaaaatgccggatccagacttcactgtgaatgatgtcaaaatgtgtgtggggagtcgtcgcatggtggatgtcatggacgtgaacacacagaaaggcattgaaatgaccatggctcagtggacacgctactatgagaccccagaggaggagcgagagaaactctataatgtcatcagcctcgagtttagccacaccaggctggagaatatggtgcagaggccctccacggtggatttcattgactgggtagacaacatgtggccaaggcacttgaaggaaagccagactgaatcaacaaatgccatcttggagatgcagtaccctaaagtgcagaagtaagtgatgcgccctgcatcttcctccgtgtgctgtgggagaccaaagcaatagcaaggattggcttctcccttacgagctttgctctgtgtcttgaatgattaaaaagatgaattatttaaagatgagactttacagttccacaaggaagagtgtatgtgagcataccatagcacacaaccacacagttaaaggaaaaaaaacttacattttagtcaatacggtagaaaaaaaaaaaacctttttctgataatgtgatgacttgaaaatgcattgctttttctccttctggaacttaagattaagtggaagataaagggagtatataagaggagagtatggcattttggtggggcagatgtacttttttccatcagtacactaatgctgctgctttttttgggtcaggtactgtctaatgagtgttcgaggctgctatactgacttccatgtggactttggtggtacctctgtttggtatcacatccatcaagggggaaaggtcttctggctcatcccccctacagcccacaacctggagctgtacgagaattggctgctgtcagggaaacagggagacatctttctgggtgaccgggtatcagattgtcagcgcattgagctcaagcagggctataccttcgtcattccctcaggctggattcatgctgtgtatactcctacagacacattagtgtttgggggcaattttttgcatagcttcaacatccctatgcagttaaaaatatacaacattgaagatcggacacgggttccaaataagtttcgctatccattctactatgagatgtgttggtatgtgttggagcgctatgtgtactgcataaccaaccgttcccacctaaccaaggaatttcagaaagagtccctcagcatggatttggagttaaatgggttggagtctgggaatggggatgaggaagcagtggatcgagaaccccgacgcttgagcagcaggcgttctgtcctcactagccctgtagcgaatggagtcaacctggattatgatggactgggcaaaacctgccgaagtcttccaagtctgaagaaaactttggctggggactcatcttctgactgtagccggggctcccacaatggacaagtgtgggatccccagtgtgctccccgaaaggacaggcaagtgcatctgacccattttgagcttgaaggccttcgctgccttgtagataagttggagtctctgccactgcacaagaaatgtgtccccacagggatagaagatgaagatgctctcattgctgatgtaaagcttaaattccccactcggccaaaggtgcgggttcctaccatccccattacgaagcctcacactatgaaaccagctccacggttaacacctgtgaggccagctgctgcctccccgattgtgtcaggagccagacggagacgagtgcgatgtcgaaaatgcaaagcctgtgtgcaaggagagtgtggtgtttgccactactgcagagacatgaagaagtttggggggcctggacgcatgaagcagtcctgtgtcctccgacagtgcttggcagtgagtgatctgctgggtaaagaattttggggaggggtggcagtgccaaaggaactgaaatacatatagtgtagagttaaagagacttcagagttggaaagaaaaggtttatactctctttttggctttattttgtaccttttttccccaggtttagatagaaggtatctagtactaaaaatccgatttaatctttaggctttacctaattttcaaacaagagattagcatttgaagggcaaatcattgctttctttcccctcttcaggtagattagaaaggaccggggaggccaagtataggccaactgaaaataaactagtctctggtgcccaggtggttgagtcctcctcttccccagtcatttttcctacccaaaacctccgttctctccaccctgcctccatgcttccaggtgtttagtagagaattataggacccaaatctcccatcttcagtttaagggaaactgaaatgataaagatctgagtcagttctcttggattctatctttgtcctcttgtagcccagactgcctcactcagtcacatgttccctctgtggagaggtggatcagaatgaagagacacaagactttgagaagaaactcatggaatgctgtatctgcaatgagattgttcatcctggctgcctccagatggacggagaggggttgcttaacgaagaattgccaaattgctgggaatgtccaaagtgctaccaggaggacagctcggagaaagcccagaagcggaaaatggaagagagtgacgaagaagctgtgcaagccaaagtcctgcggcccctgcggagctgcgatgagcctctcacgcccccgcctcattcacccacttccatgctgcagctcatccatgacccggtttccccccggggtatggtgactcggtcatcccctggggctggccccagcgaccaccacagtgccagccgcgatgagcgcttcaaacggcggcagttgctgcggctgcaggccacagagcgcaccatggtacgggaaaaggagaacaatcccagcggcaaaaaggagctgtctgaagttgagaaagccaagatccggggatcgtacctcactgtcacgctacagaggcccaccaaagagctccacgggacatccattgtgcccaagctgcaggccatcacggcctcctctgccaaccttcgccattccccccgtgtgctagtgcagcactgcccagcccgaaccccccagcgtggggatgaggaggggctggggggagaggaggaggaagaggaggaggaggaggaggaagatgacagtgcagaggaggggggtgcagccaggctgaatggccggggcagttgggctcaggatggagacgaaagctggatgcagcgggaggtctggatgtctgtcttccgctacctcagccgcagagaactttgtgaatgtatgcgagtgtgcaagacgtggtataaatggtgctgcgacaagagactttggacaaaaattgacttgagtaggtgtaaggccattgtgccccaggccctcagtggcatcatcaagaggcagccagtcagccttgacctcagttggaccaacatctctaaaaagcaactgacatggctcgtcaataggctgccaggactgaaagacctcctcctagcaggctgctcctggtctgcagtctctgccctcagcacctccagctgcccccttctcaggacccttgatcttcggtgggcagtaggaatcaaggaccctcaaattcgggacttgcttactccaccggctgataaaccaggtcaggacaatcgcagcaagctccggaacatgaccgacttccggctggcaggccttgacatcacagatgccacgcttcgcctcataattcgccacatgcccctcctgtctcgactcgacctcagtcactgcagccaccttacagatcagtcctccaatctactcactgctgtcgggtcttccactcgctactctctcacagagctcaatatggcaggttgcaataaattgacagaccagaccctgatctacctacggcgcattgccaacgtcaccttgatcgaccttcgaggatgcaagcagatcactcgaaaagcctgcgagcacttcatctcagacttgtccatcaacagcctctactgcctgtctgacgagaagctgatacagaagatcagctaagacacacccagcccagattcaacaggaaaccgatcttcccctgactccccaccgaggagagcctctcctcgaccctgcacgggctctgaggccagcgtcacactccctctctgctctcctgtcccttgagcccttcctctacaggtggggcagagagggtggtggacaccaggcttatctgcctgctcctctccctcctaaggaaaagggagtagcagattgatctgaggggaaagcacaggctgtgctgtcgaggcgcctgctcgcttactcgcctgccaggaggccgggctctcagtttggggtgtttgtgcaaccttcatctgcactgggccctgtgcccctcctccccatccatggtccccagcagtgcctggttctgagcaaactcccagggaagaaaacggccctgtctccatggccaggttcttgtggtgtccagtgcgcgtctctcctccatcacactctcccggcttgcgcaggaggggccagcagccccaggagtcccagacccgtgccgatcacactggtgctgttgagatctcccaaacctcacgtccttaactgtgctctccctcctttcctctcccttgagcttggttctgcccagcactcgtgcttgttcacataattaggtttcccaccccagcctacccgacttacttgctagtctctatgaggtccttattgcacttattggggttgaagctcttcagaggagctggaactgtctaccccagggacacacccatttcgttgctacccaagtggattctgagacaggcaccatctccttgttccccctctctcttttgcctcccactgactgcccttttccatgtgtcttcattctgcctgaagaaggctttcccaggatgcacgtcctcagagggagcagcctatctcccccaagctggaggcggcagaggactgggccaagccccaacctgcctcccagccaggctcctccaggcctctggtttagcggagccccctgagcccaggcctgtgtctagccccagtggctcactgaactttcagggcagtcagggggtcctgcttagaagccagtcaccagccctctgcctgcagccatggaagggggtgtgcacgtgcctctgtgtgtgtggctgagtgtattctgcgcgtgtgtgtggagggagggagggaggggagcatggtgtctcccgctccaccgccctttgttgagccccatcagctgcccccttttactttgcattgaacggcctgtccaaagatcctctctctagggcagcagagagctttttgcactttaaaaaaaaaaagaaagaaagaaaggtcggaatttcttttgggtcaatatttttaagtgtgtgaggagatgctcagtagcagcagcctatggcaagagcttataaatgattgatgcaaatttgcactctgctccccctctgtaaggatactgatagcacaacctcttccccccaccccgccccgccttttggtcgtccatccctgtccctttctggccctcttcctgtagcccagtctcaggctttcctcttcctgaagccctacagagttagggaatggagcccaggcaccaggggtctaaagtgtgagccactgagaagagagacgccaactgcacccttgccacttccaaagcaatagaggcagagtggtcccctctttgccacctaggccagttttgaccctggcattaactggccttagaagaaactggatcctggtagggggtggcattttgtttgtttcttccaatctgctgaatcttttgactgcaccttacaaacagcagtctgctcccatgaccctctgcccacttccattggtctccaggccccaataatctggggttgaaactttgaggaaatgccagtgacttattccagagtgcctcagttaggggaacttctctgtaaagaaccctgggtattgagcaaaaaccttattatcgttaatgacctataattggaagcttcctgcctttttctttggttgctcctgtggaaaatactgaaaagattactttgttttattttgttgtctttttataaaaggggaggtggagagaccccttcagagcagggattgtgccgggagagtgcctctgactttgggacatttcatccacagaaatttccaagccaatggtttcttttgggttttggtttttatgtttgttttttggggtttggaaaaacatgcatttttaccgtgcacgtaaattggtcagcagaaaagggagcccagaaaaggcagcagatggaccatgcccttgctgggttttccttttctttgggactgtgaggggaaatggtttttagaggtgagggttggtccatgtggaggaaagaagtgtctctgttgggggacagaggaacctggggagtccatcgcatgtcctacaatctgctcttagacacggccttgccaggagagcctgccctcagactgcaggaccagaacccctgcctccatctttccaagcaccggggcgaaaaaccacaaaggaaaggaagaaaatttatatatatataatataaaatcacttggtgattaaaaaaataactgctccataaataaaactcctaaagtcacttatgttta

SEQ ID NO: 34468 - DNA, 4891 bp, Homo sapiens
caggaagccgcggctgagctgaagggctcgagaaggagcccagagcgctgcacgctgctccctctgggtagtctgaagggtcagagctggactgccctgccctatgtgctctgggagattccagaatattcaagtaaatccggattttcccagaggcagaatatctaactccttcaggagaacttccagtacagaaaacaaaacaaagacgctggggaaacttcaccaagagcctcggcagctccagagcgacgggaaacgaaagattttgctggaggagcttgccaacagcgatcccaagttagccctcactggagttcctatagtacagtggccaaaaagggataagcttaaattccccactcggccaaaggtgcgggttcctaccatccccattacgaagcctcacactatgaaaccagctccacggttaacacctgtgaggccagctgctgcctccccgattgtgtcaggagccagacggagacgagtgcgatgtcgaaaatgcaaagcctgtgtgcaaggagagtgtggtgtttgccactactgcagagacatgaagaagtttggggggcctggacgcatgaagcagtcctgtgtcctccgacagtgcttggcacccagactgcctcactcagtcacatgttccctctgtggagaggtggatcagaatgaagagacacaagactttgagaagaaactcatggaatgctgtatctgcaatgagattgttcatcctggctgcctccagatggacggagaggggttgcttaacgaagaattgccaaattgctgggaatgtccaaagtgctaccaggaggacagctcggagaaagcccagaagcggaaaatggaagagagtgacgaagaagctgtgcaagccaaagtcctgcggcccctgcggagctgcgatgagcctctcacgcccccgcctcattcacccacttccatgctgcagctcatccatgacccggtttccccccggggtatggtgactcggtcatcccctggggctggccccagcgaccaccacagtgccagccgcgatgagcgcttcaaacggcggcagttgctgcggctgcaggccacagagcgcaccatggtacgggaaaaggagaacaatcccagcggcaaaaaggagctgtctgaagttgagaaagccaagatccggggatcgtacctcactgtcacgctacagaggcccaccaaagagctccacgggacatccattgtgcccaagctgcaggccatcacggcctcctctgccaaccttcgccattccccccgtgtgctagtgcagcactgcccagcccgaaccccccagcgtggggatgaggaggggctggggggagaggaggaggaagaggaggaggaggaggaggaagatgacagtgcagaggaggggggtgcagccaggctgaatggccggggcagttgggctcaggatggagacgaaagctggatgcagcgggaggtctggatgtctgtcttccgctacctcagccgcagagaactttgtgaatgtatgcgagtgtgcaagacgtggtataaatggtgctgcgacaagagactttggacaaaaattgacttgagtaggtgtaaggccattgtgccccaggccctcagtggcatcatcaagaggcagccagtcagccttgacctcagttggaccaacatctctaaaaagcaactgacatggctcgtcaataggctgccaggactgaaagacctcctcctagcaggctgctcctggtctgcagtctctgccctcagcacctccagctgcccccttctcaggacccttgatcttcggtgggcagtaggaatcaaggaccctcaaattcgggacttgcttactccaccggctgataaaccaggtcaggacaatcgcagcaagctccggaacatgaccgacttccggctggcaggccttgacatcacagatgccacgcttcgcctcataattcgccacatgcccctcctgtctcgactcgacctcagtcactgcagccaccttacagatcagtcctccaatctactcactgctgtcgggtcttccactcgctactctctcacagagctcaatatggcaggttgcaataaattgacagaccagaccctgatctacctacggcgcattgccaacgtcaccttgatcgaccttcgaggatgcaagcagatcactcgaaaagcctgcgagcacttcatctcagacttgtccatcaacagcctctactgcctgtctgacgagaagctgatacagaagatcagctaagacacacccagcccagattcaacaggaaaccgatcttcccctgactccccaccgaggagagcctctcctcgaccctgcacgggctctgaggccagcgtcacactccctctctgctctcctgtcccttgagcccttcctctacaggtggggcagagagggtggtggacaccaggcttatctgcctgctcctctccctcctaaggaaaagggagtagcagattgatctgaggggaaagcacaggctgtgctgtcgaggcgcctgctcgcttactcgcctgccaggaggccgggctctcagtttggggtgtttgtgcaaccttcatctgcactgggccctgtgcccctcctccccatccatggtccccagcagtgcctggttctgagcaaactcccagggaagaaaacggccctgtctccatggccaggttcttgtggtgtccagtgcgcgtctctcctccatcacactctcccggcttgcgcaggaggggccagcagccccaggagtcccagacccgtgccgatcacactggtgctgttgagatctcccaaacctcacgtccttaactgtgctctccctcctttcctctcccttgagcttggttctgcccagcactcgtgcttgttcacataattaggtttcccaccccagcctacccgacttacttgctagtctctatgaggtccttattgcacttattggggttgaagctcttcagaggagctggaactgtctaccccagggacacacccatttcgttgctacccaagtggattctgagacaggcaccatctccttgttccccctctctcttttgcctcccactgactgcccttttccatgtgtcttcattctgcctgaagaaggctttcccaggatgcacgtcctcagagggagcagcctatctcccccaagctggaggcggcagaggactgggccaagccccaacctgcctcccagccaggctcctccaggcctctggtttagcggagccccctgagcccaggcctgtgtctagccccagtggctcactgaactttcagggcagtcagggggtcctgcttagaagccagtcaccagccctctgcctgcagccatggaagggggtgtgcacgtgcctctgtgtgtgtggctgagtgtattctgcgcgtgtgtgtggagggagggagggaggggagcatggtgtctcccgctccaccgccctttgttgagccccatcagctgcccccttttactttgcattgaacggcctgtccaaagatcctctctctagggcagcagagagctttttgcactttaaaaaaaaaaagaaagaaagaaaggtcggaatttcttttgggtcaatatttttaagtgtgtgaggagatgctcagtagcagcagcctatggcaagagcttataaatgattgatgcaaatttgcactctgctccccctctgtaaggatactgatagcacaacctcttccccccaccccgccccgccttttggtcgtccatccctgtccctttctggccctcttcctgtagcccagtctcaggctttcctcttcctgaagccctacagagttagggaatggagcccaggcaccaggggtctaaagtgtgagccactgagaagagagacgccaactgcacccttgccacttccaaagcaatagaggcagagtggtcccctctttgccacctaggccagttttgaccctggcattaactggccttagaagaaactggatcctggtagggggtggcattttgtttgtttcttccaatctgctgaatcttttgactgcaccttacaaacagcagtctgctcccatgaccctctgcccacttccattggtctccaggccccaataatctggggttgaaactttgaggaaatgccagtgacttattccagagtgcctcagttaggggaacttctctgtaaagaaccctgggtattgagcaaaaaccttattatcgttaatgacctataattggaagcttcctgcctttttctttggttgctcctgtggaaaatactgaaaagattactttgttttattttgttgtctttttataaaaggggaggtggagagaccccttcagagcagggattgtgccgggagagtgcctctgactttgggacatttcatccacagaaatttccaagccaatggtttcttttgggttttggtttttatgtttgttttttggggtttggaaaaacatgcatttttaccgtgcacgtaaattggtcagcagaaaagggagcccagaaaaggcagcagatggaccatgcccttgctgggttttccttttctttgggactgtgaggggaaatggtttttagaggtgagggttggtccatgtggaggaaagaagtgtctctgttgggggacagaggaacctggggagtccatcgcatgtcctacaatctgctcttagacacggccttgccaggagagcctgccctcagactgcaggaccagaacccctgcctccatctttccaagcaccggggcgaaaaaccacaaaggaaaggaagaaaatttatatatatataatataaaatcacttggtgattaaaaaaataactgctccataaataaaactcctaaagtcacttatgttta

SEQ ID NO: 34469 - DNA, 6846 bp, Homo sapiens
gtactgaactgggaaagacagcagagcaacagctcaaaatctcgcgtcattctagaagtcaagccaggcacaagggctcatcgggcaaccccaggatggggagaggccaagacaggcgggtcactcgcgcctgcaaccccaggacggggggaggccgagcgggtcactttgaaccctcggaaatccaagagtctgagacctacctaggctacatggggagaccttgtgtctaccaaatatatgctattgaaacttctgaaactaggtttagaagtttcaagagcagaatctccgtgttgcaatctggttcctaaggaggaagaggaaggcagccctggagtggtttctttacagtaatttcaacagaagagtgagagatggaacccgaagaagaaaggattcgttacagccagagattgcgtggtaccatgcgacgacgctatgaagatgatggcatttcagatgatgaaattgaaggaaaaagaacttttgacttggaagagaaactgcacaccaacaaatataatgccaattttgttacttttatggaaggaaaagattttaatgtagagtatattcagcggggtggcttgagagatcctctgattttcaagaattctgatggactcggaataaaaatgccggatccagacttcactgtgaatgatgtcaaaatgtgtgtggggagtcgtcgcatggtggatgtcatggacgtgaacacacagaaaggcattgaaatgaccatggctcagtggacacgctactatgagaccccagaggaggagcgagagaaactctataatgtcatcagcctcgagtttagccacaccaggctggagaatatggtgcagaggccctccacggtggatttcattgactgggtagacaacatgtggccaaggcacttgaaggaaagccagactgaatcaacaaatgccatcttggagatgcagtaccctaaagtgcagaagtactgtctaatgagtgttcgaggctgctatactgacttccatgtggactttggtggtacctctgtttggtatcacatccatcaagggggaaaggtcttctggctcatcccccctacagcccacaacctggagctgtacgagaattggctgctgtcagggaaacagggagacatctttctgggtgaccgggtatcagattgtcagcgcattgagctcaagcagggctataccttcgtcattccctcaggctggattcatgctgtgtatactcctacagacacattagtgtttgggggcaattttttgcatagcttcaacatccctatgcagttaaaaatatacaacattgaagatcggacacgggttccaaataagtttcgctatccattctactatgagatgtgttggtatgtgttggagcgctatgtgtactgcataaccaaccgttcccacctaaccaaggaatttcagaaagagtccctcagcatggatttggagttaaatgggttggagtctgggaatggggatgaggaagcagtggatcgagaaccccgacgcttgagcagcaggcgttctgtcctcactagccctgtagcgaatggagtcaacctggattatgatggactgggcaaaacctgccgaagtcttccaagtctgaagaaaactttggctggggactcatcttctgactgtagccggggctcccacaatggacaagtgtgggatccccagtgtgctccccgaaaggacaggcaagtgcatctgacccattttgagcttgaaggccttcgctgccttgtagataagttggagtctctgccactgcacaagaaatgtgtccccacagggatagaagatgaagatgctctcattgctgatgtaaagattttgctggaggagcttgccaacagcgatcccaagttagccctcactggagttcctatagtacagtggccaaaaagggataagcttaaattccccactcggccaaaggtgcgggttcctaccatccccattacgaagcctcacactatgaaaccagctccacggttaacacctgtgaggccagctgctgcctccccgattgtgtcaggagccagacggagacgagtgcgatgtcgaaaatgcaaagcctgtgtgcaaggagagtgtggtgtttgccactactgcagagacatgaagaagtttggggggcctggacgcatgaagcagtcctgtgtcctccgacagtgcttggcacccagactgcctcactcagtcacatgttccctctgtggagaggtggatcagaatgaagagacacaagactttgagaagaaactcatggaatgctgtatctgcaatgagattgttcatcctggctgcctccagatggacggagaggggttgcttaacgaagaattgccaaattgctgggaatgtccaaagtgctaccaggaggacagctcggagaaagcccagaagcggaaaatggaagagagtgacgaagaagctgtgcaagccaaagtcctgcggcccctgcggagctgcgatgagcctctcacgcccccgcctcattcacccacttccatgctgcagctcatccatgacccggtttccccccggggtatggtgactcggtcatcccctggggctggccccagcgaccaccacagtgccagccgcgatgagcgcttcaaacggcggcagttgctgcggctgcaggccacagagcgcaccatggtacgggaaaaggagaacaatcccagcggcaaaaaggagctgtctgaagttgagaaagccaagatccggggatcgtacctcactgtcacgctacagaggcccaccaaagagctccacgggacatccattgtgcccaagctgcaggccatcacggcctcctctgccaaccttcgccattccccccgtgtgctagtgcagcactgcccagcccgaaccccccagcgtggggatgaggaggggctggggggagaggaggaggaagaggaggaggaggaggaggaagatgacagtgcagaggaggggggtgcagccaggctgaatggccggggcagttgggctcaggatggagacgaaagctggatgcagcgggaggtctggatgtctgtcttccgctacctcagccgcagagaactttgtgaatgtatgcgagtgtgcaagacgtggtataaatggtgctgcgacaagagactttggacaaaaattgacttgagtaggtgtaaggccattgtgccccaggccctcagtggcatcatcaagaggcagccagtcagccttgacctcagttggaccaacatctctaaaaagcaactgacatggctcgtcaataggctgccaggactgaaagacctcctcctagcaggctgctcctggtctgcagtctctgccctcagcacctccagctgcccccttctcaggacccttgatcttcggtgggcagtaggaatcaaggaccctcaaattcgggacttgcttactccaccggctgataaaccaggtcaggacaatcgcagcaagctccggaacatgaccgacttccggctggcaggccttgacatcacagatgccacgcttcgcctcataattcgccacatgcccctcctgtctcgactcgacctcagtcactgcagccaccttacagatcagtcctccaatctactcactgctgtcgggtcttccactcgctactctctcacagagctcaatatggcaggttgcaataaattgacagaccagaccctgatctacctacggcgcattgccaacgtcaccttgatcgaccttcgaggatgcaagcagatcactcgaaaagcctgcgagcacttcatctcagacttgtccatcaacagcctctactgcctgtctgacgagaagctgatacagaagatcagctaagacacacccagcccagattcaacaggaaaccgatcttcccctgactccccaccgaggagagcctctcctcgaccctgcacgggctctgaggccagcgtcacactccctctctgctctcctgtcccttgagcccttcctctacaggtggggcagagagggtggtggacaccaggcttatctgcctgctcctctccctcctaaggaaaagggagtagcagattgatctgaggggaaagcacaggctgtgctgtcgaggcgcctgctcgcttactcgcctgccaggaggccgggctctcagtttggggtgtttgtgcaaccttcatctgcactgggccctgtgcccctcctccccatccatggtccccagcagtgcctggttctgagcaaactcccagggaagaaaacggccctgtctccatggccaggttcttgtggtgtccagtgcgcgtctctcctccatcacactctcccggcttgcgcaggaggggccagcagccccaggagtcccagacccgtgccgatcacactggtgctgttgagatctcccaaacctcacgtccttaactgtgctctccctcctttcctctcccttgagcttggttctgcccagcactcgtgcttgttcacataattaggtttcccaccccagcctacccgacttacttgctagtctctatgaggtccttattgcacttattggggttgaagctcttcagaggagctggaactgtctaccccagggacacacccatttcgttgctacccaagtggattctgagacaggcaccatctccttgttccccctctctcttttgcctcccactgactgcccttttccatgtgtcttcattctgcctgaagaaggctttcccaggatgcacgtcctcagagggagcagcctatctcccccaagctggaggcggcagaggactgggccaagccccaacctgcctcccagccaggctcctccaggcctctggtttagcggagccccctgagcccaggcctgtgtctagccccagtggctcactgaactttcagggcagtcagggggtcctgcttagaagccagtcaccagccctctgcctgcagccatggaagggggtgtgcacgtgcctctgtgtgtgtggctgagtgtattctgcgcgtgtgtgtggagggagggagggaggggagcatggtgtctcccgctccaccgccctttgttgagccccatcagctgcccccttttactttgcattgaacggcctgtccaaagatcctctctctagggcagcagagagctttttgcactttaaaaaaaaaaagaaagaaagaaaggtcggaatttcttttgggtcaatatttttaagtgtgtgaggagatgctcagtagcagcagcctatggcaagagcttataaatgattgatgcaaatttgcactctgctccccctctgtaaggatactgatagcacaacctcttccccccaccccgccccgccttttggtcgtccatccctgtccctttctggccctcttcctgtagcccagtctcaggctttcctcttcctgaagccctacagagttagggaatggagcccaggcaccaggggtctaaagtgtgagccactgagaagagagacgccaactgcacccttgccacttccaaagcaatagaggcagagtggtcccctctttgccacctaggccagttttgaccctggcattaactggccttagaagaaactggatcctggtagggggtggcattttgtttgtttcttccaatctgctgaatcttttgactgcaccttacaaacagcagtctgctcccatgaccctctgcccacttccattggtctccaggccccaataatctggggttgaaactttgaggaaatgccagtgacttattccagagtgcctcagttaggggaacttctctgtaaagaaccctgggtattgagcaaaaaccttattatcgttaatgacctataattggaagcttcctgcctttttctttggttgctcctgtggaaaatactgaaaagattactttgttttattttgttgtctttttataaaaggggaggtggagagaccccttcagagcagggattgtgccgggagagtgcctctgactttgggacatttcatccacagaaatttccaagccaatggtttcttttgggttttggtttttatgtttgttttttggggtttggaaaaacatgcatttttaccgtgcacgtaaattggtcagcagaaaagggagcccatgtgaggggaaatggtttttagaggtgagggttggtccatgtggaggaaagaagtgtctctgttgggggacagaggaacctggggagtccatcgcatgtcctacaatctgctcttagacacggccttgccaggagagcctgccctcagactgcaggaccagaacccctgcctccatctttccaagcaccggggcgaaaaaccacaaaggaaaggaagaaaatttatatatatataatataaaatcacttggtgattaaaaaaataactgctccataaataaaactcctaaagtcacttatgtttaaagggtttggttgtgttttttgtttttcggagaaatattgtaaatatatatttttttgttgctgatttagagtcaatctccaatgttgtgctaaaaagtttaaattaaatgtaagcattaaggggataagtcttatgctatctcagttgacacattgaggttattttgggccagagaaggaggaagctagttggactttgttttgttttccaaaagttctccactattggttttagagagagcaaggacatctttcctctgacacgtgggaatgggtgatatttgtgtaataaaatttttaaaagacaaaaaaagaaatagcctccaatgggaaatattttaatttaggttttgtttttgtttgggggtttttgtttttttaaaaaaataaaaaggctttaaaaacaaaaaataaac

SEQ ID NO: 34470 - DNA, 3158 bp, Homo sapiens
agcaactgtttgctcccttttcctggtcgctctgaccctctctggatactgggttgatccacggaaaaaccgaagacgacgtttgggatttaattattcctctcagctttggaatcttttacttctcacttggacaagaactcaagagcagaatctccgtgttgcaatctggttcctaaggaggaagaggaaggcagccctggagtggtttctttacagtaatttcaacagaagagtgagagatggaacccgaagaagaaaggattcgttacagccagagattgcgtggtaccatgcgacgacgctatgaagatgatggcatttcagatgatgaaattgaaggaaaaagaacttttgacttggaagagaaactgcacaccaacaaatataatgccaattttgttacttttatggaaggaaaagattttaatgtagagtatattcagcggggtggcttgagagatcctctgattttcaagaattctgatggactcggaataaaaatgccggatccagacttcactgtgaatgatgtcaaaatgtgtgtggggagtcgtcgcatggtggatgtcatggacgtgaacacacagaaaggcattgaaatgaccatggctcagtggacacgctactatgagacccgtgccgatcacactggtgctgttgagatctcccaaacctcacgtccttaactgtgctctccctcctttcctctcccttgagcttggttctgcccagcactcgtgcttgttcacataattaggtttcccaccccagcctacccgacttacttgctagtctctatgaggtccttattgcacttattggggttgaagctcttcagaggagctggaactgtctaccccagggacacacccatttcgttgctacccaagtggattctgagacaggcaccatctccttgttccccctctctcttttgcctcccactgactgcccttttccatgtgtcttcattctgcctgaagaaggctttcccaggatgcacgtcctcagagggagcagcctatctcccccaagctggaggcggcagaggactgggccaagccccaacctgcctcccagccaggctcctccaggcctctggtttagcggagccccctgagcccaggcctgtgtctagccccagtggctcactgaactttcagggcagtcagggggtcctgcttagaagccagtcaccagccctctgcctgcagccatggaagggggtgtgcacgtgcctctgtgtgtgtggctgagtgtattctgcgcgtgtgtgtggagggagggagggaggggagcatggtgtctcccgctccaccgccctttgttgagccccatcagctgcccccttttactttgcattgaacggcctgtccaaagatcctctctctagggcagcagagagctttttgcactttaaaaaaaaaaagaaagaaagaaaggtcggaatttcttttgggtcaatatttttaagtgtgtgaggagatgctcagtagcagcagcctatggcaagagcttataaatgattgatgcaaatttgcactctgctccccctctgtaaggatactgatagcacaacctcttccccccaccccgccccgccttttggtcgtccatccctgtccctttctggccctcttcctgtagcccagtctcaggctttcctcttcctgaagccctacagagttagggaatggagcccaggcaccaggggtctaaagtgtgagccactgagaagagagacgccaactgcacccttgccacttccaaagcaatagaggcagagtggtcccctctttgccacctaggccagttttgaccctggcattaactggccttagaagaaactggatcctggtagggggtggcattttgtttgtttcttccaatctgctgaatcttttgactgcaccttacaaacagcagtctgctcccatgaccctctgcccacttccattggtctccaggccccaataatctggggttgaaactttgaggaaatgccagtgacttattccagagtgcctcagttaggggaacttctctgtaaagaaccctgggtattgagcaaaaaccttattatcgttaatgacctataattggaagcttcctgcctttttctttggttgctcctgtggaaaatactgaaaagattactttgttttattttgttgtctttttataaaaggggaggtggagagaccccttcagagcagggattgtgccgggagagtgcctctgactttgggacatttcatccacagaaatttccaagccaatggtttcttttgggttttggtttttatgtttgttttttggggtttggaaaaacatgcatttttaccgtgcacgtaaattggtcagcagaaaagggagcccagaaaaggcagcagatggaccatgcccttgctgggttttccttttctttgggactgtgaggggaaatggtttttagaggtgagggttggtccatgtggaggaaagaagtgtctctgttgggggacagaggaacctggggagtccatcgcatgtcctacaatctgctcttagacacggccttgccaggagagcctgccctcagactgcaggaccagaacccctgcctccatctttccaagcaccggggcgaaaaaccacaaaggaaaggaagaaaatttatatatatataatataaaatcacttggtgattaaaaaaataactgctccataaataaaactcctaaagtcacttatgtttaaagggtttggttgtgttttttgtttttcggagaaatattgtaaatatatatttttttgttgctgatttagagtcaatctccaatgttgtgctaaaaagtttaaattaaatgtaagcattaaggggataagtcttatgctatctcagttgacacattgaggttattttgggccagagaaggaggaagctagttggactttgttttgttttccaaaagttctccactattggttttagagagagcaaggacatctttcctctgacacgtgggaatgggtgatatttgtgtaataaaatttttaaaagacaaaaaaagaaatagcctccaatgggaaatattttaatttaggttttgtttttgtttgggggtttttgtttttttaaaaaaataaaaaggctttaaaaacaaaaaataaac

SEQ ID NO: 34471 - DNA, 3869 bp, Homo sapiens
agcaactgtttgctcccttttcctggtcgctctgaccctctctggatactgggttgatccacggaaaaaccgaagacgacgtttgggatttaattattcctctcagctttggaatcttttacttctcacttggacaagaactcaagagcagaatctccgtgttgcaatctggttcctaaggaggaagaggaaggcagccctggagtggtttctttacagtaatttcaacagaagagtgagagatggaacccgaagaagaaaggattcgttacagccagagattgcgtggtaccatgcgacgacgctatgaagatgatggcatttcagatgatgaaattgaaggaaaaagaacttttgacttggaagagaaactgcacaccaacaaatataatgccaattttgttacttttatggaaggaaaagattttaatgtagagtatattcagcggggtggcttgagagatcctctgattttcaagaattctgatggactcggaataaaaatgccggatccagacttcactgtgaatgatgtcaaaatgtgtgtggggagtcgtcgcatggtggatgtcatggacgtgaacacacagaaaggcattgaaatgaccatggctcagtggacacgctactatgagaccccagaggaggagcgagagaaactctataatgtcatcagcctcgagtttagccacaccaggctggagaatatggtgcagaggccctccacggtggatttcattgactgggtagacaacatgtggccaaggcacttgaaggaaagccagactgaatcaacaaatgccatcttggagatgcagtaccctaaagtgcagaagtaagtgatgcgccctgcatcttcctccgtgtgctgtgggagaccaaagcaatagcaaggattggcttctcccttacgagctttgctctgtgtcttgaatgattaaaaagatgaattatttaaagatgagactttacagttccacaaggaagagtgtatgtgagcataccatagcacacaaccacacagttaaaggaaaaaaaacttacattttagtcaatacggtagaaaaaaaaaaaacctttttctgataatgtgatgacttgaaaatgcattgctttttctccttctggaacttaagattaagtggaagataaagggagtatataagaggagagtatggcattttggtggggcagatgtacttttttccatcagtacactaatgctgctgctttttttgggtcaggtactgtctaatgagtgttcgaggctgctatactgacttccatgtggactttggtggtacctctgtttggtatcacatccatcaagggggaaaggtcttctggctcatcccccctacagcccacaacctggagctgtacgagaattggctgctgtcagggaaacagggagacatctttctgggtgaccgggtatcagattgtcagcgcattgagctcaagcagggctataccttcgtcattccctcaggctggattcatgctgtgtatactcctacagacacattagtgtttgggggcaattttttgcatagcttcaacatccctatgcagttaaaaatatacaacattgaagatcggacacgggttccaaataagtttcgctatccattctactatgagatgtgttggtatgtgttggagcgctatgtgtactgcataaccaaccgttcccacctaaccaaggaatttcagaaagagtccctcagcatggatttggagttaaatgggttggagtctgggaatggggatgaggaagcagtggatcgagaaccccgacgcttgagcagcaggcgttctgtcctcactagccctgtagcgaatggagtcaacctggattatgatggactgggcaaaacctgccgaagtcttccaagtctgaagaaaactttggctggggactcatcttctgactgtagccggggctcccacaatggacaagtgtgggatccccagtgtgctccccgaaaggacaggcaagtgcatctgacccattttgagcttgaaggccttcgctgccttgtagataagttggagtctctgccactgcacaagaaatgtgtccccacagggatagaagatgaagatgctctcattgctgatgtaaagattttgctggaggagcttgccaacagcgatcccaagttagccctcactggagttcctatagtacagtggccaaaaagggataagcttaaattccccactcggccaaaggtgcgggttcctaccatccccattacgaagcctcacactatgaaaccagctccacggttaacacctgtgaggccagctgctgcctccccgattgtgtcaggagccagacggagacgagtgcgatgtcgaaaatgcaaagcctgtgtgcaaggagagtgtggtgtttgccactactgcagagacatgaagaagtttggggggcctggacgcatgaagcagtcctgtgtcctccgacagtgcttggcacccagactgcctcactcagtcacatgttccctctgtggagaggtggatcagaatgaagagacacaagactttgagaagaaactcatggaatgctgtatctgcaatgagattgttcatcctggctgcctccagatggacggagaggggttgcttaacgaagaattgccaaattgctgggaatgtccaaagtgctaccaggaggacagctcggagaaagcccagaagcggaaaatggaagagagtgacgaagaagctgtgcaagccaaagtcctgcggcccctgcggagctgcgatgagcctctcacgcccccgcctcattcacccacttccatgctgcagctcatccatgacccggtttccccccggggtatggtgactcggtcatcccctggggctggccccagcgaccaccacagtgccagccgcgatgagcgcttcaaacggcggcagttgctgcggctgcaggccacagagcgcaccatggtacgggaaaaggagaacaatcccagcggcaaaaaggagctgtctgaagttgagaaagccaagatccggggatcgtacctcactgtcacgctacagaggcccaccaaagagctccacgggacatccattgtgcccaagctgcaggccatcacggcctcctctgccaaccttcgccattccccccgtgtgctagtgcagcactgcccagcccgaaccccccagcgtggggatgaggaggggctggggggagaggaggaggaagaggaggaggaggaggaggaagatgacagtgcagaggaggggggtgcagccaggctgaatggccggggcagttgggctcaggatggagacgaaagctggatgcagcgggaggtctggatgtctgtcttccgctacctcagccgcagagaactttgtgaatgtatgcgagtgtgcaagacgtggtataaatggtgctgcgacaagagactttggacaaaaattgacttgagtaggtgtaaggccattgtgccccaggccctcagtggcatcatcaagaggcagccagtcagccttgacctcagttggaccaacatctctaaaaagcaactgacatggctcgtcaataggctgccaggactgaaagacctcctcctagcaggctgctcctggtctgcagtctctgccctcagcacctccagctgcccccttctcaggacccttgatcttcggtgggcagtaggaatcaaggaccctcaaattcgggacttgcttactccaccggctgataaaccaggtcaggacaatcgcagcaagctccggaacatgaccgacttccggctggcaggccttgacatcacagatgccacgcttcgcctcataattcgccacatagttcagcgtctgacggggatcctctaaag

SEQ ID NO: 34472 - DNA, 13670 bp, Homo sapiens
  misc_feature (1987)..(1987): n is a, c, g, or t
  misc_feature (3143)..(3143): n is a, c, g, or t
ccggcctcgcgttccctcggacggttgcccaatggcagcccaggtggcagcccgggaggcgcgagacttcagagaagccccgacccttcgcctaacctcgggggccggcctggaggcagtgggcgctgtggagctcgaggaggaggaggagaacgaggaggaggcggcggccaggagagcgcggagtttcgcccaagacgcgcgggtgcgcttcctcggcggccgcctggcgatgatgctggggttcacggaggagaaatggagccagtatttggaaagcgaggacaaccggcaggttcttggggagtttctggaaagcaccagcccggcttgccttgtgtttagcttcgccgcctcggggcgccttgcggcttcccaggagattccaagagatgcaaaccataaacttgtttttatttccaagaagattactgaaagcattggagtaaatgacttttctcaagtggttttatttggagagttacctgcgttgtctcttggacatgtatctgctttccttgatgagattttagtgccagttctttctaataagaacaaccataagtcctggtcctgttttacttcacaagatatggaatatcacatagaagtcatgaaaaagaagatgtatatttttaggggcaaaatgtctagaagaactcttctaccaattcccactgttgcaggaaagatggatctggatcagaattgttcagagaacaagccaccgtcaaatgaaaggataatacttcatgcaattgaatctgtggttattgaatggtcacatcaaatccaagaaattatagaaagagattcagtgcagcgtttgttgaatggtcttcacttgtctcctcaagcagaactagatttctggatgatgaggagagaaaatctgtcatgcatttatgatcaacttcaggcacctgttgtcctcaaaatggttaagatcctgacaactaaacaaagcagctattttcctactctgaaggacatttttctggctgtggaaaatgctcttctcgaagcccaagatgtggaactttacctgagacctctgaggagacacatccagtgtctccaggagacggaattcccacagacacgcatattaatcgctccattatttcataccatctgtctgatctggagtcattccaagttttataacaccccagctcgggttatagttttattgcaagagttttgtaatctcttcattaaccaggcaacagcttacctttcacctgaggaccttttgaggggagaaatagaagagtcactggaaaaggtgcaggtggctgttaacatcttaaagactttcaaaaactcctttttcaactatagaaaaaaattggcaagctactttatgggaagaaagctgagaccatgggatttccagtctcatctggtgttttgcagatttgacaagtttcttgatcgtttaataaaaatagaggatatatttgccaccactttggaatttgaaaagctggaaagactggaatttggtggtaccaaaggagcaattttaaatggacaagtccacgagatgagtgaagaacttatggaactctgtaaactttttaaacagagcacttatgacccatctgattgcactaacatggagtttgaaagtgattatgtggcatttaagtccaaaactctggaatttgacagaaggcttgggacaattatttgtgaagctttctttaactgcaatggcttagaagctgcatttaagcttttgaccatatttggaaattttctagagaagccagttgtcatggaaattttcagcctacattacagcacactagtgcatatgtttaatacagagctggatgtgtgtaagcaactgtataatgaacacatgaaacagattgaatgtggtcatgtagttcttaacaagaacatgccatttacctcaggaaatatgaaatgggcccagcaggttctccaacgacttcaaatgttttggtcaaacttngcatctctccgttatctatttttgggcaatcctgatcacgctttagtttatcaaaagtatgttgaaatgaccactttgcttgatcaatttgaaagtcgtatctataatgaatggaaaagtaatgtggatgaaatctgtgaattcaatttgaatcaacccttggttaaattcagtgccataaatggtcttctctgtgtcaattttgacccaaagctagtggctgtattgagagaagtgaaatatcttttgatgttgaagaaacaagacataccagattcagctttagccatcttcaagaaaaggaacactattttaaagtacattggaaatcttgaccttcttgtgcaagggtataataaactcaaacagacgctcctggaagttgaataccctctgattgaagatgagctgagggctattgacgagcagctgacagcagccacaacgtggctgacatggcaggatgactgctggggctacatcgagagggtgagggcagccacgtccgagttggagcacagagttgagcgcacacagaaaaacgtgaaggtgatccagcagaccatgaggggctgggccaggtgcgtgctacctcccaggagagagcacagacgagaggcagccttcaccttggaggacaagggtgatttgtttacaaaaaaatacaagttaatccaaggagatggctgcaagatccacaacttggtcgaggaaaataggaagctcttcaaagccaatccctctctggatacctggaaaatttatgtagaattcattgacgacattgtggtggaaggcttttttcaggctataatgcacgacttagacttctttctgaagaatacagagaaacaattgaaaccggcaccgttttttcaagcacaaatgatcttgttgcctcctgagattgtgtttaaaccttccctagacagagaggctggggatggcttctatgatcttgtagaagaaatgttatgcaatagttttagaatgtctgcccagatgaaccgaatagcaacacacctggaaattaaaaattatcagaatgatatggataacatgttaggcctggcagaggtcaggcaggagatcatgaacagagtggtgaatgtcatcaacaaagtcttagatttcagaaacaccctggagacccacncttacctctgggtggatgatcgagctgagtttatgaagcattttctcttgtatggccatgctgtgtcttccgatgaaatggatgctcatgcaaatgaagaaattcccgaacaaccaccaactcttgagcaattcaaagaacagattgacatttatgaagctttgtatgttcaaatgagcaaatttgaggactttagagtgtttgatagttggttcaaggtggacatgaagcctttcaaagtgagcttgttaaccataattaagaaatggagctggatgtttcaggagcatcttttgagatttgtcattgacagtctgaatgagctacaagaatttataaaggagacagattccggacttcagagagaattaaatgaaggtgatcatgatggtttagttgacatcatggtgcatcttctggctgtaagaagccgacagagagctactgatgaactctttgaacctctaaaagaaacgatcaccctcttggaaagctatggccagaagatgcctgagcaggtctatattcagctagaggaattacctgaaagatgggaaactaccaaaaagatcgcagcaactgtcagacatgaagtctcacctctccataatgcggaagtcactcttataaggaaaaaatgtattttgtttgacgcaaagcaggcagagttcagagagagattcagacactatgcccctcttggatttaatgcagaaaatccatacacagcgcttgataaggcaaatgaagagcttgaggccttagaagaagaaatgttgcagatgcaagaatctactcgtctttttgaagtggctcttccagagtacaaacaaatgaaacagtgtcgcaaagaaataaaattgctcaagggactgtgggatgtcattatttatgttcgaagaagcattgataattggactaaaacccagtggagacagattcatgtggaacagatggatgtagaactcagaaggtttgccaaggcgagttccataactgaaatttggtcactcaacaaggaagtccgcgtctgggatgcttacacgggcctggaaggcacagttaaggacatgacagcctccctgagggccatcacagagttacagagccctgccctcagggacaggcattggcaccagctgatgaaagctattggggtcaagtttttaataaatgaagccacaactttggcagatttgttagcactgcggttacacagagtggaagatgatgtccgaaggattgtggacaaggcggtgaaagagctggggactgagaaggttattactgaaatcagtcagacctgggcaaccatgaagttttcttacgaagttcactatcgaacaggcattccattactaaagtctgatgaacaactttttgaaactctagagcacaaccaagttcagttgcagactcttcttcaaagcaagtatgtagaatatttcattgagcaagtgttaagctggcaaaataaattaaacatagcagacttggtcatcttcacttggatggaagtccagcgaacttggtctcacctggaaagcatttttgtctgttcagaagatattcgaatccagcttgtgaaagatgctagaagatttgatggggtggatgctgaatttaaggagttaatgttcaagacagccaaagtagaaaatgtgttagaagcaacgtgcagacctaatctctatgaaaaacttaaagatttacagtccaggctttctctttgtgaaaaagctctcgctgaatacctggaaaccaagcgcatagcctttcctcgcttctatttcgtctcttctgctgatttacttgacattctctcaaaaggagctcagcctaaacaggtaacatgtcaccttgccaaacttttcgacagcattgcagatctgcagtttgaagacaatcaggatgtttctgcacacagggcagttggaatgtacagcaaagaaaaggagtatgtcccattccaagccgagtgtgaatgtgtgggccatgtggaaacatggcttctgcaacttgaacagactatgcaagaaacggtgcgtcattctataacagaagccatagtggcctacgaggaaaaacctagggaactgtggatttttgatttcccagctcaggttgcactaaccagctcacaaatatggtggaccacagatgtaggaatagccttcagtagactggaagaaggctacgaaacagccctgaaggatttccataaaaaacagatttctcagctgaatacactgattacacttttgctgggagaacttccacctggagacagacagaagatcatgacaatttgtaccatagatgtccatgccagagacgtggtggcaaaacttatttctcagaagcaagttgttgtcagtccccaagcttttacatggctgtctcaacttcgtcaccgatgggaggatacccagaaacactgctttgttaatatttgtgatgcccagttccagtacttctatgaatacttaggaaacagccctcgactagtgatcactcctctaactgacaggtgttatattaccttaactcaatcacttcatctaaccatgagtggggctcctgctggcccagctggtaccgggaaaacagagaccaccaaagacctaggacgtgcccttggcatgatggtctatgtattcaactgttcagagcaaatggactacaaatccataggcaatatctataagggattggtgcagacaggagcttggggctgctttgatgagttcaaccgaatctctgtggaagttctgtcagtggtggcagtacaagtgaaaatgattcatgatgccatcagaaacaggaagaagagatttgtatttcttggggaagctatcacactgaagccatcagttggaatatttattactatgaacccgggttatgctggtcgaaccgaattaccggaaaatctcaaagctcttttcagaccctgtgccatggtggcccctgacattgagctaatctgtgaaatcttgttagttgctgaaggttttgtggatgcgcgtgcattagcccgaaagttcattacgttgtacacgctttgcaaggagcttctctccaagcaggatcattacgactggggacttcgtgctattaagtctgtcttggttgtggctggatctctgaaacgaggagataaaaatagacccgaagatcaggtactcatgagagcattaagggatttcaatatgcccaaaatagtgactgacgacatcccagtgtttctgggcctggtcggtgacctgtttccagccctggatgtgccccggaggaggaagctgcactttgaacagatggtcaggcagtctaccctggagctccgcctgcagcctgaagagagcttcatcctcaaagttgtccagcttgaggaactgttggctgtgcggcactcggtctttgtagttggaaatgcaggcacaggaaagagtaagattttgagaacactgaaccgaacatatgttaacatgaaacagaagccggtttggaatgacttaaaccctaaagctgtgacaacagatgaactctttggtttcatacatcatgctacccgagaatggaaagatggcaagattgtttactcttattttataggtctcttctcatccattctacgagaacaagcaaatcttaagcatgatggaccaaaatggatagtcctggatggcgatattgaccccatgtggattgaatcactgaatactgtaatggatgataacaaggtgctgaccctcgccagcaatgagcgcattgcactcactcccttcatgaggcttctgtttgagatacatcacttaaggagcgcaaccccggccactgtttccagagctggtattctgtatgtgaacccacaagatctgggctggaatccgtatgtggccagttggatagacagaaggcggcatcaatcagaaaaggccaatttgactattctttttgataaatatgtccctgcatgcttggataaactgagaacaagctttaaaaccatcacttcaattcctgagagtagcctggtgcagactctatgtgttcttttggagtgcttgctgactcctgaaaatgtaccttctgacagcccaaaagaagtttatgaagtctattttgtatttgcttgtatctgggcttttggaggcaccctgctacaagatcagatttctgattatcaagctgacttcagtcggtggtggcagaaagagatgaaagcagtgaaatttccgtcgcagggaacaatctttgattattatgtggaccacaaaactaagaaattattgccctgggctgacaaaattgcccagtttactatggatccagatgtgcctctgcagacagttctcgttcacacaacagagacagctcgtcttagatatttcatggagttgttgcttgagaaaggaaaacctctaatgctagtaggaaatgcaggagtgggaaaaacagtctttgtaggtgacacattggcaagtctctctgaggattacatagtatcccgtgtgcctttcaactactacacaacatccacagctctgcaaaaaattcttgagaaacccctagagaaaaaagctggtcataactatggtcctggaggaaataaaaaattgatttattttatcgacgacatgaacatgcctgaagtggacttatatggcaccgttcagcctcataccctgatccggcagcatattgattatggacattggtatgatagacagaaggtgatgcttaaagaaatccataactgccagtatgtcgcctgcatgaatccgatggtgggcagcttcaccatcagtcccaggctacagagacatttcacagtgtttgcattcaattttccatctttggatgcactaaacaccatctatggccaaatctttagcttccatttccaacagcaagcatttgctccatcaattctcaggagtggccccactttgatccaggcaacaatagcattccatcagacaatgatgtgtaactttttacccacggctattaaattccactacatctttaatctgagagatttatcaaacgtcttccaggggattttatttgcttctcctgagtgtttaaaaggtccacttgatttaatacatctgtggcttcatgaatctgcccgtgtttatggagacaaactgatagacaaaaaagattgtgatttgtttcagagaagaatgctggaaactgcttataaatattttgaaggtatagatagtcacatgctgcttcaacagcccctcatttattgccactttgctgatagagggaaggacccacattacatgccagtgaaggactgggaagtgctgaagacgattcttacagaaacgttagacaactacaatgaactaaatgctgccatgcacctagttttgtttgaagatgccatgcaacatgtgtgtcgcatcagccggatcttacgaacccctcagggctgtgctctcttggttggagttgggggcagtggcaagcagagcttgtccaggctggcagcttaccttcgtggccttgaggtctttcagatcactctgaccgagggctatggaatccaggaacttcgggtagatcttgccaatttgtacatccgaactggagccaagaacatgcccactgtgttcctgctgacagatgcccaggttctagatgagagcttcctcgtgctgattaatgacttgctggcatcaggagaaatcccagatctgttcagcgatgaagatgtggacaagataatttctggaattcataatgaagttcatgctctgggcatggtagactccagggaaaactgttggaaattctttatggccagggtgcgactacagctcaaaatcattttgtgtttctctccagttggtcgcacgctgagagttagagctcggaagttcccagccatagttaactgcacggctattgactggtttcatgcgtggccgcaggaggctctggtctccgtcagcaggaggttcattgaggaaaccaagggaattgagccagtgcacaaagactctattagccttttcatggcacatgttcacaccactgtaaatgaaatgagtaccagatattaccagaatgagagaagacacaactataccaccccaaagagttttctagaacaaatatcactgtttaagaacctgttgaagaagaagcaaaatgaggtatccgagaaaaaagaacgcctggtgaacggcatccaaaagctaaaaaccacagcctctcaggtgggagatctaaaagccagacttgcctctcaagaagccgagctgcaactgagaaatcatgatgccgaagctctgatcacaaagatcggccttcagacggagaaagtgagccgggaaaagaccatcgctgatgctgaggagcgaaaggtgacagccattcagactgaagtgttccagaaacagagagaatgtgaagctgacttactcaaggctgagcctgcactggtggctgctacagctgcactcaatacactcaacagggtcaacctcagtgagctgaaagcctttcccaaccctcccatcgcagttaccaatgttactgcagccgtgatggtccttctggctcctcggggaagagtgcccaaagaccgaagttggaaagcagctaaagtcttcatgggaaaggttgatgattttttgcaagcattaattaactatgacaaagagcacattccagagaactgtctaaaagtggtgaatgaacactatttgaaagacccagagtttaatccaaacctgattcgaaccaaatcttttgcagcagctggcctgtgtgcctgggtcatcaacatcattaaattctatgaggtctactgtgatgtggagccaaaacgccaagcattagcccaagcaaacttagaactggctgcagctactgaaaaactagaggctatcaggaaaaagcttgtggatctggatcgaaatctgagcagactcacggcttcatttgaaaaagcaacagctgagaaagtccggtgtcaagaagaggtgaaccaaaccaacaaaaccatcaaattagctaacagacttgtcaaggaacttgaggcaaagaagattcgctggggtcaatccattaagtcctttgaagctcaagagaagacactctgtggagatgttcttctcacggcggcatttgtgtcttacgtcggacccttcacaaggcagtatcgccaggagctggtgcactgcaagtgggttccctttcttcaacagaaggtttccattccactaaccgaaggcctggacttgatatccatgttgacggatgatgctacaattgccgcctggaataacgaaggactgcccagtgacagaatgtccaccgaaaatgccgctatcctaacacactgtgagcgctggcctctggtgatagatccccagcaacagggaattaagtggatcaagaataagtatggaatggacctgaaagtcacacatttgggccagaaagggtttttgaatgccattgaaactgctttggcctttggtgatgtcatcttaattgaaaatctcgaggaaacgatagatccagtcctggatccactacttggcaggaacacaattaaaaaaggaaagtatatcaggattggagataaagaatgtgaatttaacaagaactttcgccttatccttcacacaaaattggcaaatcctcactataagccggaattacaagctcagacaactctcctcaatttcacagtcacagaagatggtctagaagcccagctgctggcagaggttgtcagtattgaaaggccagatttggagaaacttaagttggtattgacaaagcaccaaaatgattttaaaattgagctcaagtatctggaagacgatctccttttgcgcctttctgcggcagagggaagctttctggatgacaccaaactggtagagagattggaggcaacaaagaccaccgtggcagagatagagcacaaggtgattgaagccaaagaaaatgaaagaaaaatcaacgaggcccgagaatgttacagaccattggcagcaagagcatctcttctttattttgttattaatgacctccaaaaaatcaaccccctctaccaattctctttgaaggcttttaacgtgctgttccacagagcgatcgagcaggctgacaaggtggaagacatgcagggacgcatctctatcctgatggagagcatcacccacgctgtcttcctctacaccagccaggcgctgtttgagaaggacaagctcaccttcctgtcccagatggcttttcagattttgttgagaaagaaagagatagaccctcttgaattggatttcctgcttcgattcacagttgaacacactcatctgagtcccgttgacttcctaacttctcagtcatggagtgctatcaaggcaattgccgtcatggaagaatttcgaggcatagaccgagatgtggaaggatctgccaagcagtggaggaagtgggtagaatccgagtgtccagaaaaagaaaaattacctcaagaatggaagaagaaaagtttaatacagaagctgattcttctgagagcaatgcgccctgacagaatgacgtatgctctcagaaattttgtagaggaaaaactgggtgcgaagtatgtggagaggaccagattggacttagttaaagcattcgaagaaagcagcccagccacccccatattcttcatcctgtctccgggggtagatgcccttaaagacctggagattcttggcaaaagacttggctttacaattgactctggaaaattccacaatgtgtctttaggacaaggtcaggagacggtggcagaagtggccctggagaaagcttccaaaggaggacactgggtcatcctccaaaatgttcatttggtagccaagtggctaggaaccttggagaagctccttgaaagattcagccaaggaagccacagagattacagggttttcatgagtgctgagtctgcacctacaccagatgagcatatcatccctcaaggactcctggaaaattccattaagatcactaatgaacccccaacagggatgctggccaatttgcatgccgccctgtacaactttgatcaggatacacttgaaatatgctccaaggagcaggagtttaaaagcatccttttttctctctgctacttccacgcctgtgttgctgggagactgaggtttggcccccagggctggagccgaagctatccttttaatcctggagacctcaccatttgtgccagtgtcctctacaactacttagaggcaaactctaaagtcccatgggaagatctccgttatctctttggtgagatcatgtatggaggccacatcacagatgactgggatcgcaaactgtgtcgggtgtatttagaagaattcgtgaatccatctctgactgaagatgaactgatgctggcaccaggttttgctgccccaccctacctagattatgcaggctaccaccagtacatagaggagatgcttcctccagaaagcccggcactgtatggcctccacccaaatgctgaaatagaattcctgacagtgacatccaacactctcttcagaactttgctggagatgcagcccaggaatgcactcagtggtgatgaactggggcagtctacagaagaaaaggttaagaatgtcttggatgacattttggagaaacttccagaagagttcaacatggcagagataatgcaaaaaaattcaaatagaagcccatatgttcttgtttgcttccaagaatgtgagaggatgaatattctcattcgggaaatacgtatatcacttgaacaactggaccttagtttgaagggggaattggcattatctcctgctgtggaagcccagcagtttgcattgagttatgacacggtaccagacacttggagcaaactggcttatccttctacttatggcctagcccagtggttcaatgacctcctcctgcgatgccgagaactcgatacttggacacaagaccttacccttccggctgtcgtgtggctatccggcttcttcaaccctcagtccttcttaactgcaatcatgcagacgatggctcgaaaaaatgagtggcccctggataaaacgcgcttgactgctgatgttaccaaaaaaacaaaggaagattatggacacccgccaagggaaggtgcatacctccacggactcttcatggagggcgcccgctgggacacccaagcaggaaccattgttgaagcccgtctcaaggagctggcatgccctatgccggtcatctttgcaaaagccacccccgtggacagacaagaaaccaaacagacctacgagtgccctgtgtatagaaccaaactgagaggccccagctacatctggaccttcaggctgaagagcgaagagaagactgcaaaatgggttctggctggagtggctctgcttctagaagcgtaaggtaacactggcattcctctagcctctgctggagtgcagtgaggattttctagcatgttgctgcact

SEQ ID NO: 34473 - DNA, 688 bp, Homo sapiens
ccggcctcgcgttccctcggacggttgcccaatggcagcccaggtggcagcccgggaggcgcgagacttcagagaagccccgacccttcgcctaacctcgggggccggcctggaggcagtgggcgctgtggagctcgaggaggaggaggagaacgaggaggaggcggcggccaggagagcgcggagtttcgcccaagacgcgcgggtgcgcttcctcggcggccgcctggcgatgatgctggggttcacggaggagaaatggagccagtatttggaaagcgaggacaaccggcaggttcttggggagtttctggaaagcaccagcccggcttgccttgtgtttagcttcgccgcctcggggcgccttgcggcttcccaggaggtaagaggcgacgggcaaggggacctgcccatccaacaaaactacccaggggagacagcccagtcgctcccctttggattcccgcggggcgctcactcgggcactttaacaaacctggcttgaagtccccatcctgaggcccgcaggactcctccccacgtgcacccactctgcagttcagcagctgcaggttagtttcctaagtcagcagtttgtatctgaccgagaatcccgcgttgagcctgttcgaccaggataacccaagaacaccagcgctttctttagctgcttgggtgttaggcgcca

SEQ ID NO: 34474 - DNA, 1289 bp, Homo sapiens
ccggcctcgcgttccctcggacggttgcccaatggcagcccaggtggcagcccgggaggcgcgagacttcagagaagccccgacccttcgcctaacctcgggggccggcctggaggcagtgggcgctgtggagctcgaggaggaggaggagaacgaggaggaggcggcggccaggagagcgcggagtttcgcccaagacgcgcgggtgcgcttcctcggcggccgcctggcgatgatgctggggttcacggaggagaaatggagccagtatttggaaagcgaggacaaccggcaggttcttggggagtttctggaaagcaccagcccggcttgccttgtgtttagcttcgccgcctcggggcgccttgcggcttcccaggagattccaagagatgcaaaccataaacttgtttttatttccaagaagattactgaaagcattggagtaaatgacttttctcaagtggttttatttggagagttacctgcgttgtctcttggacatgtatctgctttccttgatgagattttagtgccagttctttctaataagaacaaccataagtcctggtcctgttttacttcacaagatatggaatatcacatagaagtcatgaaaaagaagatgtatatttttaggggcaaaatgtctagaagaactcttctaccaattcccactgttgcaggaaagatggatctggatcagaattgttcagagaacaagccaccgtcaaatgaaaggataatacttcatgcaattgaatctgtggttattgaatggtcacatcaaatccaagaaattatagaaagagattcagtgcagcgtttgttgaatggtcttcacttgtctcctcaagcagaactagatttctggatgatgaggagagaaaatctgtcatgcatttatgatcaacttcaggcacctgttgtcctcaaaatggttaagatcctgacaactaaacaaagcagctattttcctactctgaaggacatttttctggctgtggaaaatggtaagactcttgttcctcagcctggcatcaatatcaccatctgctcatgatccagcccctgcctgctcggccttgatatttacccttccgccatgtttgtggagtgattgctcatggctcttctaatgataaattcatctcaccctttgtactatattctccacccatactaaactacttttagtttatctggtatatagtagtacctgccaaaatggctccagattgaaattttaattagaatgtttgtggaggagtgaggccttcattcggagt

SEQ ID NO: 34475 - DNA, 13458 bp, Homo sapiens
  misc_feature (1775)..(1775): n is a, c, g, or t
  misc_feature (2931)..(2931): n is a, c, g, or t
ccggcctcgcgttccctcggacggttgcccaatggcagcccaggtggcagcccgggaggcgcgagacttcagagaagccccgacccttcgcctaacctcgggggccggcctggaggcagtgggcgctgtggagctcgaggaggaggaggagaacgaggaggaggcggcggccaggagagcgcggagtttcgcccaagacgcgcgggtgcgcttcctcggcggccgcctggcgatgatgctggggttcacggaggagaaatggagccagtatttggaaagcgaggacaaccggcaggttcttggggagtttctggaaagcaccagcccggcttgccttgtgtttagcttcgccgcctcggggcgccttgcggcttcccaggagattccaagagatgcaaaccataaacttgtttttatttccaagaagattactgaaagcattggagtaaatgacttttctcaagtggttttatttggagagttacctgcgttgtctcttggacatgtatctgctttccttgatgagattttagtgccagttctttctaataagaacaaccataagtcctggtcctgttttacttcacaagatatggaatatcacatagaagtcatgaaaaagaagatgtatatttttaggggcaaaatgtctagaagaactcttctaccaattcccactgttgcaggaaagatggatctggatcagaattgttcagagaacaagccaccgtcaaatgaaaggataatacttcatgcaattgaatctgtggttattgaatggtcacatcaaatccaagaaattatagaaagagattcagtgcagcgtttgttgaatggtcttcacttgtctcctcaagcagaactagatttctggatgatgaggagagaaaatctgtcatgcatttatgatcaacttcaggcacctgttgtcctcaaaatggttaagatcctgacaactaaacaaagcagctattttcctactctgaaggacatttttctggctgtggaaaatggcaacagcttacctttcacctgaggaccttttgaggggagaaatagaagagtcactggaaaaggtgcaggtggctgttaacatcttaaagactttcaaaaactcctttttcaactatagaaaaaaattggcaagctactttatgggaagaaagctgagaccatgggatttccagtctcatctggtgttttgcagatttgacaagtttcttgatcgtttaataaaaatagaggatatatttgccaccactttggaatttgaaaagctggaaagactggaatttggtggtaccaaaggagcaattttaaatggacaagtccacgagatgagtgaagaacttatggaactctgtaaactttttaaacagagcacttatgacccatctgattgcactaacatggagtttgaaagtgattatgtggcatttaagtccaaaactctggaatttgacagaaggcttgggacaattatttgtgaagctttctttaactgcaatggcttagaagctgcatttaagcttttgaccatatttggaaattttctagagaagccagttgtcatggaaattttcagcctacattacagcacactagtgcatatgtttaatacagagctggatgtgtgtaagcaactgtataatgaacacatgaaacagattgaatgtggtcatgtagttcttaacaagaacatgccatttacctcaggaaatatgaaatgggcccagcaggttctccaacgacttcaaatgttttggtcaaacttngcatctctccgttatctatttttgggcaatcctgatcacgctttagtttatcaaaagtatgttgaaatgaccactttgcttgatcaatttgaaagtcgtatctataatgaatggaaaagtaatgtggatgaaatctgtgaattcaatttgaatcaacccttggttaaattcagtgccataaatggtcttctctgtgtcaattttgacccaaagctagtggctgtattgagagaagtgaaatatcttttgatgttgaagaaacaagacataccagattcagctttagccatcttcaagaaaaggaacactattttaaagtacattggaaatcttgaccttcttgtgcaagggtataataaactcaaacagacgctcctggaagttgaataccctctgattgaagatgagctgagggctattgacgagcagctgacagcagccacaacgtggctgacatggcaggatgactgctggggctacatcgagagggtgagggcagccacgtccgagttggagcacagagttgagcgcacacagaaaaacgtgaaggtgatccagcagaccatgaggggctgggccaggtgcgtgctacctcccaggagagagcacagacgagaggcagccttcaccttggaggacaagggtgatttgtttacaaaaaaatacaagttaatccaaggagatggctgcaagatccacaacttggtcgaggaaaataggaagctcttcaaagccaatccctctctggatacctggaaaatttatgtagaattcattgacgacattgtggtggaaggcttttttcaggctataatgcacgacttagacttctttctgaagaatacagagaaacaattgaaaccggcaccgttttttcaagcacaaatgatcttgttgcctcctgagattgtgtttaaaccttccctagacagagaggctggggatggcttctatgatcttgtagaagaaatgttatgcaatagttttagaatgtctgcccagatgaaccgaatagcaacacacctggaaattaaaaattatcagaatgatatggataacatgttaggcctggcagaggtcaggcaggagatcatgaacagagtggtgaatgtcatcaacaaagtcttagatttcagaaacaccctggagacccacncttacctctgggtggatgatcgagctgagtttatgaagcattttctcttgtatggccatgctgtgtcttccgatgaaatggatgctcatgcaaatgaagaaattcccgaacaaccaccaactcttgagcaattcaaagaacagattgacatttatgaagctttgtatgttcaaatgagcaaatttgaggactttagagtgtttgatagttggttcaaggtggacatgaagcctttcaaagtgagcttgttaaccataattaagaaatggagctggatgtttcaggagcatcttttgagatttgtcattgacagtctgaatgagctacaagaatttataaaggagacagattccggacttcagagagaattaaatgaaggtgatcatgatggtttagttgacatcatggtgcatcttctggctgtaagaagccgacagagagctactgatgaactctttgaacctctaaaagaaacgatcaccctcttggaaagctatggccagaagatgcctgagcaggtctatattcagctagaggaattacctgaaagatgggaaactaccaaaaagatcgcagcaactgtcagacatgaagtctcacctctccataatgcggaagtcactcttataaggaaaaaatgtattttgtttgacgcaaagcaggcagagttcagagagagattcagacactatgcccctcttggatttaatgcagaaaatccatacacagcgcttgataaggcaaatgaagagcttgaggccttagaagaagaaatgttgcagatgcaagaatctactcgtctttttgaagtggctcttccagagtacaaacaaatgaaacagtgtcgcaaagaaataaaattgctcaagggactgtgggatgtcattatttatgttcgaagaagcattgataattggactaaaacccagtggagacagattcatgtggaacagatggatgtagaactcagaaggtttgccaaggcgagttccataactgaaatttggtcactcaacaaggaagtccgcgtctgggatgcttacacgggcctggaaggcacagttaaggacatgacagcctccctgagggccatcacagagttacagagccctgccctcagggacaggcattggcaccagctgatgaaagctattggggtcaagtttttaataaatgaagccacaactttggcagatttgttagcactgcggttacacagagtggaagatgatgtccgaaggattgtggacaaggcggtgaaagagctggggactgagaaggttattactgaaatcagtcagacctgggcaaccatgaagttttcttacgaagttcactatcgaacaggcattccattactaaagtctgatgaacaactttttgaaactctagagcacaaccaagttcagttgcagactcttcttcaaagcaagtatgtagaatatttcattgagcaagtgttaagctggcaaaataaattaaacatagcagacttggtcatcttcacttggatggaagtccagcgaacttggtctcacctggaaagcatttttgtctgttcagaagatattcgaatccagcttgtgaaagatgctagaagatttgatggggtggatgctgaatttaaggagttaatgttcaagacagccaaagtagaaaatgtgttagaagcaacgtgcagacctaatctctatgaaaaacttaaagatttacagtccaggctttctctttgtgaaaaagctctcgctgaatacctggaaaccaagcgcatagcctttcctcgcttctatttcgtctcttctgctgatttacttgacattctctcaaaaggagctcagcctaaacaggtaacatgtcaccttgccaaacttttcgacagcattgcagatctgcagtttgaagacaatcaggatgtttctgcacacagggcagttggaatgtacagcaaagaaaaggagtatgtcccattccaagccgagtgtgaatgtgtgggccatgtggaaacatggcttctgcaacttgaacagactatgcaagaaacggtgcgtcattctataacagaagccatagtggcctacgaggaaaaacctagggaactgtggatttttgatttcccagctcaggttgcactaaccagctcacaaatatggtggaccacagatgtaggaatagccttcagtagactggaagaaggctacgaaacagccctgaaggatttccataaaaaacagatttctcagctgaatacactgattacacttttgctgggagaacttccacctggagacagacagaagatcatgacaatttgtaccatagatgtccatgccagagacgtggtggcaaaacttatttctcagaagcaagttgttgtcagtccccaagcttttacatggctgtctcaacttcgtcaccgatgggaggatacccagaaacactgctttgttaatatttgtgatgcccagttccagtacttctatgaatacttaggaaacagccctcgactagtgatcactcctctaactgacaggtgttatattaccttaactcaatcacttcatctaaccatgagtggggctcctgctggcccagctggtaccgggaaaacagagaccaccaaagacctaggacgtgcccttggcatgatggtctatgtattcaactgttcagagcaaatggactacaaatccataggcaatatctataagggattggtgcagacaggagcttggggctgctttgatgagttcaaccgaatctctgtggaagttctgtcagtggtggcagtacaagtgaaaatgattcatgatgccatcagaaacaggaagaagagatttgtatttcttggggaagctatcacactgaagccatcagttggaatatttattactatgaacccgggttatgctggtcgaaccgaattaccggaaaatctcaaagctcttttcagaccctgtgccatggtggcccctgacattgagctaatctgtgaaatcttgttagttgctgaaggttttgtggatgcgcgtgcattagcccgaaagttcattacgttgtacacgctttgcaaggagcttctctccaagcaggatcattacgactggggacttcgtgctattaagtctgtcttggttgtggctggatctctgaaacgaggagataaaaatagacccgaagatcaggtactcatgagagcattaagggatttcaatatgcccaaaatagtgactgacgacatcccagtgtttctgggcctggtcggtgacctgtttccagccctggatgtgccccggaggaggaagctgcactttgaacagatggtcaggcagtctaccctggagctccgcctgcagcctgaagagagcttcatcctcaaagttgtccagcttgaggaactgttggctgtgcggcactcggtctttgtagttggaaatgcaggcacaggaaagagtaagattttgagaacactgaaccgaacatatgttaacatgaaacagaagccggtttggaatgacttaaaccctaaagctgtgacaacagatgaactctttggtttcatacatcatgctacccgagaatggaaagatggcaagattgtttactcttattttataggtctcttctcatccattctacgagaacaagcaaatcttaagcatgatggaccaaaatggatagtcctggatggcgatattgaccccatgtggattgaatcactgaatactgtaatggatgataacaaggtgctgaccctcgccagcaatgagcgcattgcactcactcccttcatgaggcttctgtttgagatacatcacttaaggagcgcaaccccggccactgtttccagagctggtattctgtatgtgaacccacaagatctgggctggaatccgtatgtggccagttggatagacagaaggcggcatcaatcagaaaaggccaatttgactattctttttgataaatatgtccctgcatgcttggataaactgagaacaagctttaaaaccatcacttcaattcctgagagtagcctggtgcagactctatgtgttcttttggagtgcttgctgactcctgaaaatgtaccttctgacagcccaaaagaagtttatgaagtctattttgtatttgcttgtatctgggcttttggaggcaccctgctacaagatcagatttctgattatcaagctgacttcagtcggtggtggcagaaagagatgaaagcagtgaaatttccgtcgcagggaacaatctttgattattatgtggaccacaaaactaagaaattattgccctgggctgacaaaattgcccagtttactatggatccagatgtgcctctgcagacagttctcgttcacacaacagagacagctcgtcttagatatttcatggagttgttgcttgagaaaggaaaacctctaatgctagtaggaaatgcaggagtgggaaaaacagtctttgtaggtgacacattggcaagtctctctgaggattacatagtatcccgtgtgcctttcaactactacacaacatccacagctctgcaaaaaattcttgagaaacccctagagaaaaaagctggtcataactatggtcctggaggaaataaaaaattgatttattttatcgacgacatgaacatgcctgaagtggacttatatggcaccgttcagcctcataccctgatccggcagcatattgattatggacattggtatgatagacagaaggtgatgcttaaagaaatccataactgccagtatgtcgcctgcatgaatccgatggtgggcagcttcaccatcagtcccaggctacagagacatttcacagtgtttgcattcaattttccatctttggatgcactaaacaccatctatggccaaatctttagcttccatttccaacagcaagcatttgctccatcaattctcaggagtggccccactttgatccaggcaacaatagcattccatcagacaatgatgtgtaactttttacccacggctattaaattccactacatctttaatctgagagatttatcaaacgtcttccaggggattttatttgcttctcctgagtgtttaaaaggtccacttgatttaatacatctgtggcttcatgaatctgcccgtgtttatggagacaaactgatagacaaaaaagattgtgatttgtttcagagaagaatgctggaaactgcttataaatattttgaaggtatagatagtcacatgctgcttcaacagcccctcatttattgccactttgctgatagagggaaggacccacattacatgccagtgaaggactgggaagtgctgaagacgattcttacagaaacgttagacaactacaatgaactaaatgctgccatgcacctagttttgtttgaagatgccatgcaacatgtgtgtcgcatcagccggatcttacgaacccctcagggctgtgctctcttggttggagttgggggcagtggcaagcagagcttgtccaggctggcagcttaccttcgtggccttgaggtctttcagatcactctgaccgagggctatggaatccaggaacttcgggtagatcttgccaatttgtacatccgaactggagccaagaacatgcccactgtgttcctgctgacagatgcccaggttctagatgagagcttcctcgtgctgattaatgacttgctggcatcaggagaaatcccagatctgttcagcgatgaagatgtggacaagataatttctggaattcataatgaagttcatgctctgggcatggtagactccagggaaaactgttggaaattctttatggccagggtgcgactacagctcaaaatcattttgtgtttctctccagttggtcgcacgctgagagttagagctcggaagttcccagccatagttaactgcacggctattgactggtttcatgcgtggccgcaggaggctctggtctccgtcagcaggaggttcattgaggaaaccaagggaattgagccagtgcacaaagactctattagccttttcatggcacatgttcacaccactgtaaatgaaatgagtaccagatattaccagaatgagagaagacacaactataccaccccaaagagttttctagaacaaatatcactgtttaagaacctgttgaagaagaagcaaaatgaggtatccgagaaaaaagaacgcctggtgaacggcatccaaaagctaaaaaccacagcctctcaggtgggagatctaaaagccagacttgcctctcaagaagccgagctgcaactgagaaatcatgatgccgaagctctgatcacaaagatcggccttcagacggagaaagtgagccgggaaaagaccatcgctgatgctgaggagcgaaaggtgacagccattcagactgaagtgttccagaaacagagagaatgtgaagctgacttactcaaggctgagcctgcactggtggctgctacagctgcactcaatacactcaacagggtcaacctcagtgagctgaaagcctttcccaaccctcccatcgcagttaccaatgttactgcagccgtgatggtccttctggctcctcggggaagagtgcccaaagaccgaagttggaaagcagctaaagtcttcatgggaaaggttgatgattttttgcaagcattaattaactatgacaaagagcacattccagagaactgtctaaaagtggtgaatgaacactatttgaaagacccagagtttaatccaaacctgattcgaaccaaatcttttgcagcagctggcctgtgtgcctgggtcatcaacatcattaaattctatgaggtctactgtgatgtggagccaaaacgccaagcattagcccaagcaaacttagaactggctgcagctactgaaaaactagaggctatcaggaaaaagcttgtggatctggatcgaaatctgagcagactcacggcttcatttgaaaaagcaacagctgagaaagtccggtgtcaagaagaggtgaaccaaaccaacaaaaccatcaaattagctaacagacttgtcaaggaacttgaggcaaagaagattcgctggggtcaatccattaagtcctttgaagctcaagagaagacactctgtggagatgttcttctcacggcggcatttgtgtcttacgtcggacccttcacaaggcagtatcgccaggagctggtgcactgcaagtgggttccctttcttcaacagaaggtttccattccactaaccgaaggcctggacttgatatccatgttgacggatgatgctacaattgccgcctggaataacgaaggactgcccagtgacagaatgtccaccgaaaatgccgctatcctaacacactgtgagcgctggcctctggtgatagatccccagcaacagggaattaagtggatcaagaataagtatggaatggacctgaaagtcacacatttgggccagaaagggtttttgaatgccattgaaactgctttggcctttggtgatgtcatcttaattgaaaatctcgaggaaacgatagatccagtcctggatccactacttggcaggaacacaattaaaaaaggaaagtatatcaggattggagataaagaatgtgaatttaacaagaactttcgccttatccttcacacaaaattggcaaatcctcactataagccggaattacaagctcagacaactctcctcaatttcacagtcacagaagatggtctagaagcccagctgctggcagaggttgtcagtattgaaaggccagatttggagaaacttaagttggtattgacaaagcaccaaaatgattttaaaattgagctcaagtatctggaagacgatctccttttgcgcctttctgcggcagagggaagctttctggatgacaccaaactggtagagagattggaggcaacaaagaccaccgtggcagagatagagcacaaggtgattgaagccaaagaaaatgaaagaaaaatcaacgaggcccgagaatgttacagaccattggcagcaagagcatctcttctttattttgttattaatgacctccaaaaaatcaaccccctctaccaattctctttgaaggcttttaacgtgctgttccacagagcgatcgagcaggctgacaaggtggaagacatgcagggacgcatctctatcctgatggagagcatcacccacgctgtcttcctctacaccagccaggcgctgtttgagaaggacaagctcaccttcctgtcccagatggcttttcagattttgttgagaaagaaagagatagaccctcttgaattggatttcctgcttcgattcacagttgaacacactcatctgagtcccgttgacttcctaacttctcagtcatggagtgctatcaaggcaattgccgtcatggaagaatttcgaggcatagaccgagatgtggaaggatctgccaagcagtggaggaagtgggtagaatccgagtgtccagaaaaagaaaaattacctcaagaatggaagaagaaaagtttaatacagaagctgattcttctgagagcaatgcgccctgacagaatgacgtatgctctcagaaattttgtagaggaaaaactgggtgcgaagtatgtggagaggaccagattggacttagttaaagcattcgaagaaagcagcccagccacccccatattcttcatcctgtctccgggggtagatgcccttaaagacctggagattcttggcaaaagacttggctttacaattgactctggaaaattccacaatgtgtctttaggacaaggtcaggagacggtggcagaagtggccctggagaaagcttccaaaggaggacactgggtcatcctccaaaatgttcatttggtagccaagtggctaggaaccttggagaagctccttgaaagattcagccaaggaagccacagagattacagggttttcatgagtgctgagtctgcacctacaccagatgagcatatcatccctcaaggactcctggaaaattccattaagatcactaatgaacccccaacagggatgctggccaatttgcatgccgccctgtacaactttgatcaggatacacttgaaatatgctccaaggagcaggagtttaaaagcatccttttttctctctgctacttccacgcctgtgttgctgggagactgaggtttggcccccagggctggagccgaagctatccttttaatcctggagacctcaccatttgtgccagtgtcctctacaactacttagaggcaaactctaaagtcccatgggaagatctccgttatctctttggtgagatcatgtatggaggccacatcacagatgactgggatcgcaaactgtgtcgggtgtatttagaagaattcgtgaatccatctctgactgaagatgaactgatgctggcaccaggttttgctgccccaccctacctagattatgcaggctaccaccagtacatagaggagatgcttcctccagaaagcccggcactgtatggcctccacccaaatgctgaaatagaattcctgacagtgacatccaacactctcttcagaactttgctggagatgcagcccaggaatgcactcagtggtgatgaactggggcagtctacagaagaaaaggttaagaatgtcttggatgacattttggagaaacttccagaagagttcaacatggcagagataatgcaaaaaaattcaaatagaagcccatatgttcttgtttgcttccaagaatgtgagaggatgaatattctcattcgggaaatacgtatatcacttgaacaactggaccttagtttgaagggggaattggcattatctcctgctgtggaagcccagcagtttgcattgagttatgacacggtaccagacacttggagcaaactggcttatccttctacttatggcctagcccagtggttcaatgacctcctcctgcgatgccgagaactcgatacttggacacaagaccttacccttccggctgtcgtgtggctatccggcttcttcaaccctcagtccttcttaactgcaatcatgcagacgatggctcgaaaaaatgagtggcccctggataaaacgcgcttgactgctgatgttaccaaaaaaacaaaggaagattatggacacccgccaagggaaggtgcatacctccacggactcttcatggagggcgcccgctgggacacccaagcaggaaccattgttgaagcccgtctcaaggagctggcatgccctatgccggtcatctttgcaaaagccacccccgtggacagacaagaaaccaaacagacctacgagtgccctgtgtatagaaccaaactgagaggccccagctacatctggaccttcaggctgaagagcgaagagaagactgcaaaatgggttctggctggagtggctctgcttctagaagcgtaaggtaacactggcattcctctagcctctgctggagtgcagtgaggattttctagcatgttgctgcact

SEQ ID NO: 34476 - DNA, 1479 bp, Homo sapiens
ccggcctcgcgttccctcggacggttgcccaatggcagcccaggtggcagcccgggaggcgcgagacttcagagaagccccgacccttcgcctaacctcgggggccggcctggaggcagtgggcgctgtggagctcgaggaggaggaggagaacgaggaggaggcggcggccaggagagcgcggagtttcgcccaagacgcgcgggtgcgcttcctcggcggccgcctggcgatgatgctggggttcacggaggagaaatggagccagtatttggaaagcgaggacaaccggcaggttcttggggagtttctggaaagcaccagcccggcttgccttgtgtttagcttcgccgcctcggggcgccttgcggcttcccaggaggtaagaggcgacgggcaaggggacctgcccatccaacaaaactacccaggggagacagcccagtcgctcccctttggattcccgcggggcgctcactcgggcactttaacaaacctggcttgaagtccccatcctgaggcccgcaggactcctccccacgtgcacccactctgcagttcagcagctgcagattccaagagatgcaaaccataaacttgtttttatttccaagaagattactgaaagcattggagtaaatgacttttctcaagtggttttatttggagagttacctgcgttgtctcttggacatgtatctgctttccttgatgagattttagtgccagttctttctaataagaacaaccataagtcctggtcctgttttacttcacaagatatggaatatcacatagaagtcatgaaaaagaagatgtatatttttaggggcaaaatgtctagaagaactcttctaccaattcccactgttgcaggaaagatggatctggatcagaattgttcagagaacaagccaccgtcaaatgaaaggataatacttcatgcaattgaatctgtggttattgaatggtcacatcaaatccaagaaattatagaaagagattcagtgcagcgtttgttgaatggtcttcacttgtctcctcaagcagaactagatttctggatgatgaggagagaaaatctgtcatgcatttatgatcaacttcaggcacctgttgtcctcaaaatggttaagatcctgacaactaaacaaagcagctattttcctactctgaaggacatttttctggctgtggaaaatggtaagactcttgttcctcagcctggcatcaatatcaccatctgctcatgatccagcccctgcctgctcggccttgatatttacccttccgccatgtttgtggagtgattgctcatggctcttctaatgataaattcatctcaccctttgtactatattctccacccatactaaactacttttagtttatctggtatatagtagtacctgccaaaatggctccagattgaaattttaattagaatgtttgtggaggagtgaggccttcattcggagt

SEQ ID NO: 34477 - DNA, 428 bp, Homo sapiens
aaaaaatacaaaaatttgatgtatatttttaaattaaatctatttttttgttatgtagtcatatcctttctaaccaaaaaataaaaataagaattgatgctggaggcatggtggctgaatttgaaaaaatttacttacaaaaagatacagggccgggcacggtggctcatgcctgtaatcccagcattttgggaggccaaggcgggtggatcatgcagtcaagagattgagatcatcctggctaacgtggtgaaaccctgtttctactaaaaatacaaaaattagccgggtatggtggtgggcacctgtagtcccagctccgtaggaggctgaggcaggagaatcacttgaacctgggaggcggaggttgcagtgagccaagattgtgccactgcactccagcctgggacagagagagactccgtctc

SEQ ID NO: 34478 - DNA, 865 bp, Homo sapiens
cttaagaaacatttattttactttattttggaggaaaagtcttaccctgtcacccaggttgaagtgcagtggcatgatcacagcttactgtaacctcgggctccagacttaagtgatcctactgcctcagcctcccaatgtgctgggattacagatgtgagctaccatgcctggccaatttactttaaaaagaagcatttgtttgtttgtttgtttgaaatgttatgatattttaacatacaatgcatttcatctcatgatagcattttcattgagagggcaaattttataatatccctaggatttatgtaaagttgaataaataataagttgccctacttaattgtatattgctccctcctataaataggttctgtgtgtttagaaacctctgactggaaagatataagtgcaaacttgtcactatagtctgaatgcagaaattgtggggatttttttttcatcccatatacacacattttgtgtgtattatatactagtgaacataaaattacatggtattaaaattatgaatatatactacatttttaaggaactcagtccagtggaaatactaataaacatcagtgataatgcaatgtaataaatgatatagatgaagtgtgtataacaggttcttatacagttcagaattatcctcttgcttcaacacagtgactgcttcacaagatagggtaggaaacatgatttgtgacctgtctgagaaaactcttccacatatctacaaaatttgaatttacactatggtgtatagtaatatatgttggcatacaatattattctatggataaaattaaaatgcatattctattttattctgtaattatataccataaaactattg

SEQ ID NO: 34479 - DNA, 422 bp, Homo sapiens
gcgtcgacgcctgacataaattttaataaatcagtgtgagcaaaagaaaaaaaaatgtacaataataataaaataaaaccgtagtcatttatacttcatgctgtagttctaaaataaaaattctcctttggggctggtgtggtagctcacacctgtaatcccagcactttgggagtctgaggcaggaggattgcttgagcccaggagttcgagaccatcctaggcaacatagtaagaccctgtctctacaaaaaaatgtaaaaaattagctgaacatgatgtcgcgcacctgtggtcctagctattcaggtggctgaggtggaaggactgcttgagcccggaaggtcaaggctgcagtgagccatgatcaagccatgtcactccagcctgggtgacagagtgagaccctgcctcaaaaaaaa

SEQ ID NO: 34480 - DNA, 295 bp, Homo sapiens
agaacaccaatatggcacatgtatacacatgtaacaaacctgcacgttgcgcacatgtaccctaaaacttaaagtataattaaaaaatacctacagctaagatttatattgaatagcaaagtgctgaattttttttcctaaattaagaaataagataagtagtgcattctcactactcttattgattatactattggaagttctagccaattcactaagacaagggaaggaaatgaaaagcatacagatcagaaagtaagaaataaaactgtccttatttgcaaatgcattgatt

SEQ ID NO: 34481 - DNA, 451 bp, Homo sapiens
ataaggcgacagagtggtgaggtctgtggcaaagcatgcacacctgaaagacattcaaattaagcatgagcacaaacagaacaaaaaacactgctcgccaaacaaaaatgtcctagtagactgtgggcccgctctttgcagctcttggctgacagtcaagtggagctcacggttttatggataaacttgtaaaggagtaagtacgtgcctggcggcacctttgctgggaagcagctcttcctgagtcagccgtgacagagcaggcatctcctcctggccctgccctgagtggggcctaaaaagaaaacacagggggctgggcaccatggctcatgcctgtaatcccagcactttgggaggccgaggcaggaggatcgcttgggcctaggagtttgaggccaacctgggcaacatagtgagaccctgtctctacaaaatattaaaaacaaaa

SEQ ID NO: 34482 - DNA, 245 bp, Homo sapiens
gctatttaacttgtatgttttttaataaaattcctttgatttcaataattatttactattgataaatctatttaatatttacatttcttggcacagttttatattggagattgatcgtgataggtattataccaagtaggttgtttggagatttcctttaccttctctttgttatcatgagggtttttctttataagattaaaaaagaaaaattctagaaaattaagacctcagaatttgtagta

SEQ ID NO: 34483 - DNA, 1074 bp, Homo sapiens
cccgtccttcctctcctagcctaaggcgtgcaaacagagcgccactgggaggctgaaacctttaggccgatgcttgcttgcaaggtcaggcaagctggattctggtccccacctttgcagagagaacagcgatgttgtgcgcccatttctcagatcaaggaccggcccatcttactacctccaagagtgcttttctctctaataagaaaacatctactttgaaacatctactgggcgagaccaggagtgatggctcagcctgtaattctggaatttcgggaggccgaggcaggaagattccttgagcacaggagttccagaccagcctgggcaatgtagcaagacgctgtctctatttatacaataaaatttttttaaaaaaggaaaaaaaaaaaaaaaaaaaattgtgtgtggggggatgggccctgggaaaagtttttaaaaccatttggtgggggggcgggggcccaaagggttagggaacacggggaccaacgagcagtgtacacaaggagagcaccgggcgcacaaggaccatagggcgctgggggatatacttccaccaagtttaaaagagagcgccggggggaacacccgaggttttctaaaaacaaattccaagaagagggtcacggagggcaacaaacgggcgctctatacacaggaggaatccaaaaggcggaaggctctgaaagtactaaaaaatataagcccgcggacccaggggtagaggagaaacacagcgacacacggaaggcacaaacgcaagaggcgaaagcagagccaggcgagaagaagacaagacgacaaagaacgaaaggaaacgagcaaggagcaagagaggcaaaaggaagaaggacggaacaacagaagacgaaaaaggaagcgacaacaaaagaaagagaaaagacaagagaaagggcgaaagaacaaagaaaaagaaaaaagacacaaaaagaaaagaagaaacacgagcaaaacagacaagagagggagagagaaaagaaaaaaagaagagagaaggacgagaaaggaccacgaagaagaaacggagaagagagagaggaaaaagac

SEQ ID NO: 34484 - DNA, 600 bp, Homo sapiens
cccgtccttcctctcctagcctaaggcgtgcaaacagagcgccactgggaggctgaaacctttaggccgatgcttgcttgcaaggtcaggcaagctggattctggtccccacctttgcagagagaacagcgatgttgtgcgcccatttctcagatcaaggaccggcccatcttactacctccaagagtgcttttctctctaataagaaaacatctactttgaaacatctactgggcgagaccaggagtgatggctcagcctgtaattctggaatttcgggaggccgaggcaggaagattccttgagcacaggagttccagaccagcctgggcaatgtagcaagacgctgtctctatttatacaataaaatttttttaaaaaaggaaaaaaaacaaaaaaccaaaaaagaaaaaaacagtgtgtgggtcgggcgagacatggggcccccttggaaaaagctcttattatagaaccaatctcgtgggggcggcgggggggccccagttgggttatggtacaacgtgtggcaaaagggtgtcccaaaggaaaaccgcgcgcgagaacaagggcggggttctctcccaataaaaaaaggccgag

SEQ ID NO: 34485 - DNA, 233 bp, Homo sapiens
caggatagagctctcgcccttccctttggctctcagagaggcctaagaaaattgcaacaagagcagaggttggctggtttgaaggtgtggctcatcccacattaccagagagacagttccggagtcggggatagtgctcacgggctgggactttcttctttcttccttcttctcctttttcttctttcttcctttattcctcttcttctgacagggtctcactctgtcgtcca

SEQ ID NO: 34486 - DNA, 543 bp, Homo sapiens
tcagtttgtgatgggtgagcccatacagtgggatccagctcagggtttggtgcagttggcaagatcccaagagggttttctgtgaagggtagaatgagagctgtggcttgagaagaaaccaggcagcaggggagtcccatcgtgtcagggtgtgttactctcccctgagcaccacagagaagacaccaacccctaccagctgtcacgtggccacatgttattagagtcctgctctcctaggtttttccaccctgccccccatcatttccaaggacccaatattattgaaaaagaaaaacatattgcaaaattgaaaagttgtttgctcaccttacactttggtatgtttgtacccatctgtttatgggtgtatgaggcctattggcataagaactgtgtatctgtgtatatagagtactgttgctcattttagcagggataggtggccagaggtcctctcttttggattttcctgggtttagggcttttactcagggtcctaacactggagtggaaggctggcagtgctttcccctcctgccc

SEQ ID NO: 34487 - DNA, 481 bp, Homo sapiens
tgtgccactgcacccatcctgggtgacagagcaagactccatctcaaaaaaaaaaatttagagttaggctggatgcattggctcatgcctgtaaatccctagacattgggaggctgaggccagagttgcccaggagtttgagaccgccctgacaacatattgaggccacatctgtacaaaaaaaaattttttttaaccaggcaaagtggcatgctcgtacagttttagctacgggagtctgaagtcaggtggaacacttaacccaggagtccaaggtttgtagtgggctatgattgtgccactgtacttcagcataggcagtggagtgagaccctgtctcaaaaaggaaataaggatgaggagaacatcttttttgtttttctttttttgttttaaacacttctgtaattcagcattgcaagtttgtgttcttccagacttttatttttcttacactattttaatatcttaagcttattac

SEQ ID NO: 34488 - DNA, 103 bp, Homo sapiens
agcttttgttaagttttctgaaaggtgggtgctgggaaggttgcacttctggacttcctgccttgtgactccacctggtgggaagcccccatgagtggaggtt

SEQ ID NO: 34489 - DNA, 443 bp, Homo sapiens
gacaaatagaattctcaaactccagttaaactttcagaaacgcttgaacttccttgacccaaactattgccttttctcttaatgacagtgaagtcaactccataggtagcccattaactctcaaaatcctggcctcaagtgatctccctctcttggccttccaaagcattgggattacaagcgtgagccacagtgcctggcctagcccattgattctcaacctattaactgatacttagtcatcttatctgcctgggaatgttgctcccattatagactgtcttattacgagctgatatagccaatattgcctatgactggggtgatacgcttggttttgtaaaaactgaggtaaaataggcataacaaaatttagcattttaaccatctttcagtgtatggtccagtggcattaagtacattcacgctgttgtgcccctatc

SEQ ID NO: 34490 - DNA, 422 bp, Homo sapiens
ttttttttgagatggagtctcgctctgtcacccaggctggagcacagtggtgcgatcttggctaactgcaaccttcacctcctgggttcaaacgattcttctgcctcagcctcctgaggagctcggactacaggcgtgcgccaccatgcccagctaatttttgtatttttagtagagatggggtttcaccatattggccaggctggtctcgaactcctgacctcgtgatccgcctgcctcagcctcccaaagtgctggcattataggcgtgagccaccacgccaagccagataattaatattttctaagcatctaagaaaccagtcttcatgaactccctcataaaacatagattaattcacagaaacacttacgtgtctggaaggcctacagtgaaaatatgatagagacagacagtagtc

SEQ ID NO: 34491 - DNA, 1526 bp, Homo sapiens
ggggaggtctggcctgcttttcctccctgaactggcccaatgactggctccctcacgctgaccactcctctgggctggcctcctgcactcgcgctaacagcccaggctccagggacagcctgcgttcctgggctggctgggtgcagctctcttttcaggagagaaagctctcttggaggagctggaaaggtgcccgactccagccatgctggcgctactgtgttcctgcctgctcctggcagccggtgcctcggacgcctggacgggcgaggactcggcggagcccaactctgactcggcggagtggatccgagacatgtacgccaaggtcacggagatctggcaggaggtcatgcagcggcgggacgacgacggcgcgctccacgccgcctgccaggtgcagccgtcggccacgttggacgccgcgcagccccgggtgaccggcgtcgtcctcttccggcagcttgcgccccgcgccaagctcgacgccttcttcgccctggagggcttcccgaccgagccgaacagctccagccgcgccatccacgtgcaccagttcggggacctgagccagggctgcgagtccaccgggccccactacaacccgctggccgtgccgcacccgcagcacccgggcgacttcggcaacttcgcggtccgcgacggcagcctctggaggtaccgcgccggcctggccgcctcgctcgcgggcccgcactccatcgtgggccgggccgtggtcgtccacgctggcgaggacgacctgggccgcggcggcaaccaggccagcgtggagaacgggaacgcgggccggcggctggcctgctgcgtggtgggcgtgtgcgggcccgggctctgggagcgccaggcgcgggagcactcagagcgcaagaagcggcggcgcgagagcgagtgcaaggccgcctgagcgcggcccccacccggcggcggccagggacccccgaggcccccctctgcctttgagcttctcctctgctccaacagacaccttccactctgaggtctcaccttcgcctctgctgaagtctccccgcagccctctccacccagaggtctccctataccgagacccaccatccttccatcctgaggaccgccccaaccctcggagccccccactcagtaggtctgaaggcctccatttgtaccgaaacaccccgctcacgctgacagcctcctaggctccctgaggtacctttccacccagaccctccttccccaccccataagccctgagactcccgcctttgacctgacgatcttcccccttcccgccttcaggttcctcctaggcgctcagaggccgctctggggggttgcctcgagtccccccacccctccccacccaccaccgctcccgcggcaagccagcccgtgcaacggaagccaggccaactgccccgcgtcttcagctgtttcgcatccaccgccaccccactgagagctgctcctttgggggaatgtttggcaacctttgtgttacagattaaaaattcagcaattca

SEQ ID NO: 34492 - DNA, 1296 bp, Homo sapiens
ggggaggtctggcctgcttttcctccctgaactggcccaatgactggctccctcacgctgaccactcctctgggctggcctcctgcactcgcgctaacagcccaggctccagggacagcctgcgttcctgggctggctgggtgcagctctcttttcaggagagaaagctctcttggaggagctggaaaggtgcccgactccagccatgctggcgctactgtgttcctgcctgctcctggcagccggtgcctcggacgcctggacgggcgaggactcggcggagcccaactctgactcggcggagtggatccgagacatgtacgccaaggtcacggagatctggcaggaggtcatgcagcggcgggacgacgacggcgcgctccacgccgcctgccaggtgcagccgtcggccacgttggacgccgcgcagccccgggtgaccggcgtcgtcctcttccggcagcttgcgccccgcgccaagctcgacgccttcttcgccctggagggcttcccgaccgagccgaacagctccagccgcgccatccacgtgcaccagttcggggacctgagccagggctgcgagtccaccgggccccactacaacccgctggccgtgccgcacccgcagcacccgggcgacttcggcaacttcgcggtccgcgacggcagcctctggaggtaccgcgccggcctggccgcctcgctcgcgggcccgcactccatcgtgggccgggccgtggtcgtccacgctggcgaggacgacctgggccgcggcggcaaccaggccagcgtggagaacgggaacgcgggccggcggctggcctgctgcgtggtgggcgtgtgcgggcccgggctctgggagcgccaggcgcgggagcactcagagcgcaagaagcggcggcgcgagagcgagtgcaaggccgcctgagcgcggcccccacccggcggcggccagggacccccgaggcccccctctgcctttgagcttctcctctgctccaacagacaccttccactctgaggtctcaccttcgcctctgctgaagtctccccgcagccctctccacccagaggtctccctataccgagacccaccatccttccatcctgaggaccgccccaaccctcggagccccccactcagtaggtctgaaggcctccatttgtaccgaaacaccccgctcacgctgacagcctcctaggctccctgaggtacctttccacccagaccctccttccactttaattgctgttctcatgggcaaagttaccggaatccagattccttcttgagct

SEQ ID NO: 34493 - DNA, 1984 bp, Homo sapiens
ggatccagagatttagattttttataagctttcctgccaccgaaacgggtgtttgggacctcacgaggccctgttcattcttcgtcgctgcgctccccactctgtactggatgcatttactgacgttgttgtctccgtccccagagtatgaacccccaaggtgactcatgcagctgtgggtgcccggcatacagcatggtgactggaatggatgagcacccaataaacatttgttgcaggaatgcaggaggacgggcaggccagcaagcaggctgcctggtttttcccacatgggcttttctgggaaagaagagcttctatttttggaaagggctgctatgattgagaaaagttcatggcagcaaaaaaaggacagacgtcgggagggaaacactcctagttctcccagacaacacattttttaaaaagactccttcatctctttaataataacggtaacgacaatgacaatgatgattacttatgagtgcggctagtgccagccactgtgttgtcactgggcgagtaatgatctcattggatcttcacggtgggcgtgcggggctccagggacagcctgcgttcctgggctggctgggtgcagctctcttttcaggagagaaagctctcttggaggagctggaaaggtgcccgactccagccatgctggcgctactgtgttcctgcctgctcctggcagccggtgcctcggacgcctggacgggcgaggactcggcggagcccaactctgactcggcggagtggatccgagacatgtacgccaaggtcacggagatctggcaggaggtcatgcagcggcgggacgacgacggcgcgctccacgccgcctgccaggtgcagccgtcggccacgttggacgccgcgcagccccgggtgaccggcgtcgtcctcttccggcagcttgcgccccgcgccaagctcgacgccttcttcgccctggagggcttcccgaccgagccgaacagctccagccgcgccatccacgtgcaccagttcggggacctgagccagggctgcgagtccaccgggccccactacaacccgctggccgtgccgcacccgcagcacccgggcgacttcggcaacttcgcggtccgcgacggcagcctctggaggtaccgcgccggcctggccgcctcgctcgcgggcccgcactccatcgtgggccgggccgtggtcgtccacgctggcgaggacgacctgggccgcggcggcaaccaggccagcgtggagaacgggaacgcgggccggcggctggcctgctgcgtggtgggcgtgtgcgggcccgggctctgggagcgccaggcgcgggagcactcagagcgcaagaagcggcggcgcgagagcgagtgcaaggccgcctgagcgcggcccccacccggcggcggccagggacccccgaggcccccctctgcctttgagcttctcctctgctccaacagacaccttccactctgaggtctcaccttcgcctctgctgaagtctccccgcagccctctccacccagaggtctccctataccgagacccaccatccttccatcctgaggaccgccccaaccctcggagccccccactcagtaggtctgaaggcctccatttgtaccgaaacaccccgctcacgctgacagcctcctaggctccctgaggtacctttccacccagaccctccttccccaccccataagccctgagactcccgcctttgacctgacgatcttcccccttcccgccttcaggttcctcctaggcgctcagaggccgctctggggggttgcctcgagtccccccacccctccccacccaccaccgctcccgcggcaagccagcccgtgcaacggaagccaggccaactgccccgcgtcttcagctgtttcgcatccaccgccaccccactgagagctgctcctttgggggaatgtttggcaacctttgtgttacagattaaaaattcagcaattca

SEQ ID NO: 34494 - DNA, 1436 bp, Homo sapiens
ggggaggtctggcctgcttttcctccctgaactggcccaatgactggctccctcacgctgaccactcctctgggctggcctcctgcactcgcgctaacagcccaggctccagggacagcctgcgttcctgggctggctgggtgcagctctcttttcaggagagaaagctctcttggaggagctggaaaggtgcccgactccagccatgctggcgctactgtgttcctgcctgctcctggcagccggtgcctcggacgcctggacgggcgaggactcggcggagcccaactctgactcggcggagtggatccgagacatgtacgccaaggtcacggagatctggcaggaggtcatgcagcggcgggacgacgacggcgcgctccacgccgcctgccaggtgcagccgtcggccacgttggacgccgcgcagccccgggtgaccggcgtcgtcctcttccggcagcttgcgccccgcgccaagctcgacgccttcttcgccctggagggcttcccgaccgagccgaacagctccagccgcgccatccacgtgcaccagttcggggacctgagccagggctgcgagtccaccgggccccactacaacccgctggccgtgccgcacccgcagcacccgggcgacttcggcaacttcgcggtccgcgacggcagcctctggaggtaccgcgccggcctggccgcctcgctcgcgggcccgcactccatcgtgggccgggccgtggtcgtccacgctggcgaggacgacctgggccgcggcggcaaccaggccagcgtggagaacgggaacgcgggccggcggctggcctgctgcgtggtgggcgtgtgcgggcccgggctctgggagcgccaggcgcgggagcactcagagcgcaagaagcggcggcgcgagagcgagtgcaaggccgcctgagcgcggcccccacccggcggcggccagggacccccgaggcccccctctgcctttgagcttctcctctgctccaacagacaccttccactctgaggtctcaccttcgcctctgctgaagtctccccgcagccctctccacccagaggtctccctataccgagacccaccatccttccatcctgaggaccgccccaaccctcggagccccccactcagtaggtctgaaggcctccatttgtaccgaaacaccccgctcacgctgacagcctcctaggctccctgaggttcctcctaggcgctcagaggccgctctggggggttgcctcgagtccccccacccctccccacccaccaccgctcccgcggcaagccagcccgtgcaacggaagccaggccaactgccccgcgtcttcagctgtttcgcatccaccgccaccccactgagagctgctcctttgggggaatgtttggcaacctttgtgttacagattaaaaattcagcaattca

SEQ ID NO: 34495 - DNA, 1390 bp, Homo sapiens
cgcacggccccctccagccacggggagaaagctttcttggaggagctggaaaggtgcccgactccagccatgctggcgctactgtgttcctgcctgctcctggcagccggtgcctcggacgcctggacgggcgaggactcggcggagcccaactctgactcggcggagtggatccgagacatgtacgccaaggtcacggagatctggcaggaggtcatgcagcggcgggacgacgacggcgcgctccacgccgcctgccaggtgcagccgtcggccacgttggacgccgcgcagccccgggtgaccggcgtcgtcctcttccggcagcttgcgccccgcgccaagctcgacgccttcttcgccctggagggcttcccgaccgagccgaacagctccagccgcgccatccacgtgcaccagttcggggacctgagccagggctgcgagtccaccgggccccactacaacccgctggccgtgccgcacccgcagcacccgggcgacttcggcaacttcgcggtccgcgacggcagcctctggaggtaccgcgccggcctggccgcctcgctcgcgggcccgcactccatcgtgggccgggccgtggtcgtccacgctggcgaggacgacctgggccgcggcggcaaccaggccagcgtggagaacgggaacgcgggccggcggctggcctgctgcgtggtgggcgtgtgcgggcccgggctctgggagcgccaggcgcgggagcactcagagcgcaagaagcggcggcgcgagagcgagtgcaaggccgcctgagcgcggcccccacccggcggcggccagggacccccgaggcccccctctgcctttgagcttctcctctgctccaacagacaccttccactctgaggtctcaccttcgcctctgctgaagtctccccgcagccctctccacccagaggtctccctataccgagacccaccatccttccatcctgaggaccgccccaaccctcggagccccccactcagtaggtctgaaggcctccatttgtaccgaaacaccccgctcacgctgacagcctcctaggctccctgaggtacctttccacccagaccctccttccccaccccataagccctgagactcccgcctttgacctgacgatcttcccccttcccgccttcaggttcctcctaggcgctcagaggccgctctggggggttgcctcgagtccccccacccctccccacccaccaccgctcccgcggcaagccagcccgtgcaacggaagccaggccaactgccccgcgtcttcagctgtttcgcatccaccgccaccccactgagagctgctcctttgggggaatgtttggcaacctttgtgttacagattaaaaattcagcaattca

SEQ ID NO: 34496 - DNA, 214 bp, Homo sapiens
gccaccgcgcccggccctctacaaaaaattttttaaaaattagccagatgtggtggtacgcacttgtcctcccagcttactccataggctgaggtgggaggatcgcttgagcccaagaggctgcagtgaaccatgattatgccactgcactccagcctgggcaacagagtgagactctgtctcaaaaaaaaaaaaaaaatgccggacacagtgc

SEQ ID NO: 34497 - DNA, 310 bp, Homo sapiens
agtgagaggagcatgtgggggtgaagccatctcatacagtactacccttcctaggtgtagagtgaggagatgtgccacggctgttgacccttcttaaactgcagagcgtttgatgtccagggacagttgttggggcagggtcagacttagagcttttgtcttgtgctgagatgtgctcctttttctttcctcccccttccctagctcttggacggctttgccccatcactgattggtgcacacccccttttgagaatctcagggactcagtttggtaaaagcagctggtggagatgatggagagaggagg

SEQ ID NO: 34498 - DNA, 408 bp, Homo sapiens
agacgggtggatcacctgaggtcaggctttcaagaccagcctggccaacagggtgaaaccctgtctctactaaaaatacaaaaattaccttgacgtggcatcctgtctgtaatcccagctacttgggaggctgaagcagaatcgcttgaacctgggaggcagaggttgcagtgagccgagatcacgccacggcactccagcctgggtgccagagcgagacatcatctcaaacaaacaaacaaacaaaaaagttgtcacagtataaataccaatcttagaagattctgacaattattttgaaaatgatagggaaatatcttggttttcctcttctttgcgcatggatacacatcacatattcacatcattaagcatattacaagtggagtagcaaccttatatcaaaat

SEQ ID NO: 34499 - DNA, 393 bp, Homo sapiens
acttgcaccattttacatagaattaaatattccaatcattttcactgcagaatagagacacagcccatactgagaaaggaacaaaattgtttgaagccaacagttttatactcaggcgctccccctgctgggactgtaggggtagtttccatagcaagcaattctctgcagatgttttaacatcagttgtttgattcacaccgttaaatacccactacctaaacatccctgggtatgcatcggacaggggtgtttgggaggagagtaacagtgacaattgagcctgagtccagttcttgaaatcatgacttttaatctcagtgatacctagatggtatattagaaaggcaaatagacaaatcaatatttagctgtttgtgtttttttaaacta

SEQ ID NO: 34500 - DNA, 442 bp, Homo sapiens
ctaaatgccacatgtgtggagcccacagagctgacagggtggcccatcacccgggtggggaacccactccgatacatgtgcatcacgcacctggaccacaaagactacatcttcctgctgctcatcggcttctgcatcttcgccgcgggaactgtggctgcctggctcacaggtgtgtgtgctgtgctctaccagaacacccgccacaagtcgagtgaagaagatgaggacgaggccgggactagggtggaagtcagccggcggatttttcaaacccagacgagctcggtccaggagttccctcagcttatttagttgccagagaccattatcttatgtgcctcccccaggctccctgctttctctcttgccctccccatcccaccaccttggagctgtcatagagattgaaaccttctagtaaaataaataaaatctcaaa

SEQ ID NO: 34501 - DNA, 155 bp, Homo sapiens
aagatctggtcaggtctcctgttaaaccttttgaacttaaacttttcctttctcctttttttctacatgttttactaatttgtgagtttttaatcaaatatgtatgtcattgttcttcattttatttatgcctaaatgcgtcttgtcttcacaca

SEQ ID NO: 34502 - DNA, 3920 bp, Homo sapiens
acagaagaaatagcaagtgccgagaagctggcatcagaaaaacagaggggagatttgtgtggctgcagccgagggagaccaggaagatctgcatggtgggaaggacctgatgatacagaggaattacaacacatatacttagtgtttcaatgaacaccaagataaataagtgaagagctagtccgctgtgagtctcctcagtgacacagggctggatcaccatcgacggcactttctgagtactcagtgcagcaaagaaagactacagacatctcaatggcaggggtgagaaataagaaaggctgctgactttaccatctgaggccacacatctgctgaaatggagataattaacatcactagaaacagcaagatgacaatataatgtctaagtagtgacatgtttttgcacatttccagcccctttaaatatccacacacacaggaagcacaaaaggaagcacagagatccctgggagaaatgcccggccgccatcttgggtcatcgatgagcctcgccctgtgcctggtcccgcttgtgagggaaggacattagaaaatgaattgatgtgttccttaaaggatgggcaggaaaacagatcctgttgtggatatttatttgaacgggattacagatttgaaatgaagtcacaaagtgagcattaccaatgagaggaaaacagacgagaaaatcttgatggcttcacaagacatgcaacaaacaaaatggaatactgtgatgacatgaggcagccaagctggggaggagataaccacggggcagagggtcaggattctggccctgctgcctaaactgtgcgttcataaccaaatcatttcatatttctaaccctcaaaacaaagctgttgtaatatctgatctctacggttccttctgggcccaacattctccatatatccagccacactcatttttaatatttagttcccagatctgtactgtgacctttctacactgtagaataacattactcattttgttcaaagacccttcgtgttgctgcctaatatgtagctgactgtttttcctaaggagtgttctggcccaggggatctgtgaacaggctgggaagcatctcaagatctttccagggttatacttactagcacacagcatgatcattacggagtgaattatctaatcaacatcatcctcagtgtctttgcccatactgaaattcatttcccacttttgtgcccattctcaagacctcaaaatgtcattccattaatatcacaggattaacttttttttttaacctggaagaattcaatgttacatgcagctatgggaatttaattacatattttgttttccagtgcaaagatgactaagtcctttatccctcccctttgtttgattttttttccagtataaagttaaaatgcttagccttgtactgaggctgtatacagccacagcctctccccatccctccagccttatctgtcatcaccatcaacccctcccatgcacctaaacaaaatctaacttgtaattccttgaacatgtcaggcatacattattccttctgcctgagaagctcttccttgtctcttaaatctagaatgatgtaaagttttgaataagttgactatcttacttcatgcaaagaagggacacatatgagattcatcatcacatgagacagcaaatactaaaagtgtaatttgattataagagtttagataaatatatgaaatgcaagagccacagagggaatgtttatggggcacgtttgtaagcctgggatgtgaagcaaaggcagggaacctcatagtatcttatataatatacttcatttctctatctctatcacaatatccaacaagcttttcacagaattcatgcagtgcaaatccccaaaggtaacctttatccatttcatggtgagtgcgctttagaattttggcaaatcatactggtcacttatctcaactttgagatgtgtttgtccttgtagttaattgaaagaaatagggcactcttgtgagccactttagggttcactcctggcaataaagaatttacaaagagctactcaggaccagttgttaagagctctgtgtgtgtgtgtgtgtgtgtgagtgtacatgccaaagtgtgcctctctctcttgacccattatttcagacttaaaacaagcatgttttcaaatggcactatgagctgccaatgatgtatcaccaccatatctcattattctccagtaaatgtgataataatgtcatctgttaacataaaaaaagtttgacttcacaaaagcagctggaaatggacaaccacaatatgcataaatctaactcctaccatcagctacacactgcttgacatatattgttagaagcacctcgcatttgtgggttctcttaagcaaaatacttgcattaggtctcagctggggctgtgcatcaggcggtttgagaaatattcaattctcagcagaagccagaatttgaattccctcatcttttaggaatcatttaccaggtttggagaggattcagacagctcaggtgctttcactaatgtctctgaacttctgtccctctttgtgttcatggatagtccaataaataatgttatctttgaactgatgctcataggagagaatataagaactctgagtgatatcaacattagggattcaaagaaatattagatttaagctcacactggtcaaaaggaaccaagatacaaagaactctgagctgtcatcgtccccatctctgtgagccacaaccaacagcaggacccaacgcatgtctgagatccttaaatcaaggaaaccagtgtcatgagttgaattctcctattatggatgctagcttctggccatctctggctctcctcttgacacatattagcttctagcctttgcttccacgacttttatcttttctccaacacatcgcttaccaatcctctctctgctctgttgctttggacttccccacaagaatttcaacgactctcaagtcttttcttccatccccaccactaacctgaatgcctagacccttatttttattaatttccaatagatgctgcctatgggctatattgctttagatgaacattagatatttaaagctcaagaggttcaaaatccaactcattatcttctctttctttcacctccctgctcctctccctatattactgattgcactgaacagcatggtccccaatgtagccatgcaaatgagaaacccagtggctccttgtggtacatgcatgcaagactgctgaagccagaaggatgactgattacgcctcatgggtggaggggaccactcctgggccttcgtgattgtcaggagcaagacctgagatgctccctgccttcagtgtcctctgcatctcccctttctaatgaagatccatagaatttgctacatttgagaattccaattaggaactcacatgttttatctgccctatcaattttttaaacttgctgaaaattaagttttttcaaaatctgtccttgtaaattactttttcttacagtgtcttggcatactatatcaactttgattctttgttacaacttttcttactcttttatcaccaaagtggcttttattctctttattattattattttcttttactactatattacgttgttattattttgttctctatagtatcaatttatttgatttagtttcaatttatttttattgctgacttttaaaataagtgattcggggggtgggagaacaggggagggagagcattaggacaaatacctaatgcatgtgggacttaaaacctagatgatgggttgataggtgcagcaaaccactatggcacacgtatacctgtgtaacaaacctacacattctgcacatgtatcccagaacgtaaagtaaaatttaaaaaaaagtga

SEQ ID NO: 34503 - DNA, 648 bp, Homo sapiens
  misc_feature (2)..(2): n is a, c, g, or t
  misc_feature (20)..(20): n is a, c, g, or t
  misc_feature (596)..(596): n is a, c, g, or t
  misc_feature (610)..(610): n is a, c, g, or t
  misc_feature (616)..(616): n is a, c, g, or t
gnaattcggccacgagaagnagcagagagagagagagagagagagagagagagagagagagagagagagagagagagagagagagagagagagagagagagagactcgtgccgaattcggcacgagtatggagctggagctgaagtttagcccaattgtttactagttgagtgaatgtggatgattggatgatcatttctcatctctgagcctcaggttccccatccataaaatgggatacacagtatgatctataaagtgggatatagtatgatctacttcactgggttatttgaaggatgaattgagataatttatttcaggtgcctagaacaatgcccagattagtacatttggtggaactgagaaatggcataacaccaaatttaatatatgtcagatgttactatgattatcattcaatctcatagttttgtcatggcccaatttatcctcacttgtgcctcaacaaattgaactgttaacaaaggaatctctggtcctgggtaatggctgagcaccactgagcatttccattccagttggcttcttgggtttgctagctgcaaccaaccaaggcaaccttaaaaaaaatngaaggttttaaacncttttnaaaaaaaaaaaaaaaaaaaaaaacccccgagg

SEQ ID NO: 34504 - DNA, 2035 bp, Homo sapiens
  misc_feature (1974)..(1974): n is a, c, g, or t
  misc_feature (1987)..(1987): n is a, c, g, or t
  misc_feature (1991)..(1991): n is a, c, g, or t
  misc_feature (2015)..(2015): n is a, c, g, or t
  misc_feature (2028)..(2028): n is a, c, g, or t
acagaagaaatagcaagtgccgagaagctggcatcagaaaaacagaggggagatttgtgtggctgcagccgagggagaccaggaagatctgcatggtgggaaggacctgatgatacagaggaattacaacacatatacttagtgtttcaatgaacaccaagataaataagtgaagagctagtccgctgtgagtctcctcagtgacacagggctggatcaccatcgacggcactttctgagtactcagtgcagcaaagaaagactacagacatctcaatggcaggggtgagaaataagaaaggctgctgactttaccatctgaggccacacatctgctgaaatggagataattaacatcactagaaacagcaagatgacaatataatgtctaagtagtgacatgtttttgcacatttccagcccctttaaatatccacacacacaggaagcacaaaaggaagcacagagatccctgggagaaatgcccggccgccatcttgggtcatcgatgagcctcgccctgtgcctggtcccgcttgtgagggaaggacattagaaaatgaattgatgtgttccttaaaggatgggcaggaaaacagatcctgttgtggatatttatttgaacgggattacagatttgaaatgaagtcacaaagtgagcattaccaatgagaggaaaacagacgagaaaatcttgatggcttcacaagacatgcaacaaacaaaatggaatactgtgatgacatgaggcagccaagctggggaggagataaccacggggcagagggtcaggattctggccctgctgcctaaactgtgcgttcataaccaaatcatttcatatttctaaccctcaaaacaaagctgttgtaatatctgatctctacggttccttctgggcccaacattctccatatatccagccacactcatttttaatatttagttcccagatctgtactgtgacctttctacactgtagaataacattactcattttgttcaaagacccttcgtgttgctgcctaatatgtagctgactgtttttcctaaggagtgttctggcccaggggatctgtgaacaggctgggaagcatctcaagatctttccagggttatacttactagcacacagcatgatcattacggagtgaattatctaatcaacatcatcctcagtgtctttgcccatactgaaattcatttcccacttttgtgcccattctcaagacctcaaaatgtcattccattaatatcacaggattaacttttttttttaacctggaagaattcaatgttacatgcagctatgggaatttaattacatattttgttttccagtgcaaagatgactaagtcctttatccctcccctttgtttgattttttttccagtataaagttaaaatgcttagccttgtactgaggctgtatacagccacagcctctccccatccctccagccttatctgtcatcaccatcaacccctcccatgcacctaaacaaaatctaacttgtaattccttgaacatgtcaggcatacattattccttctgcctgagaagctcttccttgtctcttaaatctagaatgatgtaaagttttgaataagttgactatcttacttcatgcaaagaagggacacatatgagattcatcatcacatgagacagcaaatactaaaagtgtaatttgattataagagtttagataaatatatgaaatgcaagagccacagagggaatgtttatggggcacgtttgtaagcctgggatgtgaagcaaaggcagggaacctcatagtatcttatataatatacttcatttctctatctctatcacaatatccaacaagcttttcacagaattcatgcagtgcaaatccccaaaggtaacctttatccatttcatggtgagtgcgctttagaattttggcaaatcatactggtcacttatctcaactttgagatggggnttggccccttggnaggnaaattggaaaagaaaaaagggggnccccccttggtgnggcccac

SEQ ID NO: 34505 - DNA, 801 bp, Homo sapiens
  misc_feature (749)..(749): n is a, c, g, or t
  misc_feature (763)..(763): n is a, c, g, or t
  misc_feature (769)..(769): n is a, c, g, or t
acagaagaaatagcaagtgccgagaagctggcatcagaaaaacagaggggagatttgtgtggctgcagccgagggagaccaggaagatctgcatggtgggaaggacctgatgatacagagtttgataggagacaattaaaggctggaaggcactggatgcctgatgatgaagtggactttcaaactggggcactactgaaacgatgggatggccagagacacaggagatcagttggagcaagctcaataacaaagtggttcaacgaggacttggaattgcatggagctggagctgaagtttagcccaattgtttactagttgagtgaatgtggatgattggatgatcatttctcatctctgagcctcaggttccccatccataaaatgggatacacagtatgatctataaagtgggatatagtatgatctacttcactgggttatttgaaggatgaattgagataatttatttcaggtgcctagaacaatgcccagattagtacatttggtggaactgagaaatggcataacaccaaatttaatatatgtcagatgttactatgattatcattcaatctcatagttttgtcatggcccaatttatcctcacttgtgcctcaacaaattgaactgttaacaaaggaatctctggtcctgggtaatggctgagcaccactgagcatttccattccagttggcttcttgggtttgctagctgcaaccaaccaaggcaaccttaaaaaaaatngaaggttttaaacncttttnaaaaaaaaaaaaaaaaaaaaaaacccccgagg

SEQ ID NO: 34506 - DNA, 361 bp, Homo sapiens
aaggacctgatgatacagaggtctgtaggccatgggaatgggtttggaattttattcaaagagctatgggaagtgactagaaggtttaaagttggggaagaggttttgtgtttctgttatatttgtgttttatacaaattactctggttgctgtgttgataggacagcagaagggtaggagcagggacaccagttaagttattgcaatggttaaggtgagaggtggtggctgggcctaggcctttttggagtgaacaagctatttgcttggcttccatgatccttctccctccactggaatggaaggtacttgatattagagatttttgtctgtttcatcactactgtaaccccaatgtct

SEQ ID NO: 34507 - DNA, 480 bp, Homo sapiens
gctgtaacaaaacaccacagaatggatgatttataaagaaaagacatttacttggctcacagttctggaggctgggaagtccaagatcaaggtgccacatatagtgagggccttcttgctgcatcataacatggtagaaggcatcacatggtgaggaagtacatgcaggagacagaaaaaagggggctgaacttcattcttttatcaggagcccactcctacgataactaaccctctcctgaaacaacagcattaatctattcatgagggcagaaccctcatgacataataacctcataaaggtgcctcctttcaaaactgttacaatggcaattaaatttcaacatgagttttggaggggacattccagatatagcatatggatcctttggaaatgacatgccccaaatgtgtctatattccacgttacaactagttctaacaaccaattatctttctgttgtcttgaaatcttctcaa

SEQ ID NO: 34508 - DNA, 363 bp, Homo sapiens
gcaattcaatgacatttagaaaatttaccaagtggtgctaccatcaccataaaccagttttagaacactttcttcatcccaataagatccttcatggacatggttacttttaataagaactctctcattaaatatcaagtgtgatcaggagagaaacatgggtttcatcaatagataactggaatattttttctttctcaaaaattcttccataactatcctttccattcccgaagaccatcctctgcttcagagcttcatgactccagttccataatactacaaaagtctcacaggtaatatgtctagggacagccaaaccattccttctaactcatggttgtatttaccttcctaaaatcc

SEQ ID NO: 34509 - DNA, 331 bp, Homo sapiens
ctaagcgtctgtatccactgatagcaatgcaacacctagtttatgatgacttgaaagaaaacaaatgcccatgaagaaaaaagctgtattttaattttatctaaatgtactttcagtcaatagttcagtaacattttcctcccaatacaatactccctctctctataaggctattcctgggagccagacaagtttaggtaataagggagttaagagagtaactgcttgcagttttaaatagacaattaactttttgcttccctcttaatgtgctaatagttgtgtctaaaaaaaaaaagtcgacgcggccgcgaatttagtagtagtagta

SEQ ID NO: 34510 - DNA, 722 bp, Homo sapiens
ggtactttaggaatcttatttagtatcatttaaattgggggaggagggaagatgttttactgctagcttcattttatttatttttatttttatttttttaagtttttttgagatggagtctcactctgttgcagtgagccgagattgtgccactgcactccagcctgggcgacagagcaagactccgtctaaaaaaaaaaaaaagatattaaaattaatgacaggaagagtttgggttcagttataatttaagggaaaaaacattgaggggcctaatctacattttgctccggatccaatgatttaatttttgggaagaaaaatccagtgattaaagtcatgcaaggagatggcctggggcttgctaaaagtcaggttgcagtttccattgcattcaagaaaatcagaaaaataaatacaacttttagaagaaactaagttttctcccattcatgtttagctattggggggtctcatacttctggacttgcttagacctatgctatctaatatggtagcctctgcccatccatatgtggccactgagaacttgaaatgtgactagtttgaattaagatgtgctgtaactaaaatacaccctggatttcaaagacttaataaataatgtaaattatctattctttcctgttgattatatattgaaatgataatattttggatatgtttgggttaaataaaatatattactaaaagtaaaaaaa

SEQ ID NO: 34511 - DNA, 988 bp, Homo sapiens
tttcaagccaggtcgacgtgaccatttaaatgttatgctatttcaaagtcttctacatctttagaaaaggacatgagggagggttagttaagtggggcaatgagaatgtagagtgtaatgtgcaaaagcaggactagcagttgctttgaagatatctggggaaggccgggcacggtggttcacgcctgtaatcccagtactttgggaggccaaggtgggcggatcacgaggtcaggagatcgagatcatcctggctaacgtgaaaccccgtctatataaaaatacaaaaaaaaaaaaaaaaaaaaaaattagccgggcgtggtggcgcgtgcctgtaatcccagctacacaggaggctgaggcaggagatttgcttgaacctgggaggcggaggttgcagtgagccgagattgtgccactgcactccagcctgggcgacagagcaagactccgtctaaaaaaaaaaaaaagatattaaaattaatgacaggaagagtttgggttcagttataatttaagggaaaaaacattgaggggcctaatctacattttgctccggatccaatgatttaatttttgggaagaaaaatccagtgattaaagtcatgcaaggagatggcctggggcttgctaaaagtcaggttgcagtttccattgcattcaagaaaatcagaaaaataaatacaacttttagaagaaactaagttttctcccattcatgtttagctattggggggtctcatacttctggacttgcttagacctatgctatctaatatggtagcctctgcccatccatatgtggccactgagaacttgaaatgtgactagtttgaattaagatgtgctgtaactaaaatacaccctggatttcaaagacttaataaataatgtaaattatctattctttcctgttgattatatattgaaatgataatattttggatatgtttgggttaaataaaatatattactaaaagtaaaaaaa

SEQ ID NO: 34512 - DNA, 447 bp, Homo sapiens
tttcaagccaggtcgacgtgaccatttaaatgttatgctatttcaaagtcttctacatctttagaaaaggacatgagggagggttagttaagtggggcaatgagaatgtagagtgtaatgtgcaaaagcaggactagcagttgctttgaagatatctggggaaggccgggcacggtggttcacgcctgtaatcccagtactttgggaggccaaggtgggcggatcacgaggtcaggagatcgagatcatcctggctaacgtgaaaccccgtctatactaaaaatacaaaaaattaaccggacgcagtggtgggcgcctgtagtcccagctactcgggaggctgaggcaggagagtggcatgaacccgggaggcggagcttgcagtgagctgagatcgcaccactgcattccagcctggacaacagagcgaaactccgtctcaaaaac

SEQ ID NO: 34513 - DNA, 569 bp, Homo sapiens
gatggatgtggtcattgccctgatttgaacattacaaattgtgtacatagatcacaacatcacaccacacctcataaatgtgcacaattgttatgcgtccaaacaataataaaaaccaaaaataaaaatgaaacacgtggaaacaggaaaaacgcctttaagaatagagtatagcaaggacttccaaaagcaagtacaggaaagggagggggatgtagctcagtggtagagcgcatgctttgcatgtatgaggccccgggttcgatccccggcatctccattgtagttttgttgctttctgtattcgttttggtccgtggttctttatcattaaagtgccatggatgtgattatcataagcattgtgattccaggcactacttggagctcagattctcacaccaggtgtgatcttcccattctgaaatctctaatgtttcaaatgcacatgagttagaagaggctgatgggagtaatcagcagaaaagtgttaaggcaaaacctgacttgatgactgaaaccacagcaaaagtgagcaggatgatcatttggggagtgtacaccacatc

SEQ ID NO: 34514 - DNA, 483 bp, Homo sapiens
gattcctctcattcttgttccattgtccccggaacatggtcccctttgcccggtgactaccaccaggcacctttcccatcatggggaaggaggagaaatgggacaggaagggctcatcccttcacataaaagccgtggtgcaccagtaagcatttaacaaccagatctctgctggggggcagggagattgattggttgcttttgccagtttccatggtgtacatattcccaccatcgccagtttcaagctaccaacatgaggtaaactgaatgtggagtctggaagggatactcacagtacaggctgggctttgctgctctggcacgtcactgttttaagagctccatctacacattgcctctttcacttccaccaacatctccagaattagacacctgtctgcaagggaggctggggaatgtagtttttcgttgacattaagtccagtggccaggtggcccagctacaaactgaaggttctt

SEQ ID NO: 34515 - DNA, 404 bp, Homo sapiens
agtcttttgagagtcgacgacttgatgtctcttttatctctaaaaacttcagtgtcctaaagacaagattactttcttacataaccacactatagttaccaaaatcaggaaattagggctggctgcggtggctcacgcctgtaatcccagtactttgggagaccaaggcaggcagatcacctgaggtccggagcctggccaggccatgagcctggccaacatggtgaaaccctgggtctactaaaaatacaaaaattagccggacgtggtagcgggtgcctatagcccaagatactcaggaggctgaggcaggagaaccgcatgaacctgggaggcggaggttgcagtgagctgagatcacaccattgcactccagcctgggtgacagagcgagactccatctg

SEQ ID NO: 34516 - DNA, 486 bp, Homo sapiens
agtttagagaggtatatacttttttatggagaaatttgtcagtgttacatgtccagtggagttgagttgggaagactgaagttatatcagtcacttcaatcaaattgttagtggtgagacatgggtttgtttgtaagtgccatgatgagctgctctatatttgtggacatgagcttttgggatgtacaatcacattttataagaaaaaatggaataatttggatggaatatactttataaaatgaagctattgaaataaccagtttatatgagaaatcagatatttcagaattgttttgtaaatgtgattgttgacacctacttgggccaccttcttggcagtaaggtgtgctaatttctgacccttttttctgtctgttatgtccctggtcatgagctggaaaaaaattctaaggtgtttcttcacaaccttctgaataatgaggtaatgatttttctccacagctgatgtatttctataaataa

SEQ ID NO: 34517 - DNA, 1272 bp, Homo sapiens
aaaggttgagtggttaaagaggattgtctagtgttattgtctaagactggttccaacacacaccttggacatctggaataagtcctgaacccctgctttagtacttttgaacaaactgattctctctgcctacaattcccatttcttactgaactgctcagtaagacccgaaaagcccattccaaatccatctcacttatgtaagaaattataagactggacttttatcaaaaggttcttttcagtttacaggttttgtgagtctgcaaataaaaatatgaccctgctgggtgtggtgactcacacctgtaatctcagcactttgagagcccgaggcaggaggatgacttgagaccagcctgttcaacatagcaaaaccccatgtctaccaaaaataaaaaatagctgggtgtggttgtttgtgcctgtagtgccagctgagatcaaaggatcccttgagcgatgatggcaccactgcactccagcttgagtgacagagtgagacgccatctctaaaaaaaattaaaatacgagcagagaagtgttattctccactgaaactttctttgctttagtgccccaaatatgttaaataccagtataaggaatgagacagataatgtcttatttcatgtttattgtgagctctcattatattatctgtaccagttttgaacctctttagttaccatcctgtttagttggtaagaaataggaggcaaaaaggtaatagtcacatttaaatgacttagtaattaaaagaactaaattattcatagttgagtcattatctgttcagatctgcagtgttcttataataataggaaacatttatgtaatactatgtgttagataatgttttacctatattaacttatcctcacaatagcactgaggtgtttttatagataggcaactaaagcaaagagaagatagtaaatataccaaaggtcatgtagctactacatggtagtactgagtgtcagagaagacaagatcaaaatctgtaatctaacatttattgagaacctactgtgtaccagccccacagctgggtgctttcattatgagttagtcatttgtctttacaactaccttatttaaaatggaagttcagcatgtaatgacttgctcagagtcacagataagtaaactgtggaatcaggatttgaacccatgcttgtcgtacttcaaggttcctgttctttctttcattttccttcagtgatcaaatctttattaaacaccttctgtgtgccacacactgtgcca

SEQ ID NO: 34518 - DNA, 133 bp, Homo sapiens
gacccacttctaatgtacatcttccacattttacctgtttctttttccggtaatggctacctgcgttgcctccaacaccattaccactacaaataatgctgcagtgaaaccattaatatctgctctttattgt

SEQ ID NO: 34519 - DNA, 978 bp, Homo sapiens
atgaattcctcatttcacctgcatttcttggatctcaacctgaatgccacagagggcaacctttcaggacccaatgtcaaaaacaagtcttcaccatgtgaagacatgggcattgctgtggaggtgtttctcactctgggtgtcatcagcctcttggagaacatcttggtcataggggccatagtgaagaacaaaaacctgcactcccccatgtacttcttcgtgtgcagcctggcagtggcggacatgctggtgagcatgtccagtgcctgggagaccatcaccatctacctactcaacaacaagcacctagtgatagcagacgcctttgtgcgccacattgacaatgtgtttgactccatgatctgcatttccgtggtggcatccatgtgcagcttactggccattgcagtggataggtacgtcaccatcttctacgccctgcgctaccaccacatcatgacggcgaggcgctcaggggccatcatcgccggcatctgggctttctgcacgggctgcggcattgtcttcatcctgtactcagaatccacctacgtcatcctgtgcctcatctccatgttcttcgctatgctgttcctcctggtgtctctgtacatacacatgttcctcctggcgcggactcacgtcaagcggatcgcggctctgcccggggccagctctgcgcggcagaggaccagcatgcagggcgcggtcaccgtcaccatgctgctgggcgtgtttaccgtgtgctgggccccgttcttccttcatctcactttaatgctttcttgccctcagaacctctactgctctcgcttcatgtctcacttcaatatgtacctcatactcatcatgtgtaattccgtgatggaccctctcatatatgccttccgcagccaagagatgcggaagacctttaaggagattatttgctgccgtggtttcaggatcgcctgcagctttcccagaagggattaa

SEQ ID NO: 34520 - DNA, 503 bp, Homo sapiens
gggaattgagaaaaagcagtaagctcaagtatccgtttcttttacacaaggaaaactcgcctttgcccaaagtgttctatgaaacaactgcacttttgaaatgatgcttcgcttcctaattggatgtgtggtttggccagaacagcctcctcagtagccctcccagagtaatccctggaaactaggttgcccgagaatctcatcccttcctccaccctgcccggccctaagccaaggcctccacctggaagagcagtgacgtaaatggcccttactgagattcatctgaaatcatcccaggcagggagggcacatttgccgcatatgaaaaaatgaacccaaagaaggggaggaaaaggtcactctttagggcaactggaggaatgaacaggaagcttttaactagtggtttcaattagcactgatattatttcctgaacagttctctagtgcatcctttttaaattgctgacaggtgtgtttgtgtttcatgacagactttt

SEQ ID NO: 34521 - DNA, 642 bp, Homo sapiens
ctttcagtctgttacttgcctttttagttcctaatgacatctttggataagcagaattttttaattttgatgaagtatagtttatcttatttttccattatatattttgtgtcttttgtatcctcactaagaaatcttttcttaccctaggttatagaaatattcatctttgttttcttctagaagctttatttatcttttggtgtatgttccatcacaaatttttgagtgtgatatgaggtaagggtagaggttcattttctccatatgtttatctagtcgttccagcactatttgttgaaagaccttactttctccattgaatgtccctggcacctccgttgaaaatcagttgcttgagggccaggtgcagtagctcacacctgtaatcccagcactttggggggatgaggcgggtggatcacgaggtcaggagttcaagaccagcctggccaatatggtgaaaccccgtctctactaaaaatacaaaaagtagccaggtatggtggtgggcacctgtaatcccagctacatgggaggccgaggcaggagaatagcttgaacctgggaggcggaggttgcagtgagctgagatcgcgccactgcactccagcctgggagacagagtgagactccacctca

SEQ ID NO: 34522 - DNA, 327 bp, Homo sapiens
cttctttgactgtgtagaataaacatgcatacagttgtctttgaagtcgttagctcacattgaaaagaaaaagtttagaagaaattaaatatataattttgggggaaaatttatctataattttagctcatagtttacaattcctatatgactgtttggaaggtatttattttagaatggatggatgttccgtattaacctgtaggaagggtttgtgaatattctgttgctctgaattattagcggtctagatctaggctggactttgagaaatatgaaataaaaaaatacctctttggagtgtggtgttgctctttaaaaaaaaaa

SEQ ID NO: 34523 - DNA, 857 bp, Homo sapiens
gtgtgtgagggggcctaaaatgggtccacatcccccatgagacgccccgcgccttggttgcgccacgaccctgtcccatttgccttcaagttttcctttgcttgagtattagtatggttgcacgacatgagattttctgaggaccactgaccaaaccatactaacagatgtggtttattcatgaccctttaagaaaaaattttagtatcatgttgattagtacttgacaaagccagtgtgaaactactattacatctaatctgccacactcttaaggtctcatatgtaaaataatggagttaaagcaggacactgaagttgcctgcagttttaaaatctataaacccaggatcttttatgaagtagtttcattttaagacatttgcccaaccttctctcaactgtcaaatcttttcaatttttaattgtgaaataattttaaacttacagaaaagtttcaatagcaaagtcttgtatattttttctcccagattctctaatgattagtattttaccacatttttcctatcatctctaaatacacacaccaacacacacagacatacatatgcactcacttttttccaaaaccatttgtgagtcagtaatacattactcctaatacttcagtactggctttccaaaacaaggctattccctcatataacaggacaaccatcatggggaaattaacattgatatatcattactatttaatccacagaactcattcaaatttctccaattgccctaatacctccaaatcattttccctcgtataaggaggtaggtaaaaatgaaaaattttcagtccgcagtccggcctgggcgacagagcgagactccgtctcaaaaaa

SEQ ID NO: 34524 - DNA, 456 bp, Homo sapiens
aataagaaaggaaaaaacactatttcttgctgaccttaaaataacgctttcacaaacaaggccatgcttttaatgctttgcgtcacatggacactatgttgcccaatgagacatgatacatctttgatagtgaactttacactaaatggacaaagtaataattatattgtactaaattatacataatggttaattgtgttgttgaaattcttcaagcagcactaacagggaccactagctggaactatttcattattctgtagagatctaggaaggaacttaaaatatagtgttccatatcttgccattttttaaaaaaccaaccagccatttttaattagaacacataacctgtttcagtctaggccttcaagttttcctttgcttgagtattagtatggttgcacgacatgagattttctgaggaccactgaccaaaccatactaacagatgtg

SEQ ID NO: 34525 - DNA, 1221 bp, Homo sapiens
gtatcaggagtctagctgctggaggatgggacagctgtgctgggtcttcagggcatttctgctgcgaatgcggctctccaggcccttcacttctattctggattttattccctccattaaggagagtttaaaaataaaagaaagcttctgagagtaaacattttgctcctaagctgaagggaatgcacagctatttagtaagtgataagtttcttattttgaggacttgactcccatttgctctcagtgaccccagggcagagccagagaagtgttccgtacccactgctgatggtttcccagagcccacactgagttgaagaacctattgttcttcttggcatccttcttatgctacttctcccatcgctcaaaggggttgcctatgctgggtgtgccctgccctaaatgcagcaccactttcaagcttagtaggaccattccaagaaaaccaggtttcttctccccataccacgttgtgcctgaagaacaagccttcccgtccttgcctgcatgtgagtcacttcttggctgtgcagcaggtccccccctccccgcgatatgctggagggtaggattctgcagcctgtgttgctctctacctggcagcagactgtgcaggagccccaacctgtcctccaattccagcattcacagctgatgagcagtgcaggagcagggcgagaggaacagagccaatgatgtgtgggttacactgaggagccaaggacagggcctcaggtctcccccttacaaggcgtggctcatggcctgcattccagagaccaacatgatagcttttaattcagctgcatgacctgtgccttttaagccataaagatacctcaagcctagcacctcttgaaatccagatgttcatattagactcgaaaaaataggctccaggcctaggtgcccaggctatgatgagtctgcttttgaaggaggtagggaatgacatcttccttggacccaaagcttaaaagtaatgtatgctttgctgaccactgtttgttaggccttaaacaacattcactgtggtggtatcaggcacactgctatgtgcatcaattatttttttgctttccaaacagaatctctggggcacaagttttacactcaagctaagtataactttgtcatttcaggtaaatatgacaagtggtggagcatgaagttttctaatttgacttaatcctaataaatttttgttacaaagta

SEQ ID NO: 34526 - DNA, 781 bp, Homo sapiens
ggatggcgttcagaggatccccgctattctcggcactcttcacgtcgggtattgggaggaggaacaacccccatgttgacttggcttcagatcagagtgggcgtggacctggatgaaaatctgaaggaggacccctcctcacaacaccaggaagcaaataacttggataaaaacatgacgaaagcagagagtgctcggctcttcagaatgtggtatagctttgaccacaagtatctgaaaccaattttaacccactctggtcctccgctgactacaacattacctgaatggtgtggtccgatttccaggctgcttaccagtcctcaagcctatggggaacagctaaaagaggatgatgtggaatgcattgtaaaccaggatgaactagccataaattaccaggagcaagcctcctcaccctgcagtcctcctgcaaggctaggtctggaccagaaagcttcaccccagacgccaggcaaggaaaacatttatgagggagacctcggcctgggaggctatgaactcaagcttgagcaaactttgggtcaatcccagttgaattaattggcatgaagagtacagatgtaatcacaagtaatgcaagactcactgaggaatacaagccaagctgatgaggcagtacaggggagaggctggaaaacatattaagagcataaattggagagaatcaaagccttgtcacatggatcctctggtgcctgaagaaatgagattttattatccctctctattatgcaaatgaatttagttttttgacagc

SEQ ID NO: 34527 - DNA, 679 bp, Homo sapiens
ggacctggatgaaaatctgaaggaggacccctcctcacaacaccaggcaagtcaaataacttggataaaaacatgacgaaagcagagagtgctcggctcttcagaatgtggtatagctttgaccacaagtatctgaaaccaattttaacccactctggtcctccgctgactacaacattacctgaatggtgtggtccgatttccaggctgcttaccagtcctcaagcctatggggaacagctaaaagaggatgatgtggaatgcattgtaaaccaggatgaactagccataaattaccaggagcaagcctcctcaccctgcagtcctcctgcaaggctaggtctggaccagaaagcttcaccccagacgccaggcaaggaaaacatttatgagggagacctcggcctgggaggctatgaactcaagcttgagcaaactttgggtcaatcccagttgaattaattggcatgaagagtacagatgtaatcacaagtaatgcaagactcactgaggaatacaagccaagctgatgaggcagtacaggggagaggctggaaaacatattaagagcataaattggagagaatcaaagccttgtcacatggatcctctggtgcctgaagaaatgagattttattatccctctctattatgcaaatgaatttagttttttgacagc

SEQ ID NO: 34528 - DNA, 1047 bp, Homo sapiens
ggatggcgttcagaggatccccgctattctcggcactcttcacgtcgggtattgggaggaggaacaacccccatgttgacttggcttcagatcagagtgggcgtggacctggatgaaaatctgaaggaggacccctcctcacaacaccaggaagcaaataacttggataaaaacatgacgaaagcagagagtgctcggctcttcagaatgtggtatagctttgaccacaagtatctgaaaccaattttaacccactctggtcctccgctgactacaacattacctgaatggtgtggtccgatttccaggctgcttaccagtcctcaagcctatggggaacagctaaaagaggatgatgtggaatgcattgtaaaccaggatgaactagccataaattaccaggagcaagcctcctcaccctgcagtcctcctgcaaggctaggtctggaccagaaagcttcaccccagacgccaggcaaggaaaacatttatgagggagacctcggcctgggaggctatgaactcaagcttgagcaaactttgggtcaatcccagttgaattaattggcatgaagagtacaaggcgtggctcatggcctgcattccagagaccaacatgatagcttttaattcagctgcatgacctgtgccttttaagccataaagatacctcaagcctagcacctcttgaaatccagatgttcatattagactcgaaaaaataggctccaggcctaggtgcccaggctatgatgagtctgcttttgaaggaggtagggaatgacatcttccttggacccaaagcttaaaagtaatgtatgctttgctgaccactgtttgttaggccttaaacaacattcactgtggtggtatcaggcacactgctatgtgcatcaattatttttttgctttccaaacagaatctctggggcacaagttttacactcaagctaagtataactttgtcatttcaggtaaatatgacaagtggtggagcatgaagttttctaatttgacttaatcctaataaatttttgttacaaagta

SEQ ID NO: 34529 - DNA, 870 bp, Homo sapiens
  misc_feature (9)..(9): n is a, c, g, or t
  misc_feature (14)..(14): n is a, c, g, or t
atctgaagnccgtnaaaattggtttcagatacttgtggtcaaagctataccacgtatctgaaaccaattttaacccactctggtcctccgctgactacaacattacctgaatggtgtggtccgatttccaggctgcttaccagtcctcaagcctatggggaacagctaaaagaggatgatgtggaatgcattgtaaaccaggatgaactagccataaattaccaggagcaagcctcctcaccctgcagtcctcctgcaaggctaggtctggaccagaaagcttcaccccagacgccaggcaaggaaaacatttatgagggagacctcggcctgggaggctatgaactcaagcttgagcaaactttgggtcaatcccagttgaattaattggcatgaagagtacaaggcgtggctcatggcctgcattccagagaccaacatgatagcttttaattcagctgcatgacctgtgccttttaagccataaagatacctcaagcctagcacctcttgaaatccagatgttcatattagactcgaaaaaataggctccaggcctaggtgcccaggctatgatgagtctgcttttgaaggaggtagggaatgacatcttccttggacccaaagcttaaaagtaatgtatgctttgctgaccactgtttgttaggccttaaacaacattcactgtggtggtatcaggcacactgctatgtgcatcaattatttttttgctttccaaacagaatctctggggcacaagttttacactcaagctaagtataactttgtcatttcaggtaaatatgacaagtggtggagcatgaagttttctaatttgacttaatcctaataaatttttgttacaaagta

SEQ ID NO: 34530 - DNA, 945 bp, Homo sapiens
ggacctggatgaaaatctgaaggaggacccctcctcacaacaccaggcaagtcaaataacttggataaaaacatgacgaaagcagagagtgctcggctcttcagaatgtggtatagctttgaccacaagtatctgaaaccaattttaacccactctggtcctccgctgactacaacattacctgaatggtgtggtccgatttccaggctgcttaccagtcctcaagcctatggggaacagctaaaagaggatgatgtggaatgcattgtaaaccaggatgaactagccataaattaccaggagcaagcctcctcaccctgcagtcctcctgcaaggctaggtctggaccagaaagcttcaccccagacgccaggcaaggaaaacatttatgagggagacctcggcctgggaggctatgaactcaagcttgagcaaactttgggtcaatcccagttgaattaattggcatgaagagtacaaggcgtggctcatggcctgcattccagagaccaacatgatagcttttaattcagctgcatgacctgtgccttttaagccataaagatacctcaagcctagcacctcttgaaatccagatgttcatattagactcgaaaaaataggctccaggcctaggtgcccaggctatgatgagtctgcttttgaaggaggtagggaatgacatcttccttggacccaaagcttaaaagtaatgtatgctttgctgaccactgtttgttaggccttaaacaacattcactgtggtggtatcaggcacactgctatgtgcatcaattatttttttgctttccaaacagaatctctggggcacaagttttacactcaagctaagtataactttgtcatttcaggtaaatatgacaagtggtggagcatgaagttttctaatttgacttaatcctaataaatttttgttacaaagta

SEQ ID NO: 34531 - DNA, 671 bp, Homo sapiens
gttcttattttggtataaatctgaggttcttttgattcaagaagacgtaggatagttttctgccaaatcttttctcagattcacattgtgtttgggttaggtcatctgacacacaagactgtctcattccttctgcagcaggggattgaccagtttttggttttgtttaacagagttggcgtggacctggatgaaaatctgaaggaggacccctcctcacaacaccaggcaagtcaaagaaaccaatgcacattatatagagatatgattgttctgttccataggctgttccatgtttgtccagcatgtgaccaaggagctatttctaaacggagcttcctctgctgataaaacaaatgagattacaataaaatacaagggaattcagggtgttgataacttctagcatatgaatgcttagaactagcatgtacttgcaagcctctctatggcagcaggaagtctggaaactttacaaagtatatgatggctcttggaatgaggcacttcatagttcaaatccctacccagcaacttgctagctagccaactcagtgaaatttacacaaagtatgtccaatgcatgttgcacaaacaacaaattgacttatttctcctggatagcttctcatttatcaggtctaaggcccaaaaaactgtctaggtgatcc

SEQ ID NO: 34532 - DNA, 1147 bp, Homo sapiens
acagaaattaggccgggcgcggtggcttatgcctgtaatcccagcactttgggatgccgaggcgggcggatcacgaggtcaggcgatcgagaccattctggctaacacagtgaaaccccgtctctactaaacatacaaaaaattatccgggcgtggtggcacgcgcctgtagtcccagctactcaggaggctgaggtgggaggatcgattgaacccaggaggcagaggttttagggagctgagatcatgccactgcactccagtctgggaggcagaccgtcttaaataagccagccagcccgtgccagatcgacagaatctagaagtgagtactaggcgactatttttagaagtcatcaagtgtttcttttgtgaagccagtgttgctgttcactgacagtgtaatggattcattcattggcactgccctgttggctgtatcaaaaggtgaaaagtgtcaccttgaaattaaggattacaggcatgagccatcacacctggtgtgcctaacccttaaatgttggtgggctcccgagttctcttaccacacatgctccctggactcttcactcctggtttctgttattgctgtatatcccagacctccgcctccagtccttgttcatctcatttggaccattgctcatgctacctattccctgctgtgaaatttcctctcctcaaatccatccactatgccaacttcagagcaactagtcactcatttacaccctttttcccaaaaggagctaaggcagttttcctgggtataaaaataccagatgatataaaatagaaggtaaggaaaaaacaaaaaaacaaaaaccaagggcaatggcctaaaatgcagcctggaagtcttatacttgatccaggtaggccccgaatctacactgtctagcagatggagcacaaagataatttccagcagttctatggggcatggtacgcagatgaagacagcacttgtacaaaaaaaagctagctattccaggactgggaccaggaccagacaaagtcccagtcccttcccatggcccttaaggctctgcagacctgggccctccctcttagcctccaagcctgtcatctgtgtaccatctcccaacatgagctgatgtcttctcacatagacacaggcactgca

SEQ ID NO: 34533 - DNA, 444 bp, Homo sapiens
tttcctttttttaaaatttgagacagcacatatagccagtttcaatgtaccacagattctatcaaggttgccagaggaattttccagcctgcaaacagtggaaggcagcaatgtatgctgggaagagtactggctatggccagataaacctgtgttcagattttagctctgccacctatcatagatttatgatacttccattaagttatttaacctctctgagccagtttttctgcctctgcaaaatggaactaataaatccccccttttagattttcaggatgagatggggttatatgccaagtaaagtgtcagctaaatcacaggtattgagtaattgctcatgagagctcctaacatagatactaagtttgaaggggcatatctagtatataaaacatctatgttgggccgggcgcggtggctcacgcctgtaatcccagc

SEQ ID NO: 34534 - DNA, 295 bp, Homo sapiens
tctcactaagccgcccaggctggtctccaaactcctgcctcaagcaatcctcacaaagggcttggcctcccaaagtgctaggattataggcatgtgccaccatgcctggcctaaaaatggattcttaaaaggaaaacaaatgcccacattaactttttagtgagaataggaaggaaaagcaaatttaatctataaactgctccatatgttacataacaatagaagcattttgcctgtaatcccagcaatttgggaggccgaggcgggaggatcacctgaggtcaggagttcgaga

SEQ ID NO: 34535 - DNA, 490 bp, Homo sapiens
ctctcctatcaatgtttggaaacattattcatgattgcttagctttttatgtgttttctgtttaacatattcaacaagaaggagctgtgctttctgtttttacatcccatagagacctgtacattgatctgtcatatattttatgtcttttaaaatcatctttttttattattgaatagatataaaagtatcttcataggccgggtgcagtgctcatgcctgtaagctcagcattttgggaggccaaggcaggcagatcatttgaacccaggagttcaagaccagctgggcaacatggtaaaaccttgtccatacaaaaaaaaagtttttaaaaattagctgggcatggtggcacttgcctgtatacccaacttctgaggaggctgaggtgggaggatcacttgagcccaacaggttgaggctgcagtaagacatgatcatgccactgcgtcccagcctagactacagagcaagaccctgtttcaaaaaa

SEQ ID NO: 34536 - DNA, 384 bp, Homo sapiens
ttttttttttttgagatggagtctcgctgtcacccaggctggagtgcaatggcacgatctcggctcactgaaacctccacctcccaggttcaagcaattcttctgcctcagcctccggagtagctgggattacaggcgtgcaccaccacaccgggctaatttttgtatttttagtagagatagggtttcaccatcttggccaggctggtcttgaactcctgacctcgtgatccacccgcctcagcctcccaaagtgctgggattacaggcacgagccactgcgcccagccaaaacaggagattcttaagccagtaatgagaaaactttttcaaacaaggtccaattttagagggggcggtggggcagggaggtggctttactga

SEQ ID NO: 34537 - DNA, 473 bp, Homo sapiens
gcaataatgccttctgtaagcatggcgtctctgtaagacttttataatgtctacttaaatgcaagcagacaaaattagttttcactttagattggaagacctttctccattgcaactttttggcctctctttttgttctgctccccaagagcaatgtaaatgttgctctttgttttgctaaaagaggaatgtttatttttacaagtaccatgccacttccatatgatctacatggtatgtgtcatgaatataatttctgtatgattggccaaatttttcacttttaattaagatgaccagacaaaaatttgaattgtaagaaaattatgggccaatttagtgcctgttgaaatgtacactggatattgaaatgttctacagagcataatgaatgaaagtaaaaaggctctatctcttttctgaagcctacttgaaaattttgctttcataacatgacattgaaaaagatacta

SEQ ID NO: 34538 - DNA, 600 bp, Homo sapiens
  misc_feature (599)..(599): n is a, c, g, or t
gaggattccccatcatcattgttgccaagtgaccccaaatattcctatcctgtctgttgtaaaaaggaaaaatcatgtcttggaagaacagcatcgccctacagatacagactaggcactttgcacatgaaacaagagtcccagaaatttctagaagcaaatctcgcattcgtgaccgccagacctacgggatgtgtaaggcacattctcaatctcatcacttgtgagagttgcattgcctagtccagcagccgtgaaggactctctgctgtttttcctctgcttcatttgacacatgagagagaagagatgaagatggaggcgggccctgccccggggacatgtatatctctctgaatgtccttgacagacagcagcagcccagcaatgcccagcccccatcctgtctgtatgcaccctggtgagcattttctacagtctcctaaacgctcccattattctgttttgcaggtgtgatgtgtggcacctcagtgttgtcatagcttctgcctcctccgtgtggagagagggcataaagacagagctgagatattatggctattccagaaaataaaatattttttgaaaccaaaaaaaana

SEQ ID NO: 34539 - DNA, 315 bp, Homo sapiens
  misc_feature (314)..(314): n is a, c, g, or t
gcggccgcctactactactactgctcgaattcaagcttctaacgatgtacggggacatgtatatctctctgaatgtccttgacagacagcagcagcccagcaatgcccagcccccatcctgtctgtatgcaccctggtgagcattttctacagtctcctaaacgctcccattattctgttttgcaggtgtgatgtgtggcacctcagtgttgtcatagcttctgcctcctccgtgtggagagagggcataaagacagagctgagatattatggctattccagaaaataaaatattttttgaaaccaaaaaaaana

SEQ ID NO: 34540 - DNA, 347 bp, Homo sapiens
gcagtatcgaatgctgtaggagtcaagaagagggcattagagagtttagaaggccactggtgggccaggcatgatggctgacgcctgtaatcccagcactttggtgggaggccaaggcgggcagatcacttgaggtcaggagttcgagaccagcctggccagcatggtgaaaccccgtctctactgaaaatacaaaacttagccaggcatgatggcgggcgcctgtaatcccagctacctgggaggctgaggcaggagaatcgcttgaacctgggaggcagaggttgctgtgagcaaggattgtgccactgcactccagcctgggtgacagagtgagactccatctc

SEQ ID NO: 34541 - DNA, 335 bp, Homo sapiens
gaactcctggggtaaagtgatccgcctgcctcagcctcccaaagtgttgggattacagggatgagatacagctactggccaggagacacattcatgctttgaaaggagacatgaatggtccttctccctcacacatttcctttgagtgtatgtgtttgtttctacccagttcatttccacatataatttgaggctaacagagccatctatatagatctgtgatgccagggagcctggggcagaagatgaaggctggaatggggtgagggtgctttaggaaggagagagggagctaagggccacagcactgcttgcagtgtctaaatgaatggccg

SEQ ID NO: 34542 - DNA, 688 bp, Homo sapiens
gtcatcacaactggggcttcagatgccccatccttgcactcccacccggcttttgttgtttactccaggaggcagctcttggaggtcacccaggatgctggcggcagcatggaggaaggggtacaatagagaggggaggcagggctccgggactgggctccgactgaaatcactgaagagcgtgggtttcctcttagtccccaagcccctctgaatatgagtttctccatcctgaaaaccactgggctgctaccaaacatttgttgagtattggaggcctggaatatatagtgaggaaaggaggaagaagggataacagtcatctgcagaggggaaccaaggtgccctgagaacctagagcctccttaggaggcaggaataggcctgggtcctgagccctctccagggctcaagctttgctagcttgcttacgagaactatggtttgtctacacagagtgtatggtagcaatgataacagtgaacacttagcccttacaatatgccttgtactgtattaaaagatttacctatatattaatttatttaacctttacaaaatactatcatccccgttttatagatgagcaaactgaaatacagagaggttaagttaaacaactgagccaagttcacactgcactccaacctggcgctccaacagagcgagactccatctcaaaaaaaaa

SEQ ID NO: 34543 - DNA, 826 bp, Homo sapiens
atcccatttataagaaatattcagaataggtaaatccatagagacaaaaggagttttgtagttgccaggagttggaggcaagaagagtttaacaggtatgcttaatggggcctcctatgcagttgacgaaaatgttttgggctagataggagtgatggttgcataacattgtactaaatgccactgaattctactctttaaaatttttagttttatgttatgtggcgtgtaccctaaaaaaaaaaatagaggtgcagtgctccagcacgggatgaggcagcgtggacaggagcatctcccaacctcagtgaagtctgagccgcgtgcctgcaacaatcccactgtggcagagaaccgcagagttccttccggtttggcagcagtcattcgcaacctcacagccctctggaaccccagcctgggggtctcagaacgccgaggcggggactgggagccgagtcggattccgagactatgggccagggttggctggattcagttacctggctgaggcctggtgagcaaaatatcccaaacctcgcgtgatctggaaggggaagccggataaatacggatctccagatgtgccagtctcgagtctatcgatatgaggtccccctagagtttctattcatcattttaaccgcatttcatcgatcttgagacacggcttttgatattttatcacctcaagataaatagtgttagatgtctaatagcagcgtttttctaagagatacatgaaacaacagtgtcagaaacgatgctgtcttccatgcgatgaaattgttgtaataggtgctcaataaatgttgacaataaaaaa

SEQ ID NO: 34544 - DNA, 2883 bp, Homo sapiens
cccggcgggccggcgcgcggccgcgtttgaatggccctgagtgggactcggcccagaagccgagggactctctaggctgccgggcgctggtcgtcagcgccgaggctgggctgaggcgccgcggtaccatgaggcgccggtacttaagagattatggcatcagaaacccacaatgttaaaaaacggaacttttgtaataagattgaggatcatttcattgatcttcctagaaaaaagatctctaatttcactaataagaacatgaaggaggttaagaaatctccaaaacagttggctgcttacataaatagaacagttggacaaactgtgaaaagcccagataaacttcgtaaagtgatctatcgcagaaagaaagttcatcatccctttccaaatccttgttacagaaaaaaacagtcccctggaagtgggggctgtgacatggcaaataaagaaaatgaactggcttgtgcaggccacctgcctgaaaaattacaccatgatagtcgaacatatttggttaactccagtgattctggttcttcacagacagaaagcccatcatcaaaatatagtgggtttttttctgaggtttctcaggaccatgaaacaatggcccaagttttgttcagcaggaatatgagattgaatgtagctttaactttctggagaaagagaagtataagtgaacttgtagcttatttgttgaggatagaagatcttggcgttgtggtagattgccttcctgtgctcaccaattgtttacaggaagaaaaacaatatatctcacttggctgctgtgttgacttgttgcctctagtaaagtcactacttaaaagcaaatttgaagaatatgttatagttggtttaaactggcttcaagcagtcattaaaaggtggtggtcagaactatcatccaaaacagaaattataaatgatggaaatattcaaattttaaaacaacaattaagtggattatgggaacaggaaaaccatcttactttggttccaggatatactggtaatatagctaaggatgtagatgcttatttattacagttacattgagagatttcatctactaaagagcatttggtttttcaaaacatccctgaactgtataatttacaaaaaaaaaagtctcgtctgagaactgtgaactgtggaagaaatcaaaactattttttcttttaaaaagccacgtaatgaaaccactaatgaaatcccagcaatctgcttcacattgaagtggaaaaatatccaaaaggagcagcttcaatttcattgaggtgaaagtgcactatgaagattgttcacctttgctgcatttgggagttatatggttatttggtaacattaagaactactggattttaatgcaatcctgcataaaaatataatttatactatgtgaaaaaataagacaggacttaccactaggaaccaccaagaccaatcatcattaacttttttaagattgtgttttattaaaaaaaaaaaacacttaaatgtgtgcagctattttcttatgttgaaaagactgaaagtttaaaacatgaaaaaaatcaatattaaacattttttgttcacactgagatactgtgtatgtaaaatgccttaattattaataagccaatgtgttatgataccaatatctgttttaaaaaactaaaaccaaccatgcttctggcatgataaaatcatggaattaaatcaggggtttacattcttgtagagtgttcttgaaacactctctgcaccatttttaaaacttgagaatagttttagtatctctgatattttttgccagaatcatcatgtcatgtatgaatgtgttatccctatctaaggaaaaaggtgaatatgtttttgtatgaatgtttaactggaaatgtccatggacttggctaatttatatttactttttattgtacatagatttctaatatttttcattcctgtatcatttaaacttccttcatttgagtaaattcactaaatatttctattttttgcttttttaaattctgattttatatgaattctaattctttttcactacatatgttttaaagagttacatacagtgatttagaatggtttacagttaatgctgatcttgtattttaaattccaacactttgtgtcactacctcctctaatggttagtatgatatgctagcagactgtatgaggtctttttttaaaataccacttttagtgtcagtgaaccaaattctggaatgtcttaacagctctaaatcttacttgtcttgaaaatgattggggtttaataccactgctggtggttcacacatcatcccatccttaatatgcctgacaggcatctgagcaaaggtttttagtaattgaatttctctgcagtagtccttcaagcacttgaatgtaaacctttagcatttattcgtttaatgactactgatacgaatctcaagcagatttcttgctcttaaaagttatgtttcactgagttctggttttgtgtagctatattttatatagctagatattcctcacagtgaacatgaattgtaataattggttatttccttaagtctttagattataataatttcagattattgcacgtctgtgatttgagaggtgagttatttaagaggccagttttcaggacatgggaatttgaattgtaaacctgttatctctgtgaaacttttaacatgataaaatataacctttctttgtgcttaaaaaaaaaaggaacaaaacacacttggggggcccggccagaaatttttaaacatcttggccccgcccgagaagagaagggctttttcagaaccgctcttgttgctttccaaaaagccggccgtctacaaacacggggggggccaaagcaag

SEQ ID NO: 34545 - DNA, 717 bp, Homo sapiens
gaaaatgttgtggtcttcttactcccagaatggcctttaatattttttttttaaaagcattctggttattatgtctgtcttcatttttatttggcataaaatgtcatcctttacattgtcttccagataatttgtaatttcccttttacttttctcttcaactcagaattaagatttttaaaattctatttatttctaattttagtggattacaatcaccaaatatagcctattaatttctgtttaaaaacttttaaaggatttcatatggttctttttcatttaagaaaataaattctttttacagaacagttggacaaactgtgaaaagcccagataaacttcgtaaagtgatctatcgcagaaagaaagttcatcatccctttccaaatccttgttacagaaaaaaacagtcccctggaagtgggggctgtgacatggcaaataaagaaaatgaactggcttgtgcaggccacctgcctgaaaaattacaccatgatagtcgaacatatttggttaactccagtgattctggttcttcacagacagaaagcccatcatcaaaatatagtgggtttttttctgaggtttctcaggaccatgaaacaatggcccaagttttgttcagcaggaatatgagattgaatgtagctttaactttctggagaaagagaagtataagtgaacgagcctcagataaagcaaagatggattcca

SEQ ID NO: 34546 - DNA, 451 bp, Homo sapiens
cccggcgggccggcgcgcggccgcgtttgaatggccctgagtgggactcggcccagaagccgagggactctctaggctgccgggcgctggtcgtcagcgccgaggctgggctgaggcgccgcggtaccatgaggcgccggtaagtgactgccgagccggtgcgagccccgcgcccgcagctgccctgccctggcagggctactccagccgggcttggccgcgccctgggcccacctgcaggccccgcggcggcctcggctcggccgggctcgcggcagcgctgccgggtcccggggcggggcggcaaggccggggcggagcccctctgccggtccctgcggggagagtcgggcagcgggcgctggggggctccaggggactgggccgggagaggcgtggaccgaacctgttgtcacttatttatcttcgggtggagtcgacagctgcacct

SEQ ID NO: 34547 - DNA, 2826 bp, Homo sapiens
cccggcgggccggcgcgcggccgcgtttgaatggccctgagtgggactcggcccagaagccgagggactctctaggctgccgggcgctggtcgtcagcgccgaggctgggctgaggcgccgcggtaccatgaggcgccggtacttaagagattatggcatcagaaacccacaatgttaaaaaacggaacttttgtaataagattgaggatcatttcattgatcttcctagaaaaaagatctctaatttcactaataagaacatgaaggaggttaagaaatctccaaaacagttggctgcttacataaatagaacagttggacaaactgtgaaaagcccagataaacttcgtaaagtgatctatcgcagaaagaaagttcatcatccctttccaaatccttgttacagaaaaaaacagtcccctggaagtgggggctgtgacatggcaaataaagaaaatgaactggcttgtgcaggccacctgcctgaaaaattacaccatgatagtcgaacatatttggttaactccagtgattctggttcttcacagacagaaagcccatcatcaaaatatagtgggtttttttctgaggtttctcaggaccatgaaacaatggcccaagttttgttcagcaggaatatgagattgaatgtagctttaactttctggagaaagagaagtataagtgaacttgtagcttatttgttgaggatagaagatcttggcgttgtggtagattgccttcctgtgctcaccaattgtttacaggaagaaaaacaatatatctcacttggctgctgtgttgacttgttgcctctagtaaagtcactacttaaaagcaaatttgaagaatatgttatagttggtttaaactggcttcaagcagtcattaaaaggtggtggtcagaactatcatccaaaacagaaattataaatgatggaaatattcaaattttaaaacaacaattaagtggattatgggaacaggaaaaccatcttactttggttccaggatatactggtaatatagctaaggatgtagatgcttatttattacagttacattgagagatttcatctactaaagagcatttggtttttcaaaacatccctgaactgtataatttacaaaaaaaaaagtctcgtctgagaactgtgaactgtggaagaaatcaaaactattttttcttttaaaaagccacgtaatgaaaccactaatgaaatcccagcaatctgcttcacattgaagtggaaaaatatccaaaaggagcagcttcaatttcattgaggtgaaagtgcactatgaagattgttcacctttgctgcatttgggagttatatggttatttggtaacattaagaactactggattttaatgcaatcctgcataaaaatataatttatactatgtgaaaaaataagacaggacttaccactaggaaccaccaagaccaatcatcattaacttttttaagattgtgttttattaaaaaaaaaaaacacttaaatgtgtgcagctattttcttatgttgaaaagactgaaagtttaaaacatgaaaaaaatcaatattaaacattttttgttcacactgagatactgtgtatgtaaaatgccttaattattaataagccaatgtgttatgataccaatatctgttttaaaaaaattcttgtagagtgttcttgaaacactctctgcaccatttttaaaacttgagaatagttttagtatctctgatattttttgccagaatcatcatgtcatgtatgaatgtgttatccctatctaaggaaaaaggtgaatatgtttttgtatgaatgtttaactggaaatgtccatggacttggctaatttatatttactttttattgtacatagatttctaatatttttcattcctgtatcatttaaacttccttcatttgagtaaattcactaaatatttctattttttgcttttttaaattctgattttatatgaattctaattctttttcactacatatgttttaaagagttacatacagtgatttagaatggtttacagttaatgctgatcttgtattttaaattccaacactttgtgtcactacctcctctaatggttagtatgatatgctagcagactgtatgaggtctttttttaaaataccacttttagtgtcagtgaaccaaattctggaatgtcttaacagctctaaatcttacttgtcttgaaaatgattggggtttaataccactgctggtggttcacacatcatcccatccttaatatgcctgacaggcatctgagcaaaggtttttagtaattgaatttctctgcagtagtccttcaagcacttgaatgtaaacctttagcatttattcgtttaatgactactgatacgaatctcaagcagatttcttgctcttaaaagttatgtttcactgagttctggttttgtgtagctatattttatatagctagatattcctcacagtgaacatgaattgtaataattggttatttccttaagtctttagattataataatttcagattattgcacgtctgtgatttgagaggtgagttatttaagaggccagttttcaggacatgggaatttgaattgtaaacctgttatctctgtgaaacttttaacatgataaaatataacctttctttgtgcttaaaaaaaaaaggaacaaaacacacttggggggcccggccagaaatttttaaacatcttggccccgcccgagaagagaagggctttttcagaaccgctcttgttgctttccaaaaagccggccgtctacaaacacggggggggccaaagcaag

SEQ ID NO: 34548 - DNA, 4994 bp, Homo sapiens
cccggcgggccggcgcgcggccgcgtttgaatggccctgagtgggactcggcccagaagccgagggactctctaggctgccgggcgctggtcgtcagcgccgaggctgggctgaggcgccgcggtaccatgaggcgccggtacttaagagattatggcatcagaaacccacaatgttaaaaaacggaacttttgtaataagattgaggatcatttcattgatcttcctagaaaaaagatctctaatttcactaataagaacatgaaggaggttaagaaatctccaaaacagttggctgcttacataaatagaacagttggacaaactgtgaaaagcccagataaacttcgtaaagtgatctatcgcagaaagaaagttcatcatccctttccaaatccttgttacagaaaaaaacagtcccctggaagtgggggctgtgacatggcaaataaagaaaatgaactggcttgtgcaggccacctgcctgaaaaattacaccatgatagtcgaacatatttggttaactccagtgattctggttcttcacagacagaaagcccatcatcaaaatatagtgggtttttttctgaggtttctcaggaccatgaaacaatggcccaagttttgttcagcaggaatatgagattgaatgtagctttaactttctggagaaagagaagtataagtgaacttgtagcttatttgttgaggatagaagatcttggcgttgtggtagattgccttcctgtgctcaccaattgtttacaggaagaaaaacaatatatctcacttggctgctgtgttgacttgttgcctctagtaaagtcactacttaaaagcaaatttgaagaatatgttatagttggtttaaactggcttcaagcagtcattaaaaggtggtggtcagaactatcatccaaaacagaaattataaatgatgggtgagtatacctttaaagataaactcatgctgaaattttcttcaggaaagcagcttgattaaactaggtaataattttatcccattatcatcagtgtatggtatttattctttttatattcagagagatactaacttaagagactgttcatttgtgaaaaccacacctggaaattgaattccagagcctactaacctcctgtatctcttcttctggcacaaccctacccttcattttagaagaaaaacacaatagtggtttaattctcatattcattatgagtaagggaggaaaaagagatgcccacagtgtaataaggaatggaggcaccctgcggggtcctttacctagacattaacctgagagtccggtgttgatgtttacacttctaaaaactgtattattactgccttgatgtgaaaattcgtgggtattctaccagagtatagccagattatcatgaaaccacagaaaaatatctcccaacagtttccttaaagtccataattttgggccaggcacggtggctgatgcctgtctgtaatcccagcactttgggaggccaagaagggcaaatcacttgagctcacaagtttgagacagcctgggcaacatgatgacatcccgtctctacaaaaaatacaaaaattagccaggcatggtggtgtgcgcctgtagtcccagctactcaggctgaggcaggaggatcgcttgagcccaggaggtggaggttgcagtaagccgagatggcaccactgcactccagcctgggcaatagagccagcccttgtctcaaaaaaaaaaaaaaaaaagccacaatttattttgtaggctctcaaaattttctacttcacaccaaggaatgtccaaatgttccaaacgcctggtcattttcttacctgctttgacaactaaataacctttaattttctttttttttttaattgaaatcaagtaagaaattttattaattttggaattgaaaaaacatcctttgttgtttccaagaattaattaaataggaggcatttggcggtattatgtggataaacctttaattttcatgactgacatgtattattctaaaagttatttgacttttttttaatttctctccacgttcccaaatgttttatttcaaatagcatcattttctcctgaaaaatacctgaaaaattttagaacagtttttattatgcatatttatgatgaaagtttgtatcttaatgtatttgctttctcatttttcttccttttttttcttttagaaatattcaaattttaaaacaacaattaagtggattatgggaacaggaaaaccatcttactttggttccaggatatactggtaatatagctaaggtcctctgcgtgtaactgtgaccttggcagcaagcacaggaattggccattgaacatgtttcatgtacagcccctgaaatgctatgctagaggatatttacagagggttttaatcagagaaaagtatttgaaaaaattttgagaatccaataaggacagcatcagaaaacaagacgaggaactcaggaaacactgggattacaggcgtgagccactgcgcctggcctatagaattcttaatgatgaaaatcttatgaacatatcaatctcctagaaagtttttgttgttgttttaggtttttagagcatacatgacgtattaccttgctctaaagggttgttgcattctgtatagaagaactaaaaaatgattgttccttatgactgaaatttgctttcaatcagaattttttttgttgtttttgttttgagactgaatctcgctctcacttcagcctggtgacagagcaagactctgtctcaaaaaaaaaagagaaagaaattgaaagaggctattgtcaagctgggctcaagtgaatatagcactgatagtaaacagcactgatagaatttctgtgaatgttagctatgaaagcagagttgtttgagcataggaaccaacacattcatttagcacttagcaaatatatattgagcacatactatgtgccaggccctgtgctgaacaaatgcagataaaagcactgaacaaggcacgtcttttaccctcaaaaggtcacaaaaggaaactaaggcaaattaagcaacaacaaaaaaaaatggattgtttatgtttgtatttactgtactgtctaatgaaatgtttttgttttatcttctaaggatgtagatgcttatttattacagttacattgagagatttcatctactaaagagcatttggtttttcaaaacatccctgaactgtataatttacaaaaaaaaaagtctcgtctgagaactgtgaactgtggaagaaatcaaaactattttttcttttaaaaagccacgtaatgaaaccactaatgaaatcccagcaatctgcttcacattgaagtggaaaaatatccaaaaggagcagcttcaatttcattgaggtgaaagtgcactatgaagattgttcacctttgctgcatttgggagttatatggttatttggtaacattaagaactactggattttaatgcaatcctgcataaaaatataatttatactatgtgaaaaaataagacaggacttaccactaggaaccaccaagaccaatcatcattaacttttttaagattgtgttttattaaaaaaaaaaaacacttaaatgtgtgcagctattttcttatgttgaaaagactgaaagtttaaaacatgaaaaaaatcaatattaaacattttttgttcacactgagatactgtgtatgtaaaatgccttaattattaataagccaatgtgttatgataccaatatctgttttaaaaaactaaaaccaaccatgcttctggcatgataaaatcatggaattaaatcaggggtttacattcttgtagagtgttcttgaaacactctctgcaccatttttaaaacttgagaatagttttagtatctctgatattttttgccagaatcatcatgtcatgtatgaatgtgttatccctatctaaggaaaaaggtgaatatgtttttgtatgaatgtttaactggaaatgtccatggacttggctaatttatatttactttttattgtacatagatttctaatatttttcattcctgtatcatttaaacttccttcatttgagtaaattcactaaatatttctattttttgcttttttaaattctgattttatatgaattctaattctttttcactacatatgttttaaagagttacatacagtgatttagaatggtttacagttaatgctgatcttgtattttaaattccaacactttgtgtcactacctcctctaatggttagtatgatatgctagcagactgtatgaggtctttttttaaaataccacttttagtgtcagtgaaccaaattctggaatgtcttaacagctctaaatcttacttgtcttgaaaatgattggggtttaataccactgctggtggttcacacatcatcccatccttaatatgcctgacaggcatctgagcaaaggtttttagtaattgaatttctctgcagtagtccttcaagcacttgaatgtaaacctttagcatttattcgtttaatgactactgatacgaatctcaagcagatttcttgctcttaaaagttatgtttcactgagttctggttttgtgtagctatattttatatagctagatattcctcacagtgaacatgaattgtaataattggttatttccttaagtctttagattataataatttcagattattgcacgtctgtgatttgagaggtgagttatttaagaggccagttttcaggacatgggaatttgaattgtaaacctgttatctctgtgaaacttttaacatgataaaatataacctttctttgtgcttaaaaaaaaaaggaacaaaacacacttggggggcccggccagaaatttttaaacatcttggccccgcccgagaagagaagggctttttcagaaccgctcttgttgctttccaaaaagccggccgtctacaaacacggggggggccaaagcaag

SEQ ID NO: 34549 - DNA, 3069 bp, Homo sapiens
cccggcgggccggcgcgcggccgcgtttgaatggccctgagtgggactcggcccagaagccgagggactctctaggctgccgggcgctggtcgtcagcgccgaggctgggctgaggcgccgcggtaccatgaggcgccgctcgccctctgtaggctgcatccactgtccagccagtcccagtgagatgaaccaggtacctcagttggaaatgcagaaatcacccgtcttctgtgttgatcaccctgggagctgcagaccggagctgttcctattataatggccatcttggaatggacttgccatctctacttcttgatgtccttggtacttaagagattatggcatcagaaacccacaatgttaaaaaacggaacttttgtaataagattgaggatcatttcattgatcttcctagaaaaaagatctctaatttcactaataagaacatgaaggaggttaagaaatctccaaaacagttggctgcttacataaatagaacagttggacaaactgtgaaaagcccagataaacttcgtaaagtgatctatcgcagaaagaaagttcatcatccctttccaaatccttgttacagaaaaaaacagtcccctggaagtgggggctgtgacatggcaaataaagaaaatgaactggcttgtgcaggccacctgcctgaaaaattacaccatgatagtcgaacatatttggttaactccagtgattctggttcttcacagacagaaagcccatcatcaaaatatagtgggtttttttctgaggtttctcaggaccatgaaacaatggcccaagttttgttcagcaggaatatgagattgaatgtagctttaactttctggagaaagagaagtataagtgaacttgtagcttatttgttgaggatagaagatcttggcgttgtggtagattgccttcctgtgctcaccaattgtttacaggaagaaaaacaatatatctcacttggctgctgtgttgacttgttgcctctagtaaagtcactacttaaaagcaaatttgaagaatatgttatagttggtttaaactggcttcaagcagtcattaaaaggtggtggtcagaactatcatccaaaacagaaattataaatgatggaaatattcaaattttaaaacaacaattaagtggattatgggaacaggaaaaccatcttactttggttccaggatatactggtaatatagctaaggatgtagatgcttatttattacagttacattgagagatttcatctactaaagagcatttggtttttcaaaacatccctgaactgtataatttacaaaaaaaaaagtctcgtctgagaactgtgaactgtggaagaaatcaaaactattttttcttttaaaaagccacgtaatgaaaccactaatgaaatcccagcaatctgcttcacattgaagtggaaaaatatccaaaaggagcagcttcaatttcattgaggtgaaagtgcactatgaagattgttcacctttgctgcatttgggagttatatggttatttggtaacattaagaactactggattttaatgcaatcctgcataaaaatataatttatactatgtgaaaaaataagacaggacttaccactaggaaccaccaagaccaatcatcattaacttttttaagattgtgttttattaaaaaaaaaaaacacttaaatgtgtgcagctattttcttatgttgaaaagactgaaagtttaaaacatgaaaaaaatcaatattaaacattttttgttcacactgagatactgtgtatgtaaaatgccttaattattaataagccaatgtgttatgataccaatatctgttttaaaaaactaaaaccaaccatgcttctggcatgataaaatcatggaattaaatcaggggtttacattcttgtagagtgttcttgaaacactctctgcaccatttttaaaacttgagaatagttttagtatctctgatattttttgccagaatcatcatgtcatgtatgaatgtgttatccctatctaaggaaaaaggtgaatatgtttttgtatgaatgtttaactggaaatgtccatggacttggctaatttatatttactttttattgtacatagatttctaatatttttcattcctgtatcatttaaacttccttcatttgagtaaattcactaaatatttctattttttgcttttttaaattctgattttatatgaattctaattctttttcactacatatgttttaaagagttacatacagtgatttagaatggtttacagttaatgctgatcttgtattttaaattccaacactttgtgtcactacctcctctaatggttagtatgatatgctagcagactgtatgaggtctttttttaaaataccacttttagtgtcagtgaaccaaattctggaatgtcttaacagctctaaatcttacttgtcttgaaaatgattggggtttaataccactgctggtggttcacacatcatcccatccttaatatgcctgacaggcatctgagcaaaggtttttagtaattgaatttctctgcagtagtccttcaagcacttgaatgtaaacctttagcatttattcgtttaatgactactgatacgaatctcaagcagatttcttgctcttaaaagttatgtttcactgagttctggttttgtgtagctatattttatatagctagatattcctcacagtgaacatgaattgtaataattggttatttccttaagtctttagattataataatttcagattattgcacgtctgtgatttgagaggtgagttatttaagaggccagttttcaggacatgggaatttgaattgtaaacctgttatctctgtgaaacttttaacatgataaaatataacctttctttgtgcttaaaaaaaaaaggaacaaaacacacttggggggcccggccagaaatttttaaacatcttggccccgcccgagaagagaagggctttttcagaaccgctcttgttgctttccaaaaagccggccgtctacaaacacggggggggccaaagcaag

SEQ ID NO: 34550 - DNA, 3304 bp, Homo sapiens
agcactctgtaaaatgggccaatcagcagcacatgggcggggtcaaataagggaataaaagctggccacctagccctagtggcaaccggctcgggtcatcttccacaccgtggaaactttgttctttccgtcttcacaataaatcttgctgttgctcactgtttgggtccgcatcacctttaagagctggaacacttgccacgaaggtcctccggcttcattcttgaattcggccagactacgaacccaccggaaggaagaaactccggacacatcggaaggaacaaactctggaccacgaacccaccagagggaagaaactctggacacaccatttttgagagctgtaacagcgtgaaggtccacgacttcattcttgagtggttataaactgttttcaccttcaagattcttgagagataactacacataccctttgccatagtgggaatgactgtgtagtagtaactggaggagaaagtttctttgtacacaactatgctttgattttcaagaggaggaatgaaattgcctcgtaaaattacagagttaaatacaatgtacttaagagattatggcatcagaaacccacaatgttaaaaaacggaacttttgtaataagattgaggatcatttcattgatcttcctagaaaaaagatctctaatttcactaataagaacatgaaggaggttaagaaatctccaaaacagttggctgcttacataaatagaacagttggacaaactgtgaaaagcccagataaacttcgtaaagtgatctatcgcagaaagaaagttcatcatccctttccaaatccttgttacagaaaaaaacagtcccctggaagtgggggctgtgacatggcaaataaagaaaatgaactggcttgtgcaggccacctgcctgaaaaattacaccatgatagtcgaacatatttggttaactccagtgattctggttcttcacagacagaaagcccatcatcaaaatatagtgggtttttttctgaggtttctcaggaccatgaaacaatggcccaagttttgttcagcaggaatatgagattgaatgtagctttaactttctggagaaagagaagtataagtgaacttgtagcttatttgttgaggatagaagatcttggcgttgtggtagattgccttcctgtgctcaccaattgtttacaggaagaaaaacaatatatctcacttggctgctgtgttgacttgttgcctctagtaaagtcactacttaaaagcaaatttgaagaatatgttatagttggtttaaactggcttcaagcagtcattaaaaggtggtggtcagaactatcatccaaaacagaaattataaatgatggaaatattcaaattttaaaacaacaattaagtggattatgggaacaggaaaaccatcttactttggttccaggatatactggtaatatagctaaggatgtagatgcttatttattacagttacattgagagatttcatctactaaagagcatttggtttttcaaaacatccctgaactgtataatttacaaaaaaaaaagtctcgtctgagaactgtgaactgtggaagaaatcaaaactattttttcttttaaaaagccacgtaatgaaaccactaatgaaatcccagcaatctgcttcacattgaagtggaaaaatatccaaaaggagcagcttcaatttcattgaggtgaaagtgcactatgaagattgttcacctttgctgcatttgggagttatatggttatttggtaacattaagaactactggattttaatgcaatcctgcataaaaatataatttatactatgtgaaaaaataagacaggacttaccactaggaaccaccaagaccaatcatcattaacttttttaagattgtgttttattaaaaaaaaaaaacacttaaatgtgtgcagctattttcttatgttgaaaagactgaaagtttaaaacatgaaaaaaatcaatattaaacattttttgttcacactgagatactgtgtatgtaaaatgccttaattattaataagccaatgtgttatgataccaatatctgttttaaaaaactaaaaccaaccatgcttctggcatgataaaatcatggaattaaatcaggggtttacattcttgtagagtgttcttgaaacactctctgcaccatttttaaaacttgagaatagttttagtatctctgatattttttgccagaatcatcatgtcatgtatgaatgtgttatccctatctaaggaaaaaggtgaatatgtttttgtatgaatgtttaactggaaatgtccatggacttggctaatttatatttactttttattgtacatagatttctaatatttttcattcctgtatcatttaaacttccttcatttgagtaaattcactaaatatttctattttttgcttttttaaattctgattttatatgaattctaattctttttcactacatatgttttaaagagttacatacagtgatttagaatggtttacagttaatgctgatcttgtattttaaattccaacactttgtgtcactacctcctctaatggttagtatgatatgctagcagactgtatgaggtctttttttaaaataccacttttagtgtcagtgaaccaaattctggaatgtcttaacagctctaaatcttacttgtcttgaaaatgattggggtttaataccactgctggtggttcacacatcatcccatccttaatatgcctgacaggcatctgagcaaaggtttttagtaattgaatttctctgcagtagtccttcaagcacttgaatgtaaacctttagcatttattcgtttaatgactactgatacgaatctcaagcagatttcttgctcttaaaagttatgtttcactgagttctggttttgtgtagctatattttatatagctagatattcctcacagtgaacatgaattgtaataattggttatttccttaagtctttagattataataatttcagattattgcacgtctgtgatttgagaggtgagttatttaagaggccagttttcaggacatgggaatttgaattgtaaacctgttatctctgtgaaacttttaacatgataaaatataacctttctttgtgcttaaaaaaaaaaggaacaaaacacacttggggggcccggccagaaatttttaaacatcttggccccgcccgagaagagaagggctttttcagaaccgctcttgttgctttccaaaaagccggccgtctacaaacacggggggggccaaagcaag

SEQ ID NO: 34551 - DNA, 3062 bp, Homo sapiens
cccggcgggccggcgcgcggccgcgtttgaatggccctgagtgggactcggcccagaagccgagggactctctaggctgccgggcgctggtcgtcagcgccgaggctgggctgaggcgccgcggtaccatgaggcgccgtggttataaactgttttcaccttcaagattcttgagagataactacacataccctttgccatagtgggaatgactgtgtagtagtaactggaggagaaagtttctttgtacacaactatgctttgattttcaagaggaggaatgaaattgcctcgtaaaattacagagttaaatacaatgtacttaagagattatggcatcagaaacccacaatgttaaaaaacggaacttttgtaataagattgaggatcatttcattgatcttcctagaaaaaagatctctaatttcactaataagaacatgaaggaggttaagaaatctccaaaacagttggctgcttacataaatagaacagttggacaaactgtgaaaagcccagataaacttcgtaaagtgatctatcgcagaaagaaagttcatcatccctttccaaatccttgttacagaaaaaaacagtcccctggaagtgggggctgtgacatggcaaataaagaaaatgaactggcttgtgcaggccacctgcctgaaaaattacaccatgatagtcgaacatatttggttaactccagtgattctggttcttcacagacagaaagcccatcatcaaaatatagtgggtttttttctgaggtttctcaggaccatgaaacaatggcccaagttttgttcagcaggaatatgagattgaatgtagctttaactttctggagaaagagaagtataagtgaacttgtagcttatttgttgaggatagaagatcttggcgttgtggtagattgccttcctgtgctcaccaattgtttacaggaagaaaaacaatatatctcacttggctgctgtgttgacttgttgcctctagtaaagtcactacttaaaagcaaatttgaagaatatgttatagttggtttaaactggcttcaagcagtcattaaaaggtggtggtcagaactatcatccaaaacagaaattataaatgatggaaatattcaaattttaaaacaacaattaagtggattatgggaacaggaaaaccatcttactttggttccaggatatactggtaatatagctaaggatgtagatgcttatttattacagttacattgagagatttcatctactaaagagcatttggtttttcaaaacatccctgaactgtataatttacaaaaaaaaaagtctcgtctgagaactgtgaactgtggaagaaatcaaaactattttttcttttaaaaagccacgtaatgaaaccactaatgaaatcccagcaatctgcttcacattgaagtggaaaaatatccaaaaggagcagcttcaatttcattgaggtgaaagtgcactatgaagattgttcacctttgctgcatttgggagttatatggttatttggtaacattaagaactactggattttaatgcaatcctgcataaaaatataatttatactatgtgaaaaaataagacaggacttaccactaggaaccaccaagaccaatcatcattaacttttttaagattgtgttttattaaaaaaaaaaaacacttaaatgtgtgcagctattttcttatgttgaaaagactgaaagtttaaaacatgaaaaaaatcaatattaaacattttttgttcacactgagatactgtgtatgtaaaatgccttaattattaataagccaatgtgttatgataccaatatctgttttaaaaaactaaaaccaaccatgcttctggcatgataaaatcatggaattaaatcaggggtttacattcttgtagagtgttcttgaaacactctctgcaccatttttaaaacttgagaatagttttagtatctctgatattttttgccagaatcatcatgtcatgtatgaatgtgttatccctatctaaggaaaaaggtgaatatgtttttgtatgaatgtttaactggaaatgtccatggacttggctaatttatatttactttttattgtacatagatttctaatatttttcattcctgtatcatttaaacttccttcatttgagtaaattcactaaatatttctattttttgcttttttaaattctgattttatatgaattctaattctttttcactacatatgttttaaagagttacatacagtgatttagaatggtttacagttaatgctgatcttgtattttaaattccaacactttgtgtcactacctcctctaatggttagtatgatatgctagcagactgtatgaggtctttttttaaaataccacttttagtgtcagtgaaccaaattctggaatgtcttaacagctctaaatcttacttgtcttgaaaatgattggggtttaataccactgctggtggttcacacatcatcccatccttaatatgcctgacaggcatctgagcaaaggtttttagtaattgaatttctctgcagtagtccttcaagcacttgaatgtaaacctttagcatttattcgtttaatgactactgatacgaatctcaagcagatttcttgctcttaaaagttatgtttcactgagttctggttttgtgtagctatattttatatagctagatattcctcacagtgaacatgaattgtaataattggttatttccttaagtctttagattataataatttcagattattgcacgtctgtgatttgagaggtgagttatttaagaggccagttttcaggacatgggaatttgaattgtaaacctgttatctctgtgaaacttttaacatgataaaatataacctttctttgtgcttaaaaaaaaaaggaacaaaacacacttggggggcccggccagaaatttttaaacatcttggccccgcccgagaagagaagggctttttcagaaccgctcttgttgctttccaaaaagccggccgtctacaaacacggggggggccaaagcaag

SEQ ID NO: 34552 - DNA, 2955 bp, Homo sapiens
cccggcgggccggcgcgcggccgcgtttgaatggccctgagtgggactcggcccagaagccgagggactctctaggctgccgggcgctggtcgtcagcgccgaggctgggctgaggcgccgcggtaccatgaggcgccgaaactatgggatgatggtgagaatttcacagcaggaaagattgggaagtttaaggatctgaacaggagttaggtacttaagagattatggcatcagaaacccacaatgttaaaaaacggaacttttgtaataagattgaggatcatttcattgatcttcctagaaaaaagatctctaatttcactaataagaacatgaaggaggttaagaaatctccaaaacagttggctgcttacataaatagaacagttggacaaactgtgaaaagcccagataaacttcgtaaagtgatctatcgcagaaagaaagttcatcatccctttccaaatccttgttacagaaaaaaacagtcccctggaagtgggggctgtgacatggcaaataaagaaaatgaactggcttgtgcaggccacctgcctgaaaaattacaccatgatagtcgaacatatttggttaactccagtgattctggttcttcacagacagaaagcccatcatcaaaatatagtgggtttttttctgaggtttctcaggaccatgaaacaatggcccaagttttgttcagcaggaatatgagattgaatgtagctttaactttctggagaaagagaagtataagtgaacttgtagcttatttgttgaggatagaagatcttggcgttgtggtagattgccttcctgtgctcaccaattgtttacaggaagaaaaacaatatatctcacttggctgctgtgttgacttgttgcctctagtaaagtcactacttaaaagcaaatttgaagaatatgttatagttggtttaaactggcttcaagcagtcattaaaaggtggtggtcagaactatcatccaaaacagaaattataaatgatggaaatattcaaattttaaaacaacaattaagtggattatgggaacaggaaaaccatcttactttggttccaggatatactggtaatatagctaaggatgtagatgcttatttattacagttacattgagagatttcatctactaaagagcatttggtttttcaaaacatccctgaactgtataatttacaaaaaaaaaagtctcgtctgagaactgtgaactgtggaagaaatcaaaactattttttcttttaaaaagccacgtaatgaaaccactaatgaaatcccagcaatctgcttcacattgaagtggaaaaatatccaaaaggagcagcttcaatttcattgaggtgaaagtgcactatgaagattgttcacctttgctgcatttgggagttatatggttatttggtaacattaagaactactggattttaatgcaatcctgcataaaaatataatttatactatgtgaaaaaataagacaggacttaccactaggaaccaccaagaccaatcatcattaacttttttaagattgtgttttattaaaaaaaaaaaacacttaaatgtgtgcagctattttcttatgttgaaaagactgaaagtttaaaacatgaaaaaaatcaatattaaacattttttgttcacactgagatactgtgtatgtaaaatgccttaattattaataagccaatgtgttatgataccaatatctgttttaaaaaactaaaaccaaccatgcttctggcatgataaaatcatggaattaaatcaggggtttacattcttgtagagtgttcttgaaacactctctgcaccatttttaaaacttgagaatagttttagtatctctgatattttttgccagaatcatcatgtcatgtatgaatgtgttatccctatctaaggaaaaaggtgaatatgtttttgtatgaatgtttaactggaaatgtccatggacttggctaatttatatttactttttattgtacatagatttctaatatttttcattcctgtatcatttaaacttccttcatttgagtaaattcactaaatatttctattttttgcttttttaaattctgattttatatgaattctaattctttttcactacatatgttttaaagagttacatacagtgatttagaatggtttacagttaatgctgatcttgtattttaaattccaacactttgtgtcactacctcctctaatggttagtatgatatgctagcagactgtatgaggtctttttttaaaataccacttttagtgtcagtgaaccaaattctggaatgtcttaacagctctaaatcttacttgtcttgaaaatgattggggtttaataccactgctggtggttcacacatcatcccatccttaatatgcctgacaggcatctgagcaaaggtttttagtaattgaatttctctgcagtagtccttcaagcacttgaatgtaaacctttagcatttattcgtttaatgactactgatacgaatctcaagcagatttcttgctcttaaaagttatgtttcactgagttctggttttgtgtagctatattttatatagctagatattcctcacagtgaacatgaattgtaataattggttatttccttaagtctttagattataataatttcagattattgcacgtctgtgatttgagaggtgagttatttaagaggccagttttcaggacatgggaatttgaattgtaaacctgttatctctgtgaaacttttaacatgataaaatataacctttctttgtgcttaaaaaaaaaaggaacaaaacacacttggggggcccggccagaaatttttaaacatcttggccccgcccgagaagagaagggctttttcagaaccgctcttgttgctttccaaaaagccggccgtctacaaacacggggggggccaaagcaag

SEQ ID NO: 34553 - DNA, 5343 bp, Homo sapiens
cccggcgggccggcgcgcggccgcgtttgaatggccctgagtgggactcggcccagaagccgagggactctctaggctgccgggcgctggtcgtcagcgccgaggctgggctgaggcgccgcggtaccatgaggcgccggtacttaagagattatggcatcagaaacccacaatgttaaaaaacggaacttttgtaataagattgaggatcatttcattgatcttcctagaaaaaagatctctaatttcactaataagaacatgaaggaggttaagaaatctccaaaacagttggctgcttacataaatagaacagttggacaaactgtgaaaagcccagataaacttcgtaaagtgatctatcgcagaaagaaagttcatcatccctttccaaatccttgttacagaaaaaaacagtcccctggaagtgggggctgtgacatggcaaataaagaaaatgaactggcttgtgcaggccacctgcctgaaaaattacaccatgatagtcgaacatatttggttaactccagtgattctggttcttcacagacagaaagcccatcatcaaaatatagtgggtttttttctgaggtttctcaggaccatgaaacaatggcccaagttttgttcagcaggaatatgagattgaatgtagctttaactttctggagaaagagaagtataagtgaacttgtagcttatttgttgaggatagaagatcttggcgttgtggtagattgccttcctgtgctcaccaattgtttacaggaagaaaaacaatatatctcacttggctgctgtgttgacttgttgcctctagtaaagtcactacttaaaagcaaatttgaagagtaagtgctaatctgaatcttgattcatttttctttttcagcatccttgattttgtgctttgtgagtacatagtagattgggctccatgagacatgcaaggtttctgttttcaagaagctaatagtacaattaggaaaagaatatgaaatgactaaaggacaattataaaagcatctctaaacaaattacatgaaatatacttttgtgtaatagatcatgaaggtaacaattttttaaaagggaagggaccaatgtgtgtgtgtgttttttgggagggaaagtatcatcttttataagaagggttcttagatgaaaacacttgaattttgtaacaaaatgtcatttcagatatgttatagttggtttaaactggcttcaagcagtcattaaaaggtggtggtcagaactatcatccaaaacagaaattataaatgatgggtgagtatacctttaaagataaactcatgctgaaattttcttcaggaaagcagcttgattaaactaggtaataattttatcccattatcatcagtgtatggtatttattctttttatattcagagagatactaacttaagagactgttcatttgtgaaaaccacacctggaaattgaattccagagcctactaacctcctgtatctcttcttctggcacaaccctacccttcattttagaagaaaaacacaatagtggtttaattctcatattcattatgagtaagggaggaaaaagagatgcccacagtgtaataaggaatggaggcaccctgcggggtcctttacctagacattaacctgagagtccggtgttgatgtttacacttctaaaaactgtattattactgccttgatgtgaaaattcgtgggtattctaccagagtatagccagattatcatgaaaccacagaaaaatatctcccaacagtttccttaaagtccataattttgggccaggcacggtggctgatgcctgtctgtaatcccagcactttgggaggccaagaagggcaaatcacttgagctcacaagtttgagacagcctgggcaacatgatgacatcccgtctctacaaaaaatacaaaaattagccaggcatggtggtgtgcgcctgtagtcccagctactcaggctgaggcaggaggatcgcttgagcccaggaggtggaggttgcagtaagccgagatggcaccactgcactccagcctgggcaatagagccagcccttgtctcaaaaaaaaaaaaaaaaaagccacaatttattttgtaggctctcaaaattttctacttcacaccaaggaatgtccaaatgttccaaacgcctggtcattttcttacctgctttgacaactaaataacctttaattttctttttttttttaattgaaatcaagtaagaaattttattaattttggaattgaaaaaacatcctttgttgtttccaagaattaattaaataggaggcatttggcggtattatgtggataaacctttaattttcatgactgacatgtattattctaaaagttatttgacttttttttaatttctctccacgttcccaaatgttttatttcaaatagcatcattttctcctgaaaaatacctgaaaaattttagaacagtttttattatgcatatttatgatgaaagtttgtatcttaatgtatttgctttctcatttttcttccttttttttcttttagaaatattcaaattttaaaacaacaattaagtggattatgggaacaggaaaaccatcttactttggttccaggatatactggtaatatagctaaggtcctctgcgtgtaactgtgaccttggcagcaagcacaggaattggccattgaacatgtttcatgtacagcccctgaaatgctatgctagaggatatttacagagggttttaatcagagaaaagtatttgaaaaaattttgagaatccaataaggacagcatcagaaaacaagacgaggaactcaggaaacactgggattacaggcgtgagccactgcgcctggcctatagaattcttaatgatgaaaatcttatgaacatatcaatctcctagaaagtttttgttgttgttttaggtttttagagcatacatgacgtattaccttgctctaaagggttgttgcattctgtatagaagaactaaaaaatgattgttccttatgactgaaatttgctttcaatcagaattttttttgttgtttttgttttgagactgaatctcgctctcacttcagcctggtgacagagcaagactctgtctcaaaaaaaaaagagaaagaaattgaaagaggctattgtcaagctgggctcaagtgaatatagcactgatagtaaacagcactgatagaatttctgtgaatgttagctatgaaagcagagttgtttgagcataggaaccaacacattcatttagcacttagcaaatatatattgagcacatactatgtgccaggccctgtgctgaacaaatgcagataaaagcactgaacaaggcacgtcttttaccctcaaaaggtcacaaaaggaaactaaggcaaattaagcaacaacaaaaaaaaatggattgtttatgtttgtatttactgtactgtctaatgaaatgtttttgttttatcttctaaggatgtagatgcttatttattacagttacattgagagatttcatctactaaagagcatttggtttttcaaaacatccctgaactgtataatttacaaaaaaaaaagtctcgtctgagaactgtgaactgtggaagaaatcaaaactattttttcttttaaaaagccacgtaatgaaaccactaatgaaatcccagcaatctgcttcacattgaagtggaaaaatatccaaaaggagcagcttcaatttcattgaggtgaaagtgcactatgaagattgttcacctttgctgcatttgggagttatatggttatttggtaacattaagaactactggattttaatgcaatcctgcataaaaatataatttatactatgtgaaaaaataagacaggacttaccactaggaaccaccaagaccaatcatcattaacttttttaagattgtgttttattaaaaaaaaaaaacacttaaatgtgtgcagctattttcttatgttgaaaagactgaaagtttaaaacatgaaaaaaatcaatattaaacattttttgttcacactgagatactgtgtatgtaaaatgccttaattattaataagccaatgtgttatgataccaatatctgttttaaaaaactaaaaccaaccatgcttctggcatgataaaatcatggaattaaatcaggggtttacattcttgtagagtgttcttgaaacactctctgcaccatttttaaaacttgagaatagttttagtatctctgatattttttgccagaatcatcatgtcatgtatgaatgtgttatccctatctaaggaaaaaggtgaatatgtttttgtatgaatgtttaactggaaatgtccatggacttggctaatttatatttactttttattgtacatagatttctaatatttttcattcctgtatcatttaaacttccttcatttgagtaaattcactaaatatttctattttttgcttttttaaattctgattttatatgaattctaattctttttcactacatatgttttaaagagttacatacagtgatttagaatggtttacagttaatgctgatcttgtattttaaattccaacactttgtgtcactacctcctctaatggttagtatgatatgctagcagactgtatgaggtctttttttaaaataccacttttagtgtcagtgaaccaaattctggaatgtcttaacagctctaaatcttacttgtcttgaaaatgattggggtttaataccactgctggtggttcacacatcatcccatccttaatatgcctgacaggcatctgagcaaaggtttttagtaattgaatttctctgcagtagtccttcaagcacttgaatgtaaacctttagcatttattcgtttaatgactactgatacgaatctcaagcagatttcttgctcttaaaagttatgtttcactgagttctggttttgtgtagctatattttatatagctagatattcctcacagtgaacatgaattgtaataattggttatttccttaagtctttagattataataatttcagattattgcacgtctgtgatttgagaggtgagttatttaagaggccagttttcaggacatgggaatttgaattgtaaacctgttatctctgtgaaacttttaacatgataaaatataacctttctttgtgcttaaaaaaaaaaggaacaaaacacacttggggggcccggccagaaatttttaaacatcttggccccgcccgagaagagaagggctttttcagaaccgctcttgttgctttccaaaaagccggccgtctacaaacacggggggggccaaagcaag

SEQ ID NO: 34554 - DNA, 4151 bp, Homo sapiens
cccggcgggccggcgcgcggccgcgtttgaatggccctgagtgggactcggcccagaagccgagggactctctaggctgccgggcgctggtcgtcagcgccgaggctgggctgaggcgccgcggtaccatgaggcgccggtacttaagagattatggcatcagaaacccacaatgttaaaaaacggaacttttgtaataagattgaggatcatttcattgatcttcctagaaaaaagatctctaatttcactaataagaacatgaaggaggttaagaaatctccaaaacagttggctgcttacataaatagaacagttggacaaactgtgaaaagcccagataaacttcgtaaagtgatctatcgcagaaagaaagttcatcatccctttccaaatccttgttacagaaaaaaacagtcccctggaagtgggggctgtgacatggcaaataaagaaaatgaactggcttgtgcaggccacctgcctgaaaaattacaccatgatagtcgaacatatttggttaactccagtgattctggttcttcacagacagaaagcccatcatcaaaatatagtgggtttttttctgaggtttctcaggaccatgaaacaatggcccaagttttgttcagcaggaatatgagattgaatgtagctttaactttctggagaaagagaagtataagtgaacttgtagcttatttgttgaggatagaagatcttggcgttgtggtagattgccttcctgtgctcaccaattgtttacaggaagaaaaacaatatatctcacttggctgctgtgttgacttgttgcctctagtaaagtcactacttaaaagcaaatttgaagaatatgttatagttggtttaaactggcttcaagcagtcattaaaaggtggtggtcagaactatcatccaaaacagaaattataaatgatgggtgagtatacctttaaagataaactcatgctgaaattttcttcaggaaagcagcttgattaaactaggtaataattttatcccattatcatcagtgtatggtatttattctttttatattcagagagatactaacttaagagactgttcatttgtgaaaaccacacctggaaattgaattccagagcctactaacctcctgtatctcttcttctggcacaaccctacccttcattttagaagaaaaacacaatagtggtttaattctcatattcattatgagtaagggaggaaaaagagatgcccacagtgtaataaggaatggaggcaccctgcggggtcctttacctagacattaacctgagagtccggtgttgatgtttacacttctaaaaactgtattattactgccttgatgtgaaaattcgtgggtattctaccagagtatagccagattatcatgaaaccacagaaaaatatctcccaacagtttccttaaagtccataattttgggccaggcacggtggctgatgcctgtctgtaatcccagcactttgggaggccaagaagggcaaatcacttgagctcacaagtttgagacagcctgggcaacatgatgacatcccgtctctacaaaaaatacaaaaattagccaggcatggtggtgtgcgcctgtagtcccagctactcaggctgaggcaggaggatcgcttgagcccaggaggtggaggttgcagtaagccgagatggcaccactgcactccagcctgggcaatagagccagcccttgtctcaaaaaaaaaaaaaaaaaagccacaatttattttgtaggctctcaaaattttctacttcacaccaaggaatgtccaaatgttccaaacgcctggtcattttcttacctgctttgacaactaaataacctttaattttctttttttttttaattgaaatcaagtaagaaattttattaattttggaattgaaaaaacatcctttgttgtttccaagaattaattaaataggaggcatttggcggtattatgtggataaacctttaattttcatgactgacatgtattattctaaaagttatttgacttttttttaatttctctccacgttcccaaatgttttatttcaaatagcatcattttctcctgaaaaatacctgaaaaattttagaacagtttttattatgcatatttatgatgaaagtttgtatcttaatgtatttgctttctcatttttcttccttttttttcttttagaaatattcaaattttaaaacaacaattaagtggattatgggaacaggaaaaccatcttactttggttccaggatatactggtaatatagctaaggatgtagatgcttatttattacagttacattgagagatttcatctactaaagagcatttggtttttcaaaacatccctgaactgtataatttacaaaaaaaaaagtctcgtctgagaactgtgaactgtggaagaaatcaaaactattttttcttttaaaaagccacgtaatgaaaccactaatgaaatcccagcaatctgcttcacattgaagtggaaaaatatccaaaaggagcagcttcaatttcattgaggtgaaagtgcactatgaagattgttcacctttgctgcatttgggagttatatggttatttggtaacattaagaactactggattttaatgcaatcctgcataaaaatataatttatactatgtgaaaaaataagacaggacttaccactaggaaccaccaagaccaatcatcattaacttttttaagattgtgttttattaaaaaaaaaaaacacttaaatgtgtgcagctattttcttatgttgaaaagactgaaagtttaaaacatgaaaaaaatcaatattaaacattttttgttcacactgagatactgtgtatgtaaaatgccttaattattaataagccaatgtgttatgataccaatatctgttttaaaaaactaaaaccaaccatgcttctggcatgataaaatcatggaattaaatcaggggtttacattcttgtagagtgttcttgaaacactctctgcaccatttttaaaacttgagaatagttttagtatctctgatattttttgccagaatcatcatgtcatgtatgaatgtgttatccctatctaaggaaaaaggtgaatatgtttttgtatgaatgtttaactggaaatgtccatggacttggctaatttatatttactttttattgtacatagatttctaatatttttcattcctgtatcatttaaacttccttcatttgagtaaattcactaaatatttctattttttgcttttttaaattctgattttatatgaattctaattctttttcactacatatgttttaaagagttacatacagtgatttagaatggtttacagttaatgctgatcttgtattttaaattccaacactttgtgtcactacctcctctaatggttagtatgatatgctagcagactgtatgaggtctttttttaaaataccacttttagtgtcagtgaaccaaattctggaatgtcttaacagctctaaatcttacttgtcttgaaaatgattggggtttaataccactgctggtggttcacacatcatcccatccttaatatgcctgacaggcatctgagcaaaggtttttagtaattgaatttctctgcagtagtccttcaagcacttgaatgtaaacctttagcatttattcgtttaatgactactgatacgaatctcaagcagatttcttgctcttaaaagttatgtttcactgagttctggttttgtgtagctatattttatatagctagatattcctcacagtgaacatgaattgtaataattggttatttccttaagtctttagattataataatttcagattattgcacgtctgtgatttgagaggtgagttatttaagaggccagttttcaggacatgggaatttgaattgtaaacctgttatctctgtgaaacttttaacatgataaaatataacctttctttgtgcttaaaaaaaaaaggaacaaaacacacttggggggcccggccagaaatttttaaacatcttggccccgcccgagaagagaagggctttttcagaaccgctcttgttgctttccaaaaagccggccgtctacaaacacggggggggccaaagcaag

SEQ ID NO: 34555 - DNA, 4819 bp, Homo sapiens
gaatgaatttctcaaaagcggtgtgaataatcataatatgaaagtaaataaggaaatcagctctctaaggcaatgctattctttttatactctcaggatagaagatcttggcgttgtggtagattgccttcctgtgctcaccaattggtaaaaacaatatttttcagaaaaaaaataagattaaaggaggtcaaattatggcccatccatatttttataacttggtatttattttagtttacaggaagaaaaacaatatatctcacttggctgctgtgttgacttgttgcctctagtaaagtcactacttaaaagcaaatttgaagagtaagtgctaatctgaatcttgattcatttttctttttcagcatccttgattttgtgctttgtgagtacatagtagattgggctccatgagacatgcaaggtttctgttttcaagaagctaatagtacaattaggaaaagaatatgaaatgactaaaggacaattataaaagcatctctaaacaaattacatgaaatatacttttgtgtaatagatcatgaaggtaacaattttttaaaagggaagggaccaatgtgtgtgtgtgttttttgggagggaaagtatcatcttttataagaagggttcttagatgaaaacacttgaattttgtaacaaaatgtcatttcagatatgttatagttggtttaaactggcttcaagcagtcattaaaaggtggtggtcagaactatcatccaaaacagaaattataaatgatgggtgagtatacctttaaagataaactcatgctgaaattttcttcaggaaagcagcttgattaaactaggtaataattttatcccattatcatcagtgtatggtatttattctttttatattcagagagatactaacttaagagactgttcatttgtgaaaaccacacctggaaattgaattccagagcctactaacctcctgtatctcttcttctggcacaaccctacccttcattttagaagaaaaacacaatagtggtttaattctcatattcattatgagtaagggaggaaaaagagatgcccacagtgtaataaggaatggaggcaccctgcggggtcctttacctagacattaacctgagagtccggtgttgatgtttacacttctaaaaactgtattattactgccttgatgtgaaaattcgtgggtattctaccagagtatagccagattatcatgaaaccacagaaaaatatctcccaacagtttccttaaagtccataattttgggccaggcacggtggctgatgcctgtctgtaatcccagcactttgggaggccaagaagggcaaatcacttgagctcacaagtttgagacagcctgggcaacatgatgacatcccgtctctacaaaaaatacaaaaattagccaggcatggtggtgtgcgcctgtagtcccagctactcaggctgaggcaggaggatcgcttgagcccaggaggtggaggttgcagtaagccgagatggcaccactgcactccagcctgggcaatagagccagcccttgtctcaaaaaaaaaaaaaaaaaagccacaatttattttgtaggctctcaaaattttctacttcacaccaaggaatgtccaaatgttccaaacgcctggtcattttcttacctgctttgacaactaaataacctttaattttctttttttttttaattgaaatcaagtaagaaattttattaattttggaattgaaaaaacatcctttgttgtttccaagaattaattaaataggaggcatttggcggtattatgtggataaacctttaattttcatgactgacatgtattattctaaaagttatttgacttttttttaatttctctccacgttcccaaatgttttatttcaaatagcatcattttctcctgaaaaatacctgaaaaattttagaacagtttttattatgcatatttatgatgaaagtttgtatcttaatgtatttgctttctcatttttcttccttttttttcttttagaaatattcaaattttaaaacaacaattaagtggattatgggaacaggaaaaccatcttactttggttccaggatatactggtaatatagctaaggtcctctgcgtgtaactgtgaccttggcagcaagcacaggaattggccattgaacatgtttcatgtacagcccctgaaatgctatgctagaggatatttacagagggttttaatcagagaaaagtatttgaaaaaattttgagaatccaataaggacagcatcagaaaacaagacgaggaactcaggaaacactgggattacaggcgtgagccactgcgcctggcctatagaattcttaatgatgaaaatcttatgaacatatcaatctcctagaaagtttttgttgttgttttaggtttttagagcatacatgacgtattaccttgctctaaagggttgttgcattctgtatagaagaactaaaaaatgattgttccttatgactgaaatttgctttcaatcagaattttttttgttgtttttgttttgagactgaatctcgctctcacttcagcctggtgacagagcaagactctgtctcaaaaaaaaaagagaaagaaattgaaagaggctattgtcaagctgggctcaagtgaatatagcactgatagtaaacagcactgatagaatttctgtgaatgttagctatgaaagcagagttgtttgagcataggaaccaacacattcatttagcacttagcaaatatatattgagcacatactatgtgccaggccctgtgctgaacaaatgcagataaaagcactgaacaaggcacgtcttttaccctcaaaaggtcacaaaaggaaactaaggcaaattaagcaacaacaaaaaaaaatggattgtttatgtttgtatttactgtactgtctaatgaaatgtttttgttttatcttctaaggatgtagatgcttatttattacagttacattgagagatttcatctactaaagagcatttggtttttcaaaacatccctgaactgtataatttacaaaaaaaaaagtctcgtctgagaactgtgaactgtggaagaaatcaaaactattttttcttttaaaaagccacgtaatgaaaccactaatgaaatcccagcaatctgcttcacattgaagtggaaaaatatccaaaaggagcagcttcaatttcattgaggtgaaagtgcactatgaagattgttcacctttgctgcatttgggagttatatggttatttggtaacattaagaactactggattttaatgcaatcctgcataaaaatataatttatactatgtgaaaaaataagacaggacttaccactaggaaccaccaagaccaatcatcattaacttttttaagattgtgttttattaaaaaaaaaaaacacttaaatgtgtgcagctattttcttatgttgaaaagactgaaagtttaaaacatgaaaaaaatcaatattaaacattttttgttcacactgagatactgtgtatgtaaaatgccttaattattaataagccaatgtgttatgataccaatatctgttttaaaaaactaaaaccaaccatgcttctggcatgataaaatcatggaattaaatcaggggtttacattcttgtagagtgttcttgaaacactctctgcaccatttttaaaacttgagaatagttttagtatctctgatattttttgccagaatcatcatgtcatgtatgaatgtgttatccctatctaaggaaaaaggtgaatatgtttttgtatgaatgtttaactggaaatgtccatggacttggctaatttatatttactttttattgtacatagatttctaatatttttcattcctgtatcatttaaacttccttcatttgagtaaattcactaaatatttctattttttgcttttttaaattctgattttatatgaattctaattctttttcactacatatgttttaaagagttacatacagtgatttagaatggtttacagttaatgctgatcttgtattttaaattccaacactttgtgtcactacctcctctaatggttagtatgatatgctagcagactgtatgaggtctttttttaaaataccacttttagtgtcagtgaaccaaattctggaatgtcttaacagctctaaatcttacttgtcttgaaaatgattggggtttaataccactgctggtggttcacacatcatcccatccttaatatgcctgacaggcatctgagcaaaggtttttagtaattgaatttctctgcagtagtccttcaagcacttgaatgtaaacctttagcatttattcgtttaatgactactgatacgaatctcaagcagatttcttgctcttaaaagttatgtttcactgagttctggttttgtgtagctatattttatatagctagatattcctcacagtgaacatgaattgtaataattggttatttccttaagtctttagattataataatttcagattattgcacgtctgtgatttgagaggtgagttatttaagaggccagttttcaggacatgggaatttgaattgtaaacctgttatctctgtgaaacttttaacatgataaaatataacctttctttgtgcttaaaaaaaaaaggaacaaaacacacttggggggcccggccagaaatttttaaacatcttggccccgcccgagaagagaagggctttttcagaaccgctcttgttgctttccaaaaagccggccgtctacaaacacggggggggccaaagcaag

SEQ ID NO: 34556 - DNA, 5289 bp, Homo sapiens
cccggcgggccggcgcgcggccgcgtttgaatggccctgagtgggactcggcccagaagccgagggactctctaggctgccgggcgctggtcgtcagcgccgaggctgggctgaggcgccgcggtaccatgaggcgccggtacttaagagattatggcatcagaaacccacaatgttaaaaaacggaacttttgtaataagattgaggatcatttcattgatcttcctagaaaaaagatctctaatttcactaataagaacatgaaggaggttaagaaatctccaaaacagttggctgcttacataaatagaacagttggacaaactgtgaaaagcccagataaacttcgtaaagtgatctatcgcagaaagaaagttcatcatccctttccaaatccttgttacagaaaaaaacagtcccctggaagtgggggctgtgacatggcaaataaagaaaatgaactggcttgtgcaggccacctgcctgaaaaattacaccatgatagtcgaacatatttggttaactccagtgattctggttcttcacagacagaaagcccatcatcaattttgttcagcaggaatatgagattgaatgtagctttaactttctggagaaagagaagtataagtgaacttgtagcttatttgttgaggatagaagatcttggcgttgtggtagattgccttcctgtgctcaccaattgtttacaggaagaaaaacaatatatctcacttggctgctgtgttgacttgttgcctctagtaaagtcactacttaaaagcaaatttgaagagtaagtgctaatctgaatcttgattcatttttctttttcagcatccttgattttgtgctttgtgagtacatagtagattgggctccatgagacatgcaaggtttctgttttcaagaagctaatagtacaattaggaaaagaatatgaaatgactaaaggacaattataaaagcatctctaaacaaattacatgaaatatacttttgtgtaatagatcatgaaggtaacaattttttaaaagggaagggaccaatgtgtgtgtgtgttttttgggagggaaagtatcatcttttataagaagggttcttagatgaaaacacttgaattttgtaacaaaatgtcatttcagatatgttatagttggtttaaactggcttcaagcagtcattaaaaggtggtggtcagaactatcatccaaaacagaaattataaatgatgggtgagtatacctttaaagataaactcatgctgaaattttcttcaggaaagcagcttgattaaactaggtaataattttatcccattatcatcagtgtatggtatttattctttttatattcagagagatactaacttaagagactgttcatttgtgaaaaccacacctggaaattgaattccagagcctactaacctcctgtatctcttcttctggcacaaccctacccttcattttagaagaaaaacacaatagtggtttaattctcatattcattatgagtaagggaggaaaaagagatgcccacagtgtaataaggaatggaggcaccctgcggggtcctttacctagacattaacctgagagtccggtgttgatgtttacacttctaaaaactgtattattactgccttgatgtgaaaattcgtgggtattctaccagagtatagccagattatcatgaaaccacagaaaaatatctcccaacagtttccttaaagtccataattttgggccaggcacggtggctgatgcctgtctgtaatcccagcactttgggaggccaagaagggcaaatcacttgagctcacaagtttgagacagcctgggcaacatgatgacatcccgtctctacaaaaaatacaaaaattagccaggcatggtggtgtgcgcctgtagtcccagctactcaggctgaggcaggaggatcgcttgagcccaggaggtggaggttgcagtaagccgagatggcaccactgcactccagcctgggcaatagagccagcccttgtctcaaaaaaaaaaaaaaaaaagccacaatttattttgtaggctctcaaaattttctacttcacaccaaggaatgtccaaatgttccaaacgcctggtcattttcttacctgctttgacaactaaataacctttaattttctttttttttttaattgaaatcaagtaagaaattttattaattttggaattgaaaaaacatcctttgttgtttccaagaattaattaaataggaggcatttggcggtattatgtggataaacctttaattttcatgactgacatgtattattctaaaagttatttgacttttttttaatttctctccacgttcccaaatgttttatttcaaatagcatcattttctcctgaaaaatacctgaaaaattttagaacagtttttattatgcatatttatgatgaaagtttgtatcttaatgtatttgctttctcatttttcttccttttttttcttttagaaatattcaaattttaaaacaacaattaagtggattatgggaacaggaaaaccatcttactttggttccaggatatactggtaatatagctaaggtcctctgcgtgtaactgtgaccttggcagcaagcacaggaattggccattgaacatgtttcatgtacagcccctgaaatgctatgctagaggatatttacagagggttttaatcagagaaaagtatttgaaaaaattttgagaatccaataaggacagcatcagaaaacaagacgaggaactcaggaaacactgggattacaggcgtgagccactgcgcctggcctatagaattcttaatgatgaaaatcttatgaacatatcaatctcctagaaagtttttgttgttgttttaggtttttagagcatacatgacgtattaccttgctctaaagggttgttgcattctgtatagaagaactaaaaaatgattgttccttatgactgaaatttgctttcaatcagaattttttttgttgtttttgttttgagactgaatctcgctctcacttcagcctggtgacagagcaagactctgtctcaaaaaaaaaagagaaagaaattgaaagaggctattgtcaagctgggctcaagtgaatatagcactgatagtaaacagcactgatagaatttctgtgaatgttagctatgaaagcagagttgtttgagcataggaaccaacacattcatttagcacttagcaaatatatattgagcacatactatgtgccaggccctgtgctgaacaaatgcagataaaagcactgaacaaggcacgtcttttaccctcaaaaggtcacaaaaggaaactaaggcaaattaagcaacaacaaaaaaaaatggattgtttatgtttgtatttactgtactgtctaatgaaatgtttttgttttatcttctaaggatgtagatgcttatttattacagttacattgagagatttcatctactaaagagcatttggtttttcaaaacatccctgaactgtataatttacaaaaaaaaaagtctcgtctgagaactgtgaactgtggaagaaatcaaaactattttttcttttaaaaagccacgtaatgaaaccactaatgaaatcccagcaatctgcttcacattgaagtggaaaaatatccaaaaggagcagcttcaatttcattgaggtgaaagtgcactatgaagattgttcacctttgctgcatttgggagttatatggttatttggtaacattaagaactactggattttaatgcaatcctgcataaaaatataatttatactatgtgaaaaaataagacaggacttaccactaggaaccaccaagaccaatcatcattaacttttttaagattgtgttttattaaaaaaaaaaaacacttaaatgtgtgcagctattttcttatgttgaaaagactgaaagtttaaaacatgaaaaaaatcaatattaaacattttttgttcacactgagatactgtgtatgtaaaatgccttaattattaataagccaatgtgttatgataccaatatctgttttaaaaaactaaaaccaaccatgcttctggcatgataaaatcatggaattaaatcaggggtttacattcttgtagagtgttcttgaaacactctctgcaccatttttaaaacttgagaatagttttagtatctctgatattttttgccagaatcatcatgtcatgtatgaatgtgttatccctatctaaggaaaaaggtgaatatgtttttgtatgaatgtttaactggaaatgtccatggacttggctaatttatatttactttttattgtacatagatttctaatatttttcattcctgtatcatttaaacttccttcatttgagtaaattcactaaatatttctattttttgcttttttaaattctgattttatatgaattctaattctttttcactacatatgttttaaagagttacatacagtgatttagaatggtttacagttaatgctgatcttgtattttaaattccaacactttgtgtcactacctcctctaatggttagtatgatatgctagcagactgtatgaggtctttttttaaaataccacttttagtgtcagtgaaccaaattctggaatgtcttaacagctctaaatcttacttgtcttgaaaatgattggggtttaataccactgctggtggttcacacatcatcccatccttaatatgcctgacaggcatctgagcaaaggtttttagtaattgaatttctctgcagtagtccttcaagcacttgaatgtaaacctttagcatttattcgtttaatgactactgatacgaatctcaagcagatttcttgctcttaaaagttatgtttcactgagttctggttttgtgtagctatattttatatagctagatattcctcacagtgaacatgaattgtaataattggttatttccttaagtctttagattataataatttcagattattgcacgtctgtgatttgagaggtgagttatttaagaggccagttttcaggacatgggaatttgaattgtaaacctgttatctctgtgaaacttttaacatgataaaatataacctttctttgtgcttaaaaaaaaaaggaacaaaacacacttggggggcccggccagaaatttttaaacatcttggccccgcccgagaagagaagggctttttcagaaccgctcttgttgctttccaaaaagccggccgtctacaaacacggggggggccaaagcaag

SEQ ID NO: 34557 - DNA, 2762 bp, Homo sapiens
gtatgctcttgcgaccactccaggcacgattggcacccttctgcagaagtaaattgccttgctgagaaagctttttgccggagtgctgattcttctttgcggcaccaagcatttgtttctaacatcaactatctactttcatttttcaggttaagaaatctccaaaacagttggctgcttacataaatagaacagttggacaaactgtgaaaagcccagataaacttcgtaaagtgatctatcgcagaaagaaagttcatcatccctttccaaatccttgttacagaaaaaaacagtcccctggaagtgggggctgtgacatggcaaataaagaaaatgaactggcttgtgcaggccacctgcctgaaaaattacaccatgatagtcgaacatatttggttaactccagtgattctggttcttcacagacagaaagcccatcatcaaaatatagtgggtttttttctgaggtttctcaggaccatgaaacaatggcccaagttttgttcagcaggaatatgagattgaatgtagctttaactttctggagaaagagaagtataagtgaacttgtagcttatttgttgaggatagaagatcttggcgttgtggtagattgccttcctgtgctcaccaattgtttacaggaagaaaaacaatatatctcacttggctgctgtgttgacttgttgcctctagtaaagtcactacttaaaagcaaatttgaagaatatgttatagttggtttaaactggcttcaagcagtcattaaaaggtggtggtcagaactatcatccaaaacagaaattataaatgatggaaatattcaaattttaaaacaacaattaagtggattatgggaacaggaaaaccatcttactttggttccaggatatactggtaatatagctaaggatgtagatgcttatttattacagttacattgagagatttcatctactaaagagcatttggtttttcaaaacatccctgaactgtataatttacaaaaaaaaaagtctcgtctgagaactgtgaactgtggaagaaatcaaaactattttttcttttaaaaagccacgtaatgaaaccactaatgaaatcccagcaatctgcttcacattgaagtggaaaaatatccaaaaggagcagcttcaatttcattgaggtgaaagtgcactatgaagattgttcacctttgctgcatttgggagttatatggttatttggtaacattaagaactactggattttaatgcaatcctgcataaaaatataatttatactatgtgaaaaaataagacaggacttaccactaggaaccaccaagaccaatcatcattaacttttttaagattgtgttttattaaaaaaaaaaaacacttaaatgtgtgcagctattttcttatgttgaaaagactgaaagtttaaaacatgaaaaaaatcaatattaaacattttttgttcacactgagatactgtgtatgtaaaatgccttaattattaataagccaatgtgttatgataccaatatctgttttaaaaaactaaaaccaaccatgcttctggcatgataaaatcatggaattaaatcaggggtttacattcttgtagagtgttcttgaaacactctctgcaccatttttaaaacttgagaatagttttagtatctctgatattttttgccagaatcatcatgtcatgtatgaatgtgttatccctatctaaggaaaaaggtgaatatgtttttgtatgaatgtttaactggaaatgtccatggacttggctaatttatatttactttttattgtacatagatttctaatatttttcattcctgtatcatttaaacttccttcatttgagtaaattcactaaatatttctattttttgcttttttaaattctgattttatatgaattctaattctttttcactacatatgttttaaagagttacatacagtgatttagaatggtttacagttaatgctgatcttgtattttaaattccaacactttgtgtcactacctcctctaatggttagtatgatatgctagcagactgtatgaggtctttttttaaaataccacttttagtgtcagtgaaccaaattctggaatgtcttaacagctctaaatcttacttgtcttgaaaatgattggggtttaataccactgctggtggttcacacatcatcccatccttaatatgcctgacaggcatctgagcaaaggtttttagtaattgaatttctctgcagtagtccttcaagcacttgaatgtaaacctttagcatttattcgtttaatgactactgatacgaatctcaagcagatttcttgctcttaaaagttatgtttcactgagttctggttttgtgtagctatattttatatagctagatattcctcacagtgaacatgaattgtaataattggttatttccttaagtctttagattataataatttcagattattgcacgtctgtgatttgagaggtgagttatttaagaggccagttttcaggacatgggaatttgaattgtaaacctgttatctctgtgaaacttttaacatgataaaatataacctttctttgtgcttaaaaaaaaaaggaacaaaacacacttggggggcccggccagaaatttttaaacatcttggccccgcccgagaagagaagggctttttcagaaccgctcttgttgctttccaaaaagccggccgtctacaaacacggggggggccaaagcaag

SEQ ID NO: 34558 - DNA, 2879 bp, Homo sapiens
gaaaatgttgtggtcttcttactcccagaatggcctttaatattttttttttaaaagcattctggttattatgtctgtcttcatttttatttggcataaaatgtcatcctttacattgtcttccagataatttgtaatttcccttttacttttctcttcaactcagaattaagatttttaaaattctatttatttctaattttagtggattacaatcaccaaatatagcctattaatttctgtttaaaaacttttaaaggatttcatatggttctttttcatttaagaaaataaattctttttacagaacagttggacaaactgtgaaaagcccagataaacttcgtaaagtgatctatcgcagaaagaaagttcatcatccctttccaaatccttgttacagaaaaaaacagtcccctggaagtgggggctgtgacatggcaaataaagaaaatgaactggcttgtgcaggccacctgcctgaaaaattacaccatgatagtcgaacatatttggttaactccagtgattctggttcttcacagacagaaagcccatcatcaaaatatagtgggtttttttctgaggtttctcaggaccatgaaacaatggcccaagttttgttcagcaggaatatgagattgaatgtagctttaactttctggagaaagagaagtataagtgaacttgtagcttatttgttgaggatagaagatcttggcgttgtggtagattgccttcctgtgctcaccaattgtttacaggaagaaaaacaatatatctcacttggctgctgtgttgacttgttgcctctagtaaagtcactacttaaaagcaaatttgaagaatatgttatagttggtttaaactggcttcaagcagtcattaaaaggtggtggtcagaactatcatccaaaacagaaattataaatgatggaaatattcaaattttaaaacaacaattaagtggattatgggaacaggaaaaccatcttactttggttccaggatatactggtaatatagctaaggatgtagatgcttatttattacagttacattgagagatttcatctactaaagagcatttggtttttcaaaacatccctgaactgtataatttacaaaaaaaaaagtctcgtctgagaactgtgaactgtggaagaaatcaaaactattttttcttttaaaaagccacgtaatgaaaccactaatgaaatcccagcaatctgcttcacattgaagtggaaaaatatccaaaaggagcagcttcaatttcattgaggtgaaagtgcactatgaagattgttcacctttgctgcatttgggagttatatggttatttggtaacattaagaactactggattttaatgcaatcctgcataaaaatataatttatactatgtgaaaaaataagacaggacttaccactaggaaccaccaagaccaatcatcattaacttttttaagattgtgttttattaaaaaaaaaaaacacttaaatgtgtgcagctattttcttatgttgaaaagactgaaagtttaaaacatgaaaaaaatcaatattaaacattttttgttcacactgagatactgtgtatgtaaaatgccttaattattaataagccaatgtgttatgataccaatatctgttttaaaaaactaaaaccaaccatgcttctggcatgataaaatcatggaattaaatcaggggtttacattcttgtagagtgttcttgaaacactctctgcaccatttttaaaacttgagaatagttttagtatctctgatattttttgccagaatcatcatgtcatgtatgaatgtgttatccctatctaaggaaaaaggtgaatatgtttttgtatgaatgtttaactggaaatgtccatggacttggctaatttatatttactttttattgtacatagatttctaatatttttcattcctgtatcatttaaacttccttcatttgagtaaattcactaaatatttctattttttgcttttttaaattctgattttatatgaattctaattctttttcactacatatgttttaaagagttacatacagtgatttagaatggtttacagttaatgctgatcttgtattttaaattccaacactttgtgtcactacctcctctaatggttagtatgatatgctagcagactgtatgaggtctttttttaaaataccacttttagtgtcagtgaaccaaattctggaatgtcttaacagctctaaatcttacttgtcttgaaaatgattggggtttaataccactgctggtggttcacacatcatcccatccttaatatgcctgacaggcatctgagcaaaggtttttagtaattgaatttctctgcagtagtccttcaagcacttgaatgtaaacctttagcatttattcgtttaatgactactgatacgaatctcaagcagatttcttgctcttaaaagttatgtttcactgagttctggttttgtgtagctatattttatatagctagatattcctcacagtgaacatgaattgtaataattggttatttccttaagtctttagattataataatttcagattattgcacgtctgtgatttgagaggtgagttatttaagaggccagttttcaggacatgggaatttgaattgtaaacctgttatctctgtgaaacttttaacatgataaaatataacctttctttgtgcttaaaaaaaaaaggaacaaaacacacttggggggcccggccagaaatttttaaacatcttggccccgcccgagaagagaagggctttttcagaaccgctcttgttgctttccaaaaagccggccgtctacaaacacggggggggccaaagcaag

SEQ ID NO: 34559 - DNA, 5063 bp, Homo sapiens
cccggcgggccggcgcgcggccgcgtttgaatggccctgagtgggactcggcccagaagccgagggactctctaggctgccgggcgctggtcgtcagcgccgaggctgggctgaggcgccgcggtaccatgaggcgccggtacttaagagattatggcatcagaaacccacaatgttaaaaaacggaacttttgtaataagattgaggatcatttcattgatcttcctagaaaaaagatctctaatttcactaataagaacatgaaggaggttaagaaatctccaaaacagttggctgcttacataaataggtttctcaggaccatgaaacaatggcccaagttttgttcagcaggaatatgagattgaatgtagctttaactttctggagaaagagaagtataagtgaacttgtagcttatttgttgaggatagaagatcttggcgttgtggtagattgccttcctgtgctcaccaattgtttacaggaagaaaaacaatatatctcacttggctgctgtgttgacttgttgcctctagtaaagtcactacttaaaagcaaatttgaagagtaagtgctaatctgaatcttgattcatttttctttttcagcatccttgattttgtgctttgtgagtacatagtagattgggctccatgagacatgcaaggtttctgttttcaagaagctaatagtacaattaggaaaagaatatgaaatgactaaaggacaattataaaagcatctctaaacaaattacatgaaatatacttttgtgtaatagatcatgaaggtaacaattttttaaaagggaagggaccaatgtgtgtgtgtgttttttgggagggaaagtatcatcttttataagaagggttcttagatgaaaacacttgaattttgtaacaaaatgtcatttcagatatgttatagttggtttaaactggcttcaagcagtcattaaaaggtggtggtcagaactatcatccaaaacagaaattataaatgatgggtgagtatacctttaaagataaactcatgctgaaattttcttcaggaaagcagcttgattaaactaggtaataattttatcccattatcatcagtgtatggtatttattctttttatattcagagagatactaacttaagagactgttcatttgtgaaaaccacacctggaaattgaattccagagcctactaacctcctgtatctcttcttctggcacaaccctacccttcattttagaagaaaaacacaatagtggtttaattctcatattcattatgagtaagggaggaaaaagagatgcccacagtgtaataaggaatggaggcaccctgcggggtcctttacctagacattaacctgagagtccggtgttgatgtttacacttctaaaaactgtattattactgccttgatgtgaaaattcgtgggtattctaccagagtatagccagattatcatgaaaccacagaaaaatatctcccaacagtttccttaaagtccataattttgggccaggcacggtggctgatgcctgtctgtaatcccagcactttgggaggccaagaagggcaaatcacttgagctcacaagtttgagacagcctgggcaacatgatgacatcccgtctctacaaaaaatacaaaaattagccaggcatggtggtgtgcgcctgtagtcccagctactcaggctgaggcaggaggatcgcttgagcccaggaggtggaggttgcagtaagccgagatggcaccactgcactccagcctgggcaatagagccagcccttgtctcaaaaaaaaaaaaaaaaaagccacaatttattttgtaggctctcaaaattttctacttcacaccaaggaatgtccaaatgttccaaacgcctggtcattttcttacctgctttgacaactaaataacctttaattttctttttttttttaattgaaatcaagtaagaaattttattaattttggaattgaaaaaacatcctttgttgtttccaagaattaattaaataggaggcatttggcggtattatgtggataaacctttaattttcatgactgacatgtattattctaaaagttatttgacttttttttaatttctctccacgttcccaaatgttttatttcaaatagcatcattttctcctgaaaaatacctgaaaaattttagaacagtttttattatgcatatttatgatgaaagtttgtatcttaatgtatttgctttctcatttttcttccttttttttcttttagaaatattcaaattttaaaacaacaattaagtggattatgggaacaggaaaaccatcttactttggttccaggatatactggtaatatagctaaggtcctctgcgtgtaactgtgaccttggcagcaagcacaggaattggccattgaacatgtttcatgtacagcccctgaaatgctatgctagaggatatttacagagggttttaatcagagaaaagtatttgaaaaaattttgagaatccaataaggacagcatcagaaaacaagacgaggaactcaggaaacactgggattacaggcgtgagccactgcgcctggcctatagaattcttaatgatgaaaatcttatgaacatatcaatctcctagaaagtttttgttgttgttttaggtttttagagcatacatgacgtattaccttgctctaaagggttgttgcattctgtatagaagaactaaaaaatgattgttccttatgactgaaatttgctttcaatcagaattttttttgttgtttttgttttgagactgaatctcgctctcacttcagcctggtgacagagcaagactctgtctcaaaaaaaaaagagaaagaaattgaaagaggctattgtcaagctgggctcaagtgaatatagcactgatagtaaacagcactgatagaatttctgtgaatgttagctatgaaagcagagttgtttgagcataggaaccaacacattcatttagcacttagcaaatatatattgagcacatactatgtgccaggccctgtgctgaacaaatgcagataaaagcactgaacaaggcacgtcttttaccctcaaaaggtcacaaaaggaaactaaggcaaattaagcaacaacaaaaaaaaatggattgtttatgtttgtatttactgtactgtctaatgaaatgtttttgttttatcttctaaggatgtagatgcttatttattacagttacattgagagatttcatctactaaagagcatttggtttttcaaaacatccctgaactgtataatttacaaaaaaaaaagtctcgtctgagaactgtgaactgtggaagaaatcaaaactattttttcttttaaaaagccacgtaatgaaaccactaatgaaatcccagcaatctgcttcacattgaagtggaaaaatatccaaaaggagcagcttcaatttcattgaggtgaaagtgcactatgaagattgttcacctttgctgcatttgggagttatatggttatttggtaacattaagaactactggattttaatgcaatcctgcataaaaatataatttatactatgtgaaaaaataagacaggacttaccactaggaaccaccaagaccaatcatcattaacttttttaagattgtgttttattaaaaaaaaaaaacacttaaatgtgtgcagctattttcttatgttgaaaagactgaaagtttaaaacatgaaaaaaatcaatattaaacattttttgttcacactgagatactgtgtatgtaaaatgccttaattattaataagccaatgtgttatgataccaatatctgttttaaaaaactaaaaccaaccatgcttctggcatgataaaatcatggaattaaatcaggggtttacattcttgtagagtgttcttgaaacactctctgcaccatttttaaaacttgagaatagttttagtatctctgatattttttgccagaatcatcatgtcatgtatgaatgtgttatccctatctaaggaaaaaggtgaatatgtttttgtatgaatgtttaactggaaatgtccatggacttggctaatttatatttactttttattgtacatagatttctaatatttttcattcctgtatcatttaaacttccttcatttgagtaaattcactaaatatttctattttttgcttttttaaattctgattttatatgaattctaattctttttcactacatatgttttaaagagttacatacagtgatttagaatggtttacagttaatgctgatcttgtattttaaattccaacactttgtgtcactacctcctctaatggttagtatgatatgctagcagactgtatgaggtctttttttaaaataccacttttagtgtcagtgaaccaaattctggaatgtcttaacagctctaaatcttacttgtcttgaaaatgattggggtttaataccactgctggtggttcacacatcatcccatccttaatatgcctgacaggcatctgagcaaaggtttttagtaattgaatttctctgcagtagtccttcaagcacttgaatgtaaacctttagcatttattcgtttaatgactactgatacgaatctcaagcagatttcttgctcttaaaagttatgtttcactgagttctggttttgtgtagctatattttatatagctagatattcctcacagtgaacatgaattgtaataattggttatttccttaagtctttagattataataatttcagattattgcacgtctgtgatttgagaggtgagttatttaagaggccagttttcaggacatgggaatttgaattgtaaacctgttatctctgtgaaacttttaacatgataaaatataacctttctttgtgcttaaaaaaaaaaggaacaaaacacacttggggggcccggccagaaatttttaaacatcttggccccgcccgagaagagaagggctttttcagaaccgctcttgttgctttccaaaaagccggccgtctacaaacacggggggggccaaagcaag

SEQ ID NO: 34560 - DNA, 2652 bp, Homo sapiens
cccggcgggccggcgcgcggccgcgtttgaatggccctgagtgggactcggcccagaagccgagggactctctaggctgccgggcgctggtcgtcagcgccgaggctgggctgaggcgccgcggtaccatgaggcgccggtacttaagagattatggcatcagaaacccacaatgttaaaaaacggaacttttgtaataagattgaggatcatttcattgatcttcctagaaaaaagatctctaatttcactaataagaacatgaaggaggttaagaaatctccaaaacagttggctgcttacataaatagaacagttggacaaactgtgaaaagcccagataaacttcgtaaagtgatctatcgcagaaagaaagttcatcatccctttccaaatccttgttacagaaaaaaacagtcccctggaagtgggggctgtgacatggcaaataaagaaaatgaactggcttgtgcaggccacctgcctgaaaaattacaccatgatagtcgaacatatttggttaactccagtgattctggttcttcacagacagaaagcccatcatcaaaatatagtgggtttttttctgaggtttctcaggaccatgaaacaatggcccaagttttgttcagcaggaatatgagattgaatgtagctttaactttctggagaaagagaagtataagtgaacttgtagcttatttgttgagaaatattcaaattttaaaacaacaattaagtggattatgggaacaggaaaaccatcttactttggttccaggatatactggtaatatagctaaggatgtagatgcttatttattacagttacattgagagatttcatctactaaagagcatttggtttttcaaaacatccctgaactgtataatttacaaaaaaaaaagtctcgtctgagaactgtgaactgtggaagaaatcaaaactattttttcttttaaaaagccacgtaatgaaaccactaatgaaatcccagcaatctgcttcacattgaagtggaaaaatatccaaaaggagcagcttcaatttcattgaggtgaaagtgcactatgaagattgttcacctttgctgcatttgggagttatatggttatttggtaacattaagaactactggattttaatgcaatcctgcataaaaatataatttatactatgtgaaaaaataagacaggacttaccactaggaaccaccaagaccaatcatcattaacttttttaagattgtgttttattaaaaaaaaaaaacacttaaatgtgtgcagctattttcttatgttgaaaagactgaaagtttaaaacatgaaaaaaatcaatattaaacattttttgttcacactgagatactgtgtatgtaaaatgccttaattattaataagccaatgtgttatgataccaatatctgttttaaaaaactaaaaccaaccatgcttctggcatgataaaatcatggaattaaatcaggggtttacattcttgtagagtgttcttgaaacactctctgcaccatttttaaaacttgagaatagttttagtatctctgatattttttgccagaatcatcatgtcatgtatgaatgtgttatccctatctaaggaaaaaggtgaatatgtttttgtatgaatgtttaactggaaatgtccatggacttggctaatttatatttactttttattgtacatagatttctaatatttttcattcctgtatcatttaaacttccttcatttgagtaaattcactaaatatttctattttttgcttttttaaattctgattttatatgaattctaattctttttcactacatatgttttaaagagttacatacagtgatttagaatggtttacagttaatgctgatcttgtattttaaattccaacactttgtgtcactacctcctctaatggttagtatgatatgctagcagactgtatgaggtctttttttaaaataccacttttagtgtcagtgaaccaaattctggaatgtcttaacagctctaaatcttacttgtcttgaaaatgattggggtttaataccactgctggtggttcacacatcatcccatccttaatatgcctgacaggcatctgagcaaaggtttttagtaattgaatttctctgcagtagtccttcaagcacttgaatgtaaacctttagcatttattcgtttaatgactactgatacgaatctcaagcagatttcttgctcttaaaagttatgtttcactgagttctggttttgtgtagctatattttatatagctagatattcctcacagtgaacatgaattgtaataattggttatttccttaagtctttagattataataatttcagattattgcacgtctgtgatttgagaggtgagttatttaagaggccagttttcaggacatgggaatttgaattgtaaacctgttatctctgtgaaacttttaacatgataaaatataacctttctttgtgcttaaaaaaaaaaggaacaaaacacacttggggggcccggccagaaatttttaaacatcttggccccgcccgagaagagaagggctttttcagaaccgctcttgttgctttccaaaaagccggccgtctacaaacacggggggggccaaagcaag

SEQ ID NO: 34561 - DNA, 1504 bp, Homo sapiens
cccggcgggccggcgcgcggccgcgtttgaatggccctgagtgggactcggcccagaagccgagggactctctaggctgccgggcgctggtcgtcagcgccgaggctgggctgaggcgccgcggtaccatgaggcgccggtacttaagagattatggcatcagaaacccacaatgttaaaaaacggaacttttgtaataagattgaggatcatttcattgatcttcctagaaaaaagatctctaatttcactaataagaacatgaaggaggttaagaaatctccaaaacagttggctgcttacataaatagaacagttggacaaactgtgaaaagcccagataaacttcgtaaagtgatctatcgcagaaagaaagttcatcatccctttccaaatccttgttacagaaaaaaacagtcccctggaagtgggggctgtgacatggcaaataaagaaaatgaactggcttgtgcaggccacctgcctgaaaaattacaccatgatagtcgaacatatttggttaactccagtgattctggttcttcacagacagaaagcccatcatcaaaatatagtgggtttttttctgaggtttctcaggaccatgaaacaatggcccaagttttgttcagcaggaatatgagattgaatgtagctttaactttctggagaaagagaagtataagtgaacttgtagcttatttgttgaggatagaagatcttggcgttgtggtagattgccttcctgtgctcaccaattgtttacaggaagaaaaacaatatatctcacttggctgctgtgttgacttgttgcctctagtaaagtcactacttaaaagcaaatttgaagaatatgttatagttggtttaaactggcttcaagcagtcattaaaaggtggtggtcagaactatcatccaaaacagaaattataaatgatggaaatattcaaattttaaaacaacaattaagtggattatgggaacaggaaaaccatcttactttggttccaggatatactggtaatatagctaaggatgtagatgcttatttattacagttacattgagagatttcatctactaaagagcatttggtttttcaaaacatccctgaactgtataatttacaaaaaaaaaagtctcgtctgagaactgtgaactgtggaagaaatcaaaactattttttcttttaaaaagccacgtaatgaaaccactaatgaaatcccagcaatctgcttcacattgaagtggaaaaatatccaaaaggagcagcttcaatttcattgaggtgaaagtgcactatgaagattgttcacctttgctgcatttgggagttatatggttatttggtaacattaagaactactggattttaatgcaatcctgcataaaaatataatttatactatgtgaaaaaataagacaggacttaccactaggaaccaccaagaccaatcatcattaacttttttaagattgcggtgtttgcgattgcggtgtttg

SEQ ID NO: 34562 - DNA, 2608 bp, Homo sapiens
aaagttcaatgcgagttccttatgatgagactttcttacaaaattaaaccatcaattaatttgtaattttttgagtatagaaattgaaagaagagggccgggcaaggtgctgggattacaggcgtgagccactgcgcctggcctatagaattcttaatgatgaaaatcttatgaacatatcaatctcctagaaagtttttgttgttgttttaggtttttagagcatacatgacgtattaccttgctctaaagggttgttgcattctgtatagaagaactaaaaaatgattgttccttatgactgaaatttgctttcaatcagaattttttttgttgtttttgttttgagactgaatctcgctctcacttcagcctggtgacagagcaagactctgtctcaaaaaaaaaagagaaagaaattgaaagaggctattgtcaagctgggctcaagtgaatatagcactgatagtaaacagcactgatagaatttctgtgaatgttagctatgaaagcagagttgtttgagcataggaaccaacacattcatttagcacttagcaaatatatattgagcacatactatgtgccaggccctgtgctgaacaaatgcagataaaagcactgaacaaggcacgtcttttaccctcaaaaggtcacaaaaggaaactaaggcaaattaagcaacaacaaaaaaaaatggattgtttatgtttgtatttactgtactgtctaatgaaatgtttttgttttatcttctaaggatgtagatgcttatttattacagttacattgagagatttcatctactaaagagcatttggtttttcaaaacatccctgaactgtataatttacaaaaaaaaaagtctcgtctgagaactgtgaactgtggaagaaatcaaaactattttttcttttaaaaagccacgtaatgaaaccactaatgaaatcccagcaatctgcttcacattgaagtggaaaaatatccaaaaggagcagcttcaatttcattgaggtgaaagtgcactatgaagattgttcacctttgctgcatttgggagttatatggttatttggtaacattaagaactactggattttaatgcaatcctgcataaaaatataatttatactatgtgaaaaaataagacaggacttaccactaggaaccaccaagaccaatcatcattaacttttttaagattgtgttttattaaaaaaaaaaaacacttaaatgtgtgcagctattttcttatgttgaaaagactgaaagtttaaaacatgaaaaaaatcaatattaaacattttttgttcacactgagatactgtgtatgtaaaatgccttaattattaataagccaatgtgttatgataccaatatctgttttaaaaaactaaaaccaaccatgcttctggcatgataaaatcatggaattaaatcaggggtttacattcttgtagagtgttcttgaaacactctctgcaccatttttaaaacttgagaatagttttagtatctctgatattttttgccagaatcatcatgtcatgtatgaatgtgttatccctatctaaggaaaaaggtgaatatgtttttgtatgaatgtttaactggaaatgtccatggacttggctaatttatatttactttttattgtacatagatttctaatatttttcattcctgtatcatttaaacttccttcatttgagtaaattcactaaatatttctattttttgcttttttaaattctgattttatatgaattctaattctttttcactacatatgttttaaagagttacatacagtgatttagaatggtttacagttaatgctgatcttgtattttaaattccaacactttgtgtcactacctcctctaatggttagtatgatatgctagcagactgtatgaggtctttttttaaaataccacttttagtgtcagtgaaccaaattctggaatgtcttaacagctctaaatcttacttgtcttgaaaatgattggggtttaataccactgctggtggttcacacatcatcccatccttaatatgcctgacaggcatctgagcaaaggtttttagtaattgaatttctctgcagtagtccttcaagcacttgaatgtaaacctttagcatttattcgtttaatgactactgatacgaatctcaagcagatttcttgctcttaaaagttatgtttcactgagttctggttttgtgtagctatattttatatagctagatattcctcacagtgaacatgaattgtaataattggttatttccttaagtctttagattataataatttcagattattgcacgtctgtgatttgagaggtgagttatttaagaggccagttttcaggacatgggaatttgaattgtaaacctgttatctctgtgaaacttttaacatgataaaatataacctttctttgtgcttaaaaaaaaaaggaacaaaacacacttggggggcccggccagaaatttttaaacatcttggccccgcccgagaagagaagggctttttcagaaccgctcttgttgctttccaaaaagccggccgtctacaaacacggggggggccaaagcaag

SEQ ID NO: 34563 - DNA, 2978 bp, Homo sapiens
cccggcgggccggcgcgcggccgcgtttgaatggccctgagtgggactcggcccagaagccgagggactctctaggctgccgggcgctggtcgtcagcgccgaggctgggctgaggcgccgcggtaccatgaggcgccggtacttaagagattatggcatcagaaacccacaatgttaaaaaacggaacttttgtaataagattgaggatcatttcattgatcttcctagaaaaaagatctctaatttcactaataagaacatgaaggaggttaagaaatctccaaaacagttggctgcttacataaatagaacagttggacaaactgtgaaaagcccagataaacttcgtaaagtgatctatcgcagaaagaaagttcatcatccctttccaaatccttgttacagaaaaaaacagtcccctggaagtgggggctgtgacatggcaaataaagaaaatgaactggcttgtgcaggccacctgcctgaaaaattacaccatgatagtcgaacatatttggttaactccagtgattctggttcttcacagacagaaagcccatcatcaaaatatagtgggtttttttctgaggtttctcaggaccatgaaacaatggcccaagttttgttcagcaggaatatgagattgaatgtagctttaactttctggagaaagagaagtataagtgaacttgtagcttatttgttgaggatagaagatcttggcgttgtggtagattgccttcctgtgctcaccaattgtttacaggaagaaaaacaatatatctcacttggctgctgtgttgacttgttgcctctagtaaagtcactacttaaaagcaaatttgaagaatatgttatagttggtttaaactggcttcaagcagtcattaaaaggtggtggtcagaactatcatccaaaacagaaattataaatgatgggtgagtatacctttaaagataaactcatgctgaaattttcttcaggaaagcagcttgattaaactaggtaataattttatcccattatcatcagtgtatggtatttattctttttatattcagagagatactaacttaagagactgttcatttgtgaaaaccacacctggaaattgaattccagagcctactaacctcctgtatctcttcttctggcacaaccctacccttcattttagaagaaaaacacaatagtggtttaattctcatattcattatgagtaagggaggaaaaagagatgcccacagtgtaataaggaatggaggcaccctgcggggtcctttacctagacattaacctgagagtccggtgttgatgtttacacttctaaaaactgtattattactgccttgatgtgaaaattcgtgggtattctaccagagtatagccagattatcatgaaaccacagaaaaatatctcccaacagtttccttaaagtccataattttgggccaggcacggtggctgatgcctgtctgtaatcccagcactttgggaggccaagaagggcaaatcacttgagctcacaagtttgagacagcctgggcaacatgatgacatcccgtctctacaaaaaatacaaaaattagccaggcatggtggtgtgcgcctgtagtcccagctactcaggctgaggcaggaggatcgcttgagcccaggaggtggaggttgcagtaagccgagatggcaccactgcactccagcctgggcaatagagccagcccttgtctcaaaaaaaaaaaaaaaaaagccacaatttattttgtaggctctcaaaattttctacttcacaccaaggaatgtccaaatgttccaaacgcctggtcattttcttacctgctttgacaactaaataacctttaattttctttttttttttaattgaaatcaagtaagaaattttattaattttggaattgaaaaaacatcctttgttgtttccaagaattaattaaataggaggcatttggcggtattatgtggataaacctttaattttcatgactgacatgtattattctaaaagttatttgacttttttttaatttctctccacgttcccaaatgttttatttcaaatagcatcattttctcctgaaaaatacctgaaaaattttagaacagtttttattatgcatatttatgatgaaagtttgtatcttaatgtatttgctttctcatttttcttccttttttttcttttagaaatattcaaattttaaaacaacaattaagtggattatgggaacaggaaaaccatcttactttggttccaggatatactggtaatatagctaaggtcctctgcgtgtaactgtgaccttggcagcaagcacaggaattggccattgaacatgtttcatgtacagcccctgaaatgctatgctagaggatatttacagagggttttaatcagagaaaagtatttgaaaaaattttgagaatccaataaggacagcatcagaaaacaagacgaggaactcaggaaacaagggataagaaacataattaaatggttttggagattaagttttacttttgctaatgttatgctttttgagaaggtaaactatttaaatcacagtgaatttgactttggtctttattgatttgtctcgtaaaggaaaaagtaaaaattgctagtttgaattttaatatttaaactccagaaaacattggtagttaggccgggcacagtggcttacgcctgtaatcctagcacttagggaggccaaggcaagcagatcacctgaggtcaggagttcgagaccagcctggttggtgaaaccccgtttctactaaaaatacaaaaaattacctgggtgtgatggcacgtgcctgtaatcccagctactcgggaggctgaggcaggagaatcacttgaacctgggaggcggaggttgtggtgagctgagatcgtgccattgcactccagtttgggcaacagagtgaaactccgtctcaaaaaaaaaaa

SEQ ID NO: 34564 - DNA, 1710 bp, Homo sapiens
cccggcgggccggcgcgcggccgcgtttgaatggccctgagtgggactcggcccagaagccgagggactctctaggctgccgggcgctggtcgtcagcgccgaggctgggctgaggcgccgcggtaccatgaggcgccggtacttaagagattatggcatcagaaacccacaatgttaaaaaacggaacttttgtaataagattgaggatcatttcattgatcttcctagaaaaaagatctctaatttcactaataagaacatgaaggaggttaagaaatctccaaaacagttggctgcttacataaatagaacagttggacaaactgtgaaaagcccagataaacttcgtaaagtgatctatcgcagaaagaaagttcatcatccctttccaaatccttgttacagaaaaaaacagtcccctggaagtgggggctgtgacatggcaaataaagaaaatgaactggcttgtgcaggccacctgcctgaaaaattacaccatgatagtcgaacatatttggttaactccagtgattctggttcttcacagacagaaagcccatcatcaaaatatagtgggtttttttctgaggtttctcaggaccatgaaacaatggcccaagttttgttcagcaggaatatgagattgaatgtagctttaactttctggagaaagagaagtataagtgaacttgtagcttatttgttgaggatagaagatcttggcgttgtggtagattgccttcctgtgctcaccaattgtttacaggaagaaaaacaatatatctcacttggctgctgtgttgacttgttgcctctagtaaagtcactacttaaaagcaaatttgaagaatatgttatagttggtttaaactggcttcaagcagtcattaaaaggtggtggtcagaactatcatccaaaacagaaattataaatgatggaaatattcaaattttaaaacaacaattaagtggattatgggaacaggaaaaccatcttactttggttccaggatatactggtaatatagctaaggtcctctgcgtgtaactgtgaccttggcagcaagcacaggaattggccattgaacatgtttcatgtacagcccctgaaatgctatgctagaggatatttacagagggttttaatcagagaaaagtatttgaaaaaattttgagaatccaataaggacagcatcagaaaacaagacgaggaactcaggaaacaagggataagaaacataattaaatggttttggagattaagttttacttttgctaatgttatgctttttgagaaggtaaactatttaaatcacagtgaatttgactttggtctttattgatttgtctcgtaaaggaaaaagtaaaaattgctagtttgaattttaatatttaaactccagaaaacattggtagttaggccgggcacagtggcttacgcctgtaatcctagcacttagggaggccaaggcaagcagatcacctgaggtcaggagttcgagaccagcctggttggtgaaaccccgtttctactaaaaatacaaaaaattacctgggtgtgatggcacgtgcctgtaatcccagctactcgggaggctgaggcaggagaatcacttgaacctgggaggcggaggttgtggtgagctgagatcgtgccattgcactccagtttgggcaacagagtgaaactccgtctcaaaaaaaaaaa

SEQ ID NO: 34565 - DNA, 1562 bp, Homo sapiens
cccggcgggccggcgcgcggccgcgtttgaatggccctgagtgggactcggcccagaagccgagggactctctaggctgccgggcgctggtcgtcagcgccgaggctgggctgaggcgccgcggtaccatgaggcgccggtacttaagagattatggcatcagaaacccacaatgttaaaaaacggaacttttgtaataagattgaggatcatttcattgatcttcctagaaaaaagatctctaatttcactaataagaacatgaaggaggttaagaaatctccaaaacagttggctgcttacataaatagaacagttggacaaactgtgaaaagcccagataaacttcgtaaagtgatctatcgcagaaagaaagttcatcatccctttccaaatccttgttacagaaaaaaacagtcccctggaagtgggggctgtgacatggcaaataaagaaaatgaactggcttgtgcaggccacctgcctgaaaaattacaccatgatagtcgaacatatttggttaactccagtgattctggttcttcacagacagaaagcccatcatcaaaatatagtgggtttttttctgaggtttctcaggaccatgaaacaatggcccaagttttgttcagcaggaatatgagattgaatgtagctttaactttctggagaaagagaagtataagtgaacttgtagcttatttgttgaggtaagtgtgaccttttatcctctttgttcaatcactttttttctgagacaagttcttgctttgtcatccaagttggagtacagtggcacaatcatggctcactgcagcctcaacctgctgagttcaagcagccctcccacctcagcctcctgagtagctgagagtacaggtgcacatcaccacacctggctattttttaaaaaaattttttggaagacatgaggtcttatgtttcccgggctggtctcgaactcctgagctcaggtgaaccttcttcattattctaaactgcctatatgtagcttcagtagagacagtatggcttaaattacattcctcacccatctaagagtaaccaaaatacagaaaacaatgttttatcagattgaacaaagctgttacctttcctgactgtcattcttacctataaaactaagagataacgatatgggaaaactaaccttctaaaaatcccttttgaggccaggtgtggcagttcttgcctataatcccagcatttgggaaggttgaggtgagagagtcccttgagcccaggagtgagagactgagcaacatagcaagactccatctctacaaaaaataaaaataataagccaggcacagtggtacgtgcttgtggtcccagatacttgggaagatcactttgaacccaggagttggaggttgcagtaagctgtgattatgcaactacattccagcctgggcaacagaatgagacccgtttcttaaaaaaaaaattactaaaaataaaaagtaaacatcccttttgagtgggaatttgaagcattactttcctcattgtattcaagtctctcagatgttaccttaggg

SEQ ID NO: 34566 - DNA, 296 bp, Homo sapiens
gctgtgacatggcaaataaagaaaatgaactggcttgtgcaggccacctgcctgaaaaattacaccatgatagtcgaacatatttggttaactccagtgattctggttcttcacagacagaaagcccatcatcaaaatatagtgggtttttttctgaggtaagtcttttctctaactcatatctagtttaactttgttcctgttataatcttgatttttttctttgccatattccactagcagaataatttgtcacctattgaatgtagacttatttgagtcatagtaactccctg

SEQ ID NO: 34567 - DNA, 1482 bp, Homo sapiens
attaaaatgctattttgggttgtcttcttttggtaacatattctgacactaagcaacatgttttacaatttagtgggatgaacctacaaattcataaatgcttctctttattttgaaggaaaaagatacttgtctgtatacgacataattgttttactcttcagaatgtgaaagttatattaatcactaaacactttaagaagtggttctggtaggatatcagtagtcagacttaattgaaaaactgtcagcgtctgttttgtatatagggattaaagaggataactttattttttcctttggaaagaataattcttttggaattttggaattttgattttcttagatgactttttagcaatttaatgataataatttctatttttcttccaaaactatggcatgttatagtagatcttactattaaagatcttttatattttaaactgtttttttcctattctgctttttgctgctctcaaagactgtgattgatgaacatcaccaaactttttttgtggcaaactgcttattttataagtagctttatataagaaaacttcttagaaaactatgtggctggttggttccatttagaaactcttaacaggtatggctttcattcctccagttgtttgcttttatagacttggagcaaaaaatatagcaaaaagtaatcatatctggctagatagccatttctctcagattcattgctataaaaatgaatctactgaggcataaaaatatgaaacatatttaattcatctcttttgtcagtttttctgggactccaatagcatttcagtgttatagagagtgacagtgacttgaatgcatgtatatgcacatagtcaattcagagcgtaataactaaaaattcagaatgacttgttttttgaaagtacttggaaattgtgctgctacttaaatattgaaggaattcagaaagttgtgtatttatcttaaaatgttccttctcacttattctactggaattgaccatgaaaaagaaaatattatgccttatttatatctaattattgactgtgcaaactgtgactcagtggatatttgtatgccccccaaaaacattttaaagctgagcaatttttaataaagatgtataaataattttgattattctcattgtagttaagttactgttagtttggtgcaatacattctttccttcctcatccttttaaaattaaatatataagatgtatgttttgttttattacattaagtgctatttttaaaaaattcattgtgtgtatatgagctaatacttgatttgtttctgtatagcatgattaaagataattgaaaattttgcacttattttaggcccttggaaatttgtattctaatactttttaagaatgtccatttattttgtacataataaattagctttgtatatgaaaatgggtttgaatcaaataaaaaaagtgatgttactttcttcaagatttgtaa

SEQ ID NO: 34568 - DNA, 882 bp, Homo sapiens
gttttttcagtgaagctctcagaatgtccagtacagatgttgcagataattccaagaactccttcagcaggtgttcttcaccattcgtaaacagtattttaagatgttcactttgctcttctttttggttacatacattttaataactggtatgttgaagtagtgtctaaaagtatctagtctttattcacagtacattatattgtgtgatgcactggactaactcttgtttaccattcatgtaacaaaacccagcacattatctgcactataagctcaaagaatgtcacatccgcccagacagctctttgatgagggtgatgggaactgaataaaccatacggactggcagtaacaagggcttttactgttctgttcagtggaaccttcttggtcaaattgtaattagctagcattatatttatatacagggtcttttttctttaccgatgtattttcctactcatagccaaccaataaattcagtatctgtttcaaatattttagaagtgtagtttgtatagctgtagtactgaggtttgaggaaaaataaatgttgatcagcagaccacgtatttaaaattctgaatcttctgggacagggttgtaactcagccttccaaagggaagagtgcagggggacggggccatgatatggggaaatggtgtaaactaatgtatttctttattggctgttattctgtataacactcatatctttgccaaagttcaattttatatttaggcaactgatggtccttttgcatttaggattttcgttgttgttaccttatacctcatgatataaggaatgggctcatgtgtcttccgtcttttggaaggaggttgacatattttaaataaatgcttttaaatacagta

SEQ ID NO: 34569 - DNA, 828 bp, Homo sapiens
gttttttcagtgaagctctcagaatgtccagtacagatgttgcagataattccaagaactccttcagcaggtgttcttcaccattcgtaaacagtattttaagatgttcactttgctcttctttttggttacatacattttaataactggtatgttgaagtagtgtctaaaagtatctagtctttattcacagtacattatattgtgtgatgcactggactaactcttgtttaccattcatgtaacacagctctttgatgagggtgatgggaactgaataaaccatacggactggcagtaacaagggcttttactgttctgttcagtggaaccttcttggtcaaattgtaattagctagcattatatttatatacagggtcttttttctttaccgatgtattttcctactcatagccaaccaataaattcagtatctgtttcaaatattttagaagtgtagtttgtatagctgtagtactgaggtttgaggaaaaataaatgttgatcagcagaccacgtatttaaaattctgaatcttctgggacagggttgtaactcagccttccaaagggaagagtgcagggggacggggccatgatatggggaaatggtgtaaactaatgtatttctttattggctgttattctgtataacactcatatctttgccaaagttcaattttatatttaggcaactgatggtccttttgcatttaggattttcgttgttgttaccttatacctcatgatataaggaatgggctcatgtgtcttccgtcttttggaaggaggttgacatattttaaataaatgcttttaaatacagta

SEQ ID NO: 34570 - DNA, 944 bp, Homo sapiens
gttttttcagtgaagctctcagaatgtccagtacagatgttgcagataattccaagaactccttcagcaggtgttcttcaccattcgtaaacagtattttaagatgttcactttgctcttctttttggttacatacattttaataactggtatgttgaagtagtgtctaaaagtatctagtctttattcacagtacattatattgtgtgatgcactggactaactcttgtttaccattcatgtaacaaaacccagcacattatctgcactataagctcaaagaatgtcacatccgcccagacagctctttgatgagggtgatgggaactgaataaaccatacggactggcagtaacaagggcttttactgttctgttcagtggaaccttcttggtcaaattgtaattagctagcattatatttatatacagggtcttttttctttaccgatgtattttcctactcatagccaaccaataaattcagtatctgtttcaaatattttagaagtgtagtttgtatagctgtagtactgaggtttgaggaaaaataaatgttgatcagcagaccacgtatttaaaattctgaatcttctgggacagggttgtaactcagccttccaaagggaagagtgcagggggacggggccatgatatggggaaatggtgtaaactaatgtatttctttattggctgttattctgtataacactcatatctttgccaaagttcaattttatatttaggcaactgatggtccttttgcatttaggattttcgttgttgttaccttatacctcatgatataaggaatgggctcatgtgtcttccgtcttttggaaggaggttgacatattttaaataaatgcttttaaatacagtagcaaacattgtgttggggttataataattcattaaatgtcttgttgcctgtaaaaaaaaata

SEQ ID NO: 34571 - DNA, 891 bp, Homo sapiens
gttttttcagtgaagctctcagaatgtccagtacagatgttgcagataattccaagaactccttcagcaggtgttcttcaccattcgtaaacagtattttaagatgttcactttgctcttctttttggttacatacattttaataactggtatgttgaagtagtgtctaaaagtatctagtctttattcacagtacattatattgtgtgatgcactggactaactcttgtttaccattcatgtaacaaaacccagcacattatctgcactataagctcaaagaatgtcacatccgcccagacagctctttgatgagggtgatgggaactgaataaaccatacggactggcagtaacaagggcttttactgttctgttcagtggaaccttcttggtcaaattgtaattagctagcattatatttatatacagggtcttttttctttaccgatgtattttcctactcatagccaaccaataaattcagtatctgtttcaaatattttagaagtgtagtttgtatagctgtagtactgaggtttgaggaaaaataaatgttgatcagcagaccacgtatttatgcagggggacggggccatgatatggggaaatggtgtaaactaatgtatttctttattggctgttattctgtataacactcatatctttgccaaagttcaattttatatttaggcaactgatggtccttttgcatttaggattttcgttgttgttaccttatacctcatgatataaggaatgggctcatgtgtcttccgtcttttggaaggaggttgacatattttaaataaatgcttttaaatacagtagcaaacattgtgttggggttataataattcattaaatgtcttgttgcctgtaaaaaaaaata

SEQ ID NO: 34572 - DNA, 430 bp, Homo sapiens
atatacgaccgagctagtaccctcgataagggcctatctgtttcaaatattttagaagtgtagtttgtatagctgtagtactgaggtttgaggaaaaataaatgttgatcagcagaccacgtatttaaaattctgaatcttctgggacagggttgtaactcagccttccaaagggaagagtgcagggggacggggccatgatatggggaaatggtgtaaactaatgtatttctttattggctgttattctgtataacactcatatctttgccaaagttcaattttatatttaggcaactgatggtccttttgcatttaggattttcgttgttgttaccttatacctcatgatataaggaatgggctcatgtgtcttccgtcttttggaaggaggttgacatattttaaataaatgcttttaaatacagta

SEQ ID NO: 34573 - DNA, 308 bp, Homo sapiens
acagatgcttcatatatacagattatcctggtaaataattggggatacacataaaaacacctgaaccaaagcatatacaaagtactagggaaagccacaagtggaaacaatagttctacctcaggaggaagaggtcaatgaaagttccatgaagaatgtagtatttgagttgggtattgaaggatgaataggagttaatgactctctaccaaactatctacagttcttagcagcaatatcctgttgtgtaccaagaatcaaaacatcccatattttctttaaaataaaagcatgacagaatcaatttt

SEQ ID NO: 34574 - DNA, 478 bp, Homo sapiens
aacttccagtttcccaagacgcaacattgaattcaatcagaggtaaagattctggactattggattaaatgaggaggcaggagctactatctcttgcagtgtgaaaccagggccggggatgaagatatggacacatctcagctttccagggatgctgtgatgtggtgaaattatgccattcattagaaggtgatactgtcatcaatgtgagaggcccaggactctgcagggcctgaagaaatcctgggcaatgagtctgagggaagtctctcagagcagctactctgagagagtaaagccgcagcctttgtggggtatgaaagcagcgttctcatggataaggcttatttgagacgaagtggaggccttgttttgtccacttaccgcaatgtccactgtccccaactgcagcatgccaacagcaaatgtgtttagtggatatgtgctttgtagctaacaagaaacagtaacatttatt

SEQ ID NO: 34575 - DNA, 743 bp, Homo sapiens
cagacgaggggcggtggtcacgcagcgctgggtccagtggtcgggggaaggcgaggattaccctcccggaggcgttgtctgcgactcggcggaggctccaacttccagtggcccggtcgggaaagatcagagcctcctaagaaatatccagaagtcaagccatggatccacctgcacgtaaagaaaaaaccaaagttaaagaatctgtcagcagagttgagaaggccaaacagaaatcagcccagcaggagctgaagcagagacaaagagcagagatctatgccctcaacagagtcatgacagaactggagcagcagcagtttgatgagttctgtaaacagatgcagcctcctggagaatgaggccccaggttcaaaccagatgggatcctgagagctttgagagggtgttgccagttttaagctgagatggcccatttggagccttacagaactagaccagaagacatttgtggataaatctgaactcacttcctgtgtgtaacttctaacttcactggttcctcccatctgaattggccacatgcttgctgaagagacttgttttcttcttctaagacagtggttttgttttttgggtttttttaaaaaaaaaaaaaaaaacacacacaaaaaacactttttctattgtttgagaaaaatcagtgtttctcatgaaactctatatcttctccaaaaatacaaataaaatactaataaaatgttcatttgctcatactttag

SEQ ID NO: 34576 - DNA, 858 bp, Homo sapiens
cagacgaggggcggtggtcacgcagcgctgggtccagtggtcgggggaaggcgaggattaccctcccggaggcgttgtctgcgactcggcggaggctccaacttccagtggcccggtcgggaaagatcagagcctcctaagaaatatccagaagtcaagccatggatccacctgcacgtaaagaaaaaaccaaagttaaagaatctgtcagcagagttgagaaggccaaacagaaatcagcccagcaggagctgaagcagagacaaagagcagagatctatgccctcaacagagtcatgacagaactggagcagcagcagtttgatgagttctgtaaacagatgcagcctcctggagaatgaggccccaggttcaaaccagatgggatcctgagagctttgagagggtgttgccagttttaagctgagatggcccatttggagccttacagaactagaccagaagacatttgtggataaatctgaactcacttcctgtgtgtaacttctaacttcactggttcctcccatctgaattggccacatgcttgctgaagagacttgttttcttcttctaagacagtggttttgttttttgggtttttttaaaaaaaaaaaaaaaaacacacacaaaaaacactttttctattgtttgagaaaaatcagtgtttctcatgaaactctatatcttctccaaaaatacaagttctcgtactagttaattggacaagttcagatttcgatttcccttgaccaattatccttgctacgtgatggattacctcttaatcgccctcccttttaactcgctgtttaggtatttgcacgcaattgggcgttcctttggcccaattccccg

SEQ ID NO: 34577 - DNA, 348 bp, Homo sapiens
gcaggtaacatttcctccccagttttcggggcagaaagtggaggcatagaaaagttaagaaaggccgggtgcagtggcccacgcctgtaatcccagcactttgggaagccgaggtaggcggatcacctgaggtcaggagtttgagaccagcctgaccaatgtggagaaaccctgtctctagtaaaaatacaaaattagcagagcgtggtggcacatgcctgtaataccagctacttgggaggcagaagcaggagaataacttgaacctgggaggtggaggttgcagtgagcttagatcgtgccattgcactccagcctaggcaacaagagtgaaactccatctcaaaa

SEQ ID NO: 34578 - DNA, 438 bp, Homo sapiens
atttttcatagtactacatttcagaaacagctacgaaaataaactaacctgacaaggagtatgcatcatctatatttttgggctccatggggcccataagggagagaagctattgtatccacagaaacatcttcttcctcccagacctggaccctatacaatcctatgcacataattttgcctatttcctttaaaaaaggtaaaatttcatgattttaaacattttatcaaaatcccagaatacctattaaaacctcacaacattcagcctgggaaagctgattgctaaaacaaaagaaaaccaaacctcacaacaaagcacttaccttatttccttatttttttccctgtctaggttagaaactccatgcagacagaaaccaatacccattatctagtgcagtgcctggcacaaggagggtcctcataaaatattaa

SEQ ID NO: 34579 - DNA, 1425 bp, Homo sapiens
  misc_feature (10)..(10): n is a, c, g, or t
aacctcgtgncatgagcatttagaaatggagaccacttctggtgaattgtcagatgtttccaatgatcccaccacatctgtctgtgtagctagtgccccaacaaaagaagcaattgacaataccctgcttgaacacaaagaaagaagtgagaatataaatcttaatgaaaagcaaattccttttcaggtgcctaatattgaaaggaactttagacagtcacagcctaaatcctatctttgccattatgaactggctgaggcccttccacaaggaaagatgaatgagacaccaactgagtggctgcgttataattcaggaatccttaacacacaaccaccattaccattcaaagaagcacatgtcagtggtcatacttttgtaacagctgagcaaatcctggctccattagctttaccagagcaagcattattgatcccactagaaaaccatgacaaattcaaaaatgtaccatgtgaggtctaccagcacattctgcagccaaacatgctggccaacaaggttaaatttacctttcctccagctgccctcccaccccctagcacacctctgcagcctttgcctttgcagcagtccttatgttctacctctgtaaccactatccatcacactgttttgcagcagcacgctgcagctgctgcagctgcagctgcagccgcagctgcaggaacctttaaagtgcttcagccacaccaacagtttctttcccaaatcccagctctcaccagaacctcattacctcagctctcagtaggaccagtaggaccgaggctttgtcctgggaaccagccaacttttgttgctcctcctcagatgccaatcattccagcttccgttcttcatcctagccatctggctttcccatctttaccccatgcactctttccttcactgctttccccacaccctactgtcatccctttgcaacctctcttctagtcatcaccataatgggaaaaaaatactcttgtgaaaactattgctatatgcgttaagtgttcatctatgtgggtacatggctatttaactggtggaaataaactggccgatacatggcgtcattggtttgaaatcatttactgtaagtgcaatgatgcaaataaatccctaagtttctgatatataatattattaaagcactgaatagtttgaaaatcaatacaatatatgctatatattaaaatgatgtcttaagagtatgtataatgtacataaaatatatttatagtactctaatttatgttgtaaagtatgctcccttggtttttcttaatctttgtgtatttgcacctatttaatgtttagacaaagctgatggcactatgttttgtatcatgttccttgaaactgtaaattcagtgaaaaatatctcttgcaataaatttttgttaactatttaagtaaat

SEQ ID NO: 34580 - DNA, 290 bp, Homo sapiens
gtctgtaagacgaaagacaaacaaaactacatactttatttcagtaaggtcatcaaaaacaagaaagtctggggaactatcatagccaagagaagcctaaggagacatgatgactaaatgtaatgtgatatcctacaacagaaaaagcactgggtgaaacctaagggaatctgaagaaacaattgactttagttaatttttaaaaatattgccaggcatggtgacatgtgcctgtagtcccagctactcaggaggctgaggttagaaggattgcttgagcctaggaattt

SEQ ID NO: 34581 - DNA, 463 bp, Homo sapiens
gattgaaacattttgtgatctttaccttttgacacatttcttaaaatgttgctatgaaaactgaaaatctgtcaattattaataattgtcagaagtctttaaaaattgataaaactatcctttataaattgctgtatacttttatatacttgaatgtgtgtttggtaaatctttaaagtttggtaattcacataattgattatgagccaaatgactccaatgtcctacaagtccttgaggagttagtgtatatatataacatatatatatataatatacacttggatgggattatttgaagcttgtctttctaggactggagattttaacctgagatctgcgggcttggaaagttggtgaacttcctaaaatagtcggggggtaaagaggggaggagcagctatgggaagagggttcatatttttcagtaattttttttttctttttttacatttttgttgtt

SEQ ID NO: 34582 - DNA, 637 bp, Homo sapiens
tggatagccatcaatacttcaaaaacattaaaagtatagactctatattatgaatattaaaaataaattttgggtcacagaaacagcatttgagaatcataaaatggatggcaaaaatagaaggatatttcagctaggcagtgggacagaaatactgatgtaaaagtagtgtgatttaaatggaatgagttgagaatctgaattcaccagttttaagttgcctgactgccgccacgtggggcatattgcttaaaacttctcttgagggtgattatatctaacccaggggacatttgggaatgtctagagacactgttgtttgtcagtattggggctgtgtgtttatgtgtgctactggcatgttgtaggtagaggcgggggatgctaatatctgcttgatgtcgtcacaatatacaggacagtattccgtccccttcttcctccctggtgggcccaattatttgtcccaaagtcagcagtgctgaggttgagaaaccctgggataatgcattctgaagtgctatacaagtgttagctaaggtgacattattagttgtagtcaaaactttatatggactataaaagtaaatttatggaatttatgttcaaggcacttaatgccggaataaaaaaaaaa

SEQ ID NO: 34583 - DNA, 370 bp, Homo sapiens
tccttaagatagattcaaactggaactgtgtcaaacagcatgggcatatttaaggctcctgatggataatggttccctgtgtagggaagcattcatctcattttactatcagtagcattgaatattttaaagtgccaatttaatacaaaatattgcgttggttcaatttacattcctttgaataataggtgacattgagccaatgtccacaatgtctatttgttacattatttttaatgtgcccagtactatattttaacttctttttagttatgcaaatgatagatgaatacatctcaaaaattttaacactatacagagccctctttgactgtctcctctctctttccctttccatccctataagtac

SEQ ID NO: 34584 - DNA, 397 bp, Homo sapiens
tccctcccagctattgaaggttcccagacctgcaggtgggccctggagttgagggtcccccacagtccgcccctccccggcttctgtccagcaaccctctttcttcactgagccctgtcccctgtccccagcacatgcttcactgagcgctgtcccctgtccccggcacacgggttccctgacttgctgtgtgttaccttctgaaggtaaatattttgtaccaccctggagtaggttgactcttgttttgtagaatcaggaagatttagcgataactggagactatctgatataaataaaattttactgtatacatgagaaatagaagtcccggtatttttaacctatagactgtatagtataactattttaatttagactgaagtgtttttagcac

SEQ ID NO: 34585 - DNA, 504 bp, Homo sapiens
ctagtatttgtttgtattagcttctttcaaaagaatttgtcaagaataacttgacctatatttagatttataaaatgtaacaatattttctatacttttactcaactgtatcatacatttttttaaatggtgattagtaactttgtactgttaaatactcatttggaattttttcatgagaggccagttcaaattacatgtatatatcaaaacaactacaatttaaggataaatgaaatacaattgtattaacttacaacaattactgaacatgtcagtacaacatgttactgaaaagttattaaggggagaatgatagggaccatgctattcacaaattattttcacgaaaataaatacttgaattaatcaatttaagtgtgtgacacttctgaatattttgttcatgtcattcatttgctatgcaaattcttcactgtgcagtgtactcctatttgtattctgataataatgagtgggttaataaagttttactgaaaaaaa

SEQ ID NO: 34586 - DNA, 698 bp, Homo sapiens
tcatttttcattaaccctaaagttctcactggcctctatgttccagtttcccttcatttgctgtgttctacaattatgaccaatgcctagccaaggtttttaatgctaactgctgtaacaaacatccccattatagtatgggctatgttcaaaatcagtgtatttctcggttctttcacagtctgttgcaggtagagtgggattcctaggcagcaagaccctaagcagtgattctagtcacaggctgcttccatcttctactggtttcatctggaaaacatgccctctgaaatggacactgaaaaagaagatagaaggcgtgtgcaaagttccacaggtcccataaccggccacagcacagaagtgatacttatcccttcctacttacattcccagaactcagtaacattcttggaagtctgggaaatgtcatcttcccagtgagcacaggaagagggaatgaaataggagttgatgaatacatagtattattgccacaactcaccctcctgtttgccacctatatttttccatttcttttatcatgcaagaaacacatttactccctctacaaagatgaaaatccaaagaaccaagcagtcattacaaccagcttacaagaccagaatttcctgataatacatgagtactccatctggtctagacatggctcttcttggtctgaggatctatgaaat

SEQ ID NO: 34587 - DNA, 678 bp, Homo sapiens
tcatttttcattaaccctaaagttctcactggcctctatgttccagtttcccttcatttgctgtgttctacaattatgaccaatgcctagccaaggtttttaatgctaactgctgtaacaaacatccccattatagtatgggctatgttcaaaatcagtgtatttctcggttctttcacagtctgttgcaggtagagtgggattcctaggcagcaagaccctaagcagtgattctagtcacaggctgcttccatcttctactggtttcatctggaaaacatgccctctgaaatggacactgaaaaagaagatagaaggcgtgtgcaaagttccacaggtcccataaccggccacagcacagaagtgatacttatcccttcctacttacattcccagaactcagtaacattcatcttcccagtgagcacaggaagagggaatgaaataggagttgatgaatacatagtattattgccacaactcaccctcctgtttgccacctatatttttccatttcttttatcatgcaagaaacacatttactccctctacaaagatgaaaatccaaagaaccaagcagtcattacaaccagcttacaagaccagaatttcctgataatacatgagtactccatctggtctagacatggctcttcttggtctgaggatctatgaaat

SEQ ID NO: 34588 - DNA, 454 bp, Homo sapiens
aaccccactgcctgccctgggtcatccttgatactcattcccttgtttctctcagtggcgggcatgacagcaacatgtcaaggccgcctaaccacagtcacagtgagagccaccagacgctggatccgggcagcaacttggggttcactgaagctttctccgtgcttttcctcacgctggcctccctatggccctgagaggtgcatgctcggcttgtttcatgggctgagtggttcagtgacttgctcgggatcacaaccaccgcacaggagcaccacacatggcctggactggttctcttccaactctaaaagcagcactcatttggttaacagtctttttcattttcaacacttctttcttttgaaggggggagcaaagcgtgatcggttgccttttataattctcgttttcaatttcaatctcttttaaaatgttgaaagagtcaaaaaaa

SEQ ID NO: 34589 - DNA, 1763 bp, Homo sapiens
catcaccagcacaccagaagctccctcctggtcctttccatcactactccctaccccaaaatgatcactatttaaacataataacctagattaattttgtctatttttattgtttagacactgtgcatttccatttatatactctcttatttctgacttttttttttcctctctggctttatttgtgagattcgtccatattgttaacatgagaatttttattttggcatagtattccatgtgaatatatgatcatttttaaattcattcttctattaatggtcattgagtagttcccaggtttaaactagtgctactgtgaacctttttgtatgtgtttggttaaacatatttctggtggatatatatgtaggaatggaattgctgggtcatagcaaatacctagatatttctgtagatattgccaaactttattccaaagtggttgtaccagtttattctccagccaggaatgtatgagaggtcccattgccccacatcctcatcaacccttgctaattttagtgtttttctttttatgattctaggggctatgtcctggtatctccttgtggttttaatttgtattttcttgataaagatgttaagatttttaatgtgtttattagccaattgtatatccattttgtgaagccacgtcaaatttcttgcatatttttctatggggttgtttctttttcttgctgatttgaaggaattatttacatacactggatacaagtcctttgttagagatgcagttggccctccttagctgagagttccacatctgcagattggaccaaccgtggctcacgcctataatcctagcactttggaaagctaagccaggcagatcacttgaggctaggagtttgagaccagcctggccaacatggcgaaacccagtctctactaaaaaatacaaaaactagctgggcatggtggcatgcacctgtagtcccagctactccagaggctgaggcatgagaatcgcttgaacccaggaggcggaggttgctctgggtgacagagtaagattccatctcaaaaaaaaaaaataaaggaaatactctggcccagtgaggtgctcatgcctgtaatcccagcactttgggaggctaaggtaggaatattgcttgaagccaggagtttaagaccagcctggtcaacattaacaaaaccctgcatattaaaaaaaaaaaagaaaaaaattaaccaggtgtggtgatgcatgtctgtaatgccagctactccacagcctgaggcagaagattgcttgagcccaggaatttgaggctgcagtgagctacaattccagcctgggtgacagagtgagaccatatctctaaataaataaataaatactcaaaaatattcaaaaaataatacaaataaaaaaactatacaggataacaactatttacatagtgttcacattgtattaggtattacaaataatctagagatgatttaaaatatgtgggagactgtgtgtatgttatatgcaaatactatgccattttatataagggacttgagcatccatggactgggtatttgccctagtcctgtgaccaattccccatgaataaagagacaactgtatatacctcatatatcttaccttgggctatatgtggcctctgcactcttttaatcgtgtctttcaatgaacagaagctccttattataatccaattaaaccttattcttttgtgattagtgctgttaaaaaaatatttgcctactctaaggtcaca

SEQ ID NO: 34590 - DNA, 1091 bp, Homo sapiens
catcaccagcacaccagaagctccctcctggtcctttccatcactactccctaccccaaaatgatcactatttaaacataataacctagattaattttgtctatttttattgtttagacactgtgcatttccatttatatactctcttatttctgacttttttttttcctctctggctttatttgtgagattcgtccatattgttaacatgagaatttttattttggcatagtattccatgtgaatatatgatcatttttaaattcattcttctattaatggtcattgagtagttcccaggtttaaactagtgctactgtgaacctttttgtatgtgtttggttaaacatatttctggtggatatatatgtaggaatggaattgctgggtcatagcaaatacctagatatttctgtagatattgccaaactttattccaaagtggttgtaccagtttattctccagccaggaatgtatgagaggtcccattgccccacatcctcatcaacccttgctaattttagtgtttttctttttatgattctaggggctatgtcctggtatctccttgtggttttaatttgtattttcttgataaagatgttaagatttttaatgtgtttattagccaattgtatatccattttgtgaagccacgtcaaatttcttgcatatttttctatggggttgtttctttttcttgctgatttgaaggaattatttacatacactggatacaagtcctttgttagagatgcagttggccctccttagctgagagttccacatctgcagattggaccaaccgtggctcacgcctataatcctagcactttggaaagctaagccaggcagatcacttgaggctaggatggtctcgatatctgacctcgtgattgccgctcatgctgtaatccaggattggaggtaaggttagatatgtgaagcagagtttagacagctggtaaataaaaaactgtttaaaaaaaggaaataccggggggggtgtggagcggatccagcggggaaagtggccgattggggggaaaccgggggggatttttatataccaaaaaaaaagggggggaaa

SEQ ID NO: 34591 - DNA, 657 bp, Homo sapiens
cgacgagatgggaactttctgaattaagcagcaattcccgcgctggttttctggggagtcctcgcctccagagctagttatgtatcaaatcccatttgcaagggttgtttgtcttgttcaaaggacaatgggtgtagccgatgtcaacagaagttgttcttcttccttcgaagagaagggatgcgccagtatggagagtgcctgcattcctgcccatccgggtactatggacaccgagccccagatatgaacagatgtgcaagatgcagaatagaaaactgtgattcttgctttagcaaagacttttgtaccaagtgcaaagtaggcttttatttgcatagaggccgttgctttgatgaatgtccagatggttttgcaccattagaagaaaccatggaatgtgtggaaggatgtgaagttggtcattggagcgaatggggaacttgtagcagaaataatcgcacatgtggatttaaatggggtctggaaaccagaacacggcaaattgttaaaaagccagtgaaagacacaataccgtgtccaaccattgctgaatccaggagatgcaagatgacaatgaggcattgtccaggagggaagagaacaccaaaggcgaaggagaagaggaacaagaaaaagaaaaggaagctgatagaa

SEQ ID NO: 34592 - DNA, 1256 bp, Homo sapiens
cggaaagtgcgcttgccacatcccttcggatcacttcgtcctcccgagagcgttctgccttctacagctcggaaagaaagaaatcttagctgtgaagtgaccgtggagaaagcgcaggaagcgacacaattggttagggaggcagagagtgtgagcgggcgcaccccttgcctggggaccgcgctcgcgggcggggacggagcatcccagtggctgcacccgccgctccgcgctcctgcctggcgtcgccaaccccgcggcggccgctggaattccagagctgccaggcgctcccagccggtctcggcaaacttttccccagcccacgtgctaaccaagcggctcgcttcccgagcccgggatggagcaccgcgcctagggaggccgcgccgcccgagacgtgcgcacggttcgtggcggagagatgctgatcgcgctgaactgaccggtgcggcccgggggtgagtggcgagtctccctctgagtcctccccagcagcgcggccggcgccggctctttgggcgaaccctccagttcctagactttgagaggcgtctctcccccgcccgaccgcccagatgcagtttcgccttttctcctttgccctcatcattctgaactgcatggattacagccactgccaaggcaaccgatggagacgcagtaagcgagctagttatgtatcaaatcccatttgcaagggttgtttgtcttgttcaaaggacaatgggtgtagccgatgtcaacagaagttgttcttcttccttcgaagagaagggatgcgccagtatggagagtgcctgcattcctgcccatccgggtactatggacaccgagccccagatatgaacagatgtgcaagatgcagaatagaaaactgtgattcttgctttagcaaagacttttgtaccaagtgcaaagtaggcttttatttgcatagaggccgttgctttgatgaatgtccagatggttttgcaccattagaagaaaccatggaatgtgtggaaggatgtgaagttggtcattggagcgaatggggaacttgtagcagaaataatcgcacatgtggatttaaatggggtctggaaaccagaacacggcaaattgttaaaaagccagtgaaagacacaataccgtgtccaaccattgctgaatccaggagatgcaagatgacaatgaggcattgtccaggagggaagagaacaccaaaggcgaaggagaagaggaacaagaaaaagaaaaggaagctgatagaa

SEQ ID NO: 34593 - DNA, 1340 bp, Homo sapiens
cggaaagtgcgcttgccacatcccttcggatcacttcgtcctcccgagagcgttctgccttctacagctcggaaagaaagaaatcttagctgtgaagtgaccgtggagaaagcgcaggaagcgacacaattggttagggaggcagagagtgtgagcgggcgcaccccttgcctggggaccgcgctcgcgggcggggacggagcatcccagtggctgcacccgccgctccgcgctcctgcctggcgtcgccaaccccgcggcggccgctggaattccagagctgccaggcgctcccagccggtctcggcaaacttttccccagcccacgtgctaaccaagcggctcgcttcccgagcccgggatggagcaccgcgcctagggaggccgcgccgcccgagacgtgcgcacggtaggcaacccacaccaaggcagccgcagctgcggcgcttgggtacaccgccgtggactccaaatggcctaagagcgttcttttagccctgcgctctcagtgcctttagagttctttcctttccccggagcgccggcacaacgcattatgccgctgggtcggagcttagggctcggcagaggttgctaattcactgattataatcaccttcctctccaactcgtccgcagctgcccgctctggattaagccgctccgcggctcgtgctaggcagttcgtggcggagagatgctgatcgcgctgaactgaccggtgcggcccgggggtgagtggcgagtctccctctgagtcctccccagcagcgcggccggcgccggctctttgggcgaaccctccagttcctagactttgagaggcgtctctcccccgcccgaccgcccagatgcagtttcgccttttctcctttgccctcatcattctgaactgcatggattacagccactgccaaggcaaccgatggagacgcagtaagcgaggatgcagaatagaaaactgtgattcttgctttagcaaagacttttgtaccaagtgcaaagtaggcttttatttgcatagaggccgttgctttgatgaatgtccagatggttttgcaccattagaagaaaccatggaatgtgtggaaggatgtgaagttggtcattggagcgaatggggaacttgtagcagaaataatcgcacatgtggatttaaatggggtctggaaaccagaacacggcaaattgttaaaaagccagtgaaagacacaataccgtgtccaaccattgctgaatccaggagatgcaagatgacaatgaggcattgtccaggagggaagagaacaccaaaggcgaaggagaagaggaacaagaaaaagaaaaggaagctgatagaa

SEQ ID NO: 34594 - DNA, 848 bp, Homo sapiens
  misc_feature (781)..(781): n is a, c, g, or t
ggagatagtgttgaagcaggttgctggcctggtggcatgattggagggaaagggcctgaatatttcctggattagtccagaatatttcctggattagtttagaaattcttcagtcccctctatcacttaggcttcctgtggattaactcgttttctctttgaaagtgtaaacatcccatgggcagggtccatcagagaacctcgacaagtgttgctctgtgtacaacctcccgggagggtgtctgtacaggtgaaatctggctgggataaatgtcaaggacatgtgtggggaaaggagagggaggaaagaaaccaacccttgctggtccttactgtgttcctgcactacacttagggctttttcatgagttaacaaagagctgctgcttatctccattttacagatgagaaaactgaggcccagaaagactcagtgatttgcccaagggtcacacagccagtgttggaaccagcatttacattcaggcctatgtgaactcaagttcagagcttttatttctccagcaggccaaggcacaaaaaattttaaaaacaacttgagtcccatcttcctgttggcatagtgtctggcagacatctttttgattcgttctgtccatctggaaacactgtggctgactctgtgttggcagctcccaggcccttggaggggaggttcaaaactcacatttttttttaacttaagagaattctggcagagtacacataaaagttgccattttaaccattttaaaatgttttatttatttaggagaccctntcttccaatatggcacgaagggaaaagacccataaagaatgtgctttttgactgggaccaccctccc

SEQ ID NO: 34595 - DNA, 493 bp, Homo sapiens
gaggcccagaaagactcagtgatttgcccaagggtcacacagccagtgttggaaccagcatttacattcaggcctatgtgaactcaagttcagagcttttatttctccagcaggccaaggcacaaaaaattttaaaaacaacttgagtcccatcttcctgttggcatagtgtctggcagacatctttttgattcgttctgtccatctggaaacactgtggctgactctgtgttggcagctcccaggcccttggaggggaggttcaaaactcacatttttttttaacttaagagaattctggcagagtacacataaaagttgccattttaaccattttaaaatgttttatttatttaggagacagtctcactctgtcacccaggctgcagtgtagtggtgcaatctcggctcactgcaacctctgcctcctgtgttcaagtgattctcctgtctcagcctcgcaagtagctgggattacaggtgtgtgccaaca

SEQ ID NO: 34596 - DNA, 936 bp, Homo sapiens
ttttgtcttatgcttccttgcactcgagtcacctacgttgtcttgctccgatatcgcccccgtgtctgctgtggaaaaatatgaattcaacctcattcccacccagcccttgcacaccggcattcaagatccatgcatgcagttgttgaaactgttttctttgggatcctatctttatgacaactggaatgattgtagatttatgacctcaaagagtagagcattccttttcctattttcccagctgctaaaatatgactgtctccattagaatttagaatccgtcttaagcttagagatggtaagagctgactggatgagtctaattctatgatttgtgagacatgcattaaaaccgtcagcagaacattctgatgatccacctacactcaaagaaaacacaattaacaccacagttaaaaccttctaatggagcccctgtcttagggatcaaggtattagaggtgctgcttcagggatggtgctacttcaaaagaactgaagttggagagacacctcccttcccaaatgcttctgcaggccactctggtgattcagaaaaccccaaccatatattcctttaccagcagcgcccacccttttccgtaactcagcttaccaaaatcagtgaaaattgagacagtgcttacccatgaaatatgtggtttttgaacaaaaaccccagaagttagttattcttataggaaactaaagatgccaccattgtaaatcataatactacagagacaaatgcacaggtctcccaaccacctcaaagtcaatacagcccatgttttctgagcacgtactgtgtgctgggcaccgtgctggacatgtgtgctgcctcatgacccgacaccaagcaagtcaccttgcccttggcaaggcaagtctcccctcatttctttcatttcagtaggacgttcatcttcaaag

SEQ ID NO: 34597 - DNA, 1692 bp, Homo sapiens
ttctaaagctactggagcacgggacacgtgtctgtacgctcctctcacaccccttactcggcagctgccccactcccgccgttgccgttgccctgagtcttccccactgttctgctgtgccagtgtgagcatctccccggcactcaagtccatgttctctccctcccgctcttcctcctgtctcttccatgctccctgttgcacgggacatcatgtgggcttgatgccgtacacagtccctgaccatggccccctactcttctccagaagtgtcacactagacaggagctgctgagtcaccaactcacctttccctagaatgtgggtttgttttttctcccccatcacttgcagaggtcttttttcaattatatgatcaagaatgagtctacaagaataccagcaccagacatagtgccaaatggccttttgtaagctgtttcgtgcccttgaggctcgcacttgtgctgggtgagcccaggaccgttagccttttcttttctaggtctggacactccggggttggttaggctagccactggggagaatacagctctggccttttttcatattttgctgcttctctttgtacagatctttccccctccacataccaaaaggaatcctaacctagttgaaatgctagttgcaattcagtttcatgagaatgctgaagtaggctgctgatttaaaattttcctcttccctgaaaatacacacacctagagaatttagggaaaggctcttagggcttgggaatcttatcttttcattccccacaaaatacctacaaagaaatgtctagtattccctcagtattcctcctcgtataggctctgaaagcaacctcattcccacccagcccttgcacaccggcattcaagatccatgcatgcagttgttgaaactgttttctttgggatcctatctttatgacaactggaatgattgtagatttatgacctcaaagagtagagcattccttttcctattttcccagctgctaaaatatgactgtctccattagaatttagaatccgtcttaagcttagagatggtaagagctgactggatgagtctaattctatgatttgtgagacatgcattaaaaccgtcagcagaacattctgatgatccacctacactcaaagaaaacacaattaacaccacagttaaaaccttctaatggagcccctgtcttagggatcaaggtattagaggtgctgcttcagggatggtgctacttcaaaagaactgaagttggagagacacctcccttcccaaatgcttctgcaggccactctggtgattcagaaaaccccaaccatatattcctttaccagcagcgcccacccttttccgtaactcagcttaccaaaatcagtgaaaattgagacagtgcttacccatgaaatatgtggtttttgaacaaaaaccccagaagttagttattcttataggaaactaaagatgccaccattgtaaatcataatactacagagacaaatgcacaggtctcccaaccacctcaaagtcaatacagcccatgttttctgagcacgtactgtgtgctgggcaccgtgctggacatgtgtgctgcctcatgacccgacaccaagcaagtcaccttgcccttggcaaggcaagtctcccctcatttctttcatttcagtaggacgttcatcttcaaag

SEQ ID NO: 34598 - DNA, 1329 bp, Homo sapiens
cttaaccttagaagttgtggagggggaaagatctgtacaaagagaagcagcaaaatatgaaaaaaggccagagctgtttcgtgcccttgaggctcgcacttgtgctgggtgagcccaggaccgttagccttttcttttctaggtctggacactccggggttggttaggctagccactggggagaatacagctctggccttttttcatattttgctgcttctctttgtacagatctttccccctccacataccaaaaggaatcctaacctagttgaaatgctagttgcaattcagtttcatgagaatgctgaagtaggctgctgatttaaaattttcctcttccctgaaaatacacacacctagagaatttagggaaaggctcttagggcttgggaatcttatcttttcattccccacaaaatacctacaaagaaatgtctagtattccctcagtattcctcctcgtataggctctgaaagcaacctcattcccacccagcccttgcacaccggcattcaagatccatgcatgcagttgttgaaactgttttctttgggatcctatctttatgacaactggaatgattgtagatttatgacctcaaagagtagagcattccttttcctattttcccagctgctaaaatatgactgtctccattagaatttagaatccgtcttaagcttagagatggtaagagctgactggatgagtctaattctatgatttgtgagacatgcattaaaaccgtcagcagaacattctgatgatccacctacactcaaagaaaacacaattaacaccacagttaaaaccttctaatggagcccctgtcttagggatcaaggtattagaggtgctgcttcagggatggtgctacttcaaaagaactgaagttggagagacacctcccttcccaaatgcttctgcaggccactctggtgattcagaaaaccccaaccatatattcctttaccagcagcgcccacccttttccgtaactcagcttaccaaaatcagtgaaaattgagacagtgcttacccatgaaatatgtggtttttgaacaaaaaccccagaagttagttattcttataggaaactaaagatgccaccattgtaaatcataatactacagagacaaatgcacaggtctcccaaccacctcaaagtcaatacagcccatgttttctgagcacgtactgtgtgctgggcaccgtgctggacatgtgtgctgcctcatgacccgacaccaagcaagtcaccttgcccttggcaaggcaagtctcccctcatttctttcatttcagtaggacgttcatcttcaaag

SEQ ID NO: 34599 - DNA, 1255 bp, Homo sapiens
tgttaaacaagtgcttgaaggcagtatgcttggtaaaagtcatcgccattctctaatcttgagtacccagggacacgatacactgcggaaggctgcagggacctctgcccaggaaagccagatgatgcatatcataaattattactcaccccatgttcccaccctcgagagacctccaaacaatcaccatgccacagtgaacattcagtaacaaaaattcagccagggttttcaccagcatgaatggcagtgattccaattaggaaaacagaaagaggagagttcagagccacctagaatggctcttgcaagatacgaaatcaaggcagcagcaacagggctgaacattcctcatccctaactctcccttcaccagtaggaaacccaggataactgcaatcaccgcaggcccatctggcctgaagttctactactagtagccctccatgggaccttcttaaggaagcatgtcaactcaggtaagggatgtaaggggatggatgaccctttgaggccaaagttggagcaaaaaacaccagatgttcctgtgcactgctcctaagagatggttctgaagaccagtttggggagaggtcaaaatactggacagaatctcagcaacatggaacctcaaactaagtgacagtcacagacaactcttccccaaagaaaataagcacagacatggtttgtggtaagcagaattataaagatgaattcccatctccctgtcagattaccagtatggtaaattaccagattacctggttatttattcaaacactaatacagttattgccttgatggaaacatacagatacaattaaaatcccaagtaccaaataaattgaccttaagacaaagactaagtaaatcacatgagccctctacaagcagagagtttttctccagctggtagcagaagccagagatttgaagcataggaagtattcaacacattattgctggcctgaaaatggaaggggccacataacgagggaaaccggtggcctctagaagcagggagcagtcccctgctgacagacagcaagccaagacctcagttctacaattgcaagacactcaattctgctaaggacaaaaatgagcttggaagtgaactctgagcttcaggtgagaacacggccaaacaacaccttgatttcagcttaaacaaagaatgcagccactccatgccagaattctgacctgtagaaatttgagctaataaatagatgttttaatagcttcatcg

SEQ ID NO: 34600 - DNA, 1463 bp, Homo sapiens
tgttaaacaagtgcttgaaggcagtatgcttggtaaaagtcatcgccattctctaatcttgagtacccagggacacgatacactgcggaaggctgcagggacctctgcccaggaaagccagaacaagccctgtgaaaaacaagctgctgtccctgctagaggcatcctgcaatccatggatgtttatcaccaagccattgttaacatgaggatccagtatctgccggaggagccccaccttctgctactattatgttcttcagatgagtagaagagagtggggagggagagagcaggaagaagaaaggaagaataatgtcttgaaattgatgatgcatatcataaattattactcaccccatgttcccaccctcgagagacctccaaacaatcaccatgccacagtgaacattcagtaacaaaaattcagccagggttttcaccagcatgaatggcagtgattccaattaggaaaacagaaagaggagagttcagagccacctagaatggctcttgcaagatacgaaatcaaggcagcagcaacagggctgaacattcctcatccctaactctcccttcaccagtaggaaacccaggataactgcaatcaccgcaggcccatctggcctgaagttctactactagtagccctccatgggaccttcttaaggaagcatgtcaactcaggtaagggatgtaaggggatggatgaccctttgaggccaaagttggagcaaaaaacaccagatgttcctgtgcactgctcctaagagatggttctgaagaccagtttggggagaggtcaaaatactggacagaatctcagcaacatggaacctcaaactaagtgacagtcacagacaactcttccccaaagaaaataagcacagacatggtttgtggtaagcagaattataaagatgaattcccatctccctgtcagattaccagtatggtaaattaccagattacctggttatttattcaaacactaatacagttattgccttgatggaaacatacagatacaattaaaatcccaagtaccaaataaattgaccttaagacaaagactaagtaaatcacatgagccctctacaagcagagagtttttctccagctggtagcagaagccagagatttgaagcataggaagtattcaacacattattgctggcctgaaaatggaaggggccacataacgagggaaaccggtggcctctagaagcagggagcagtcccctgctgacagacagcaagccaagacctcagttctacaattgcaagacactcaattctgctaaggacaaaaatgagcttggaagtgaactctgagcttcaggtgagaacacggccaaacaacaccttgatttcagcttaaacaaagaatgcagccactccatgccagaattctgacctgtagaaatttgagctaataaatagatgttttaatagcttcatcg

SEQ ID NO: 34601 - DNA, 618 bp, Homo sapiens
tcgccattctctaatcttgagtacccagggacacgatacactgcggaaggctgcagggacctctgcccaggaaagccaggtggtttccaaaaggaaaagctttgggagatagaagtcctcgttttgacctctgccctccttgtacaccaggagccagaaaaacttcatctcttttacaagaaacattgagattcctgtaaaattaagaaatcacacaatttgatggtctacattatctaaagcaaatgagacttctatttggaacaaagactaccttgttgggaaatgagtctgcaagttaaagtgttttctgggatcactctaagctccagtgtcaaggggtcaagtccttcaggaattctctgcctccactccctgtggcagagctagagtggctgccatgcttctgagctcagccagcatccagagagagagtgagatacagcctcctcttcttgaagcacccacttctaaactctgtgacagttttcttggaactctgttatgtggatctggagatgacaatgtcacagcactcccctctaagcctaaattcccccacaccgatgaactattagggtggtctgctgctgatcaaatgaaagtattccccagcta

SEQ ID NO: 34602 - DNA, 1021 bp, Homo sapiens
gggatctgtaactttctcctaaccaatacaatgtgacaaaggtgatggggtatcccttctgtaattaagtcctgttgtatggtaaagatgaaggaattttgaagatgtaattaaagcccctaacaattggatttaaataatcaaaagataaattaccctgggtggggcttacctaatcaggagagcccttaaaatgagtttagaagtcaggtacttaaagcagcagaaactctttctcttcattgctgatttttttttttacttttaatttaagttcaggggtatatatgcaggggtgtgatataggtgcctagtatcttttagttatttttcctgaccctctccctcctcccattctccatcctccagaaggcctcagtgtctgttgttcccctctatgtgtccatgtgttctcatcatttggctcccacttgcaagtgagaacatgcagtattggttctctgttcctgtgttagttttctaaggataatggtctccagcttcgtcaatgttcctgcaaaggacatgatgctgactttgaagatgcaagcttccacatctacagcctcaaggaaacaaattcagccaaccaactgagggagctttccttgtcctgcctcaagatgagatcacagtctgcccaacaccatgatttagaccttgtgacacctggtatggaagacccagttaagttctctccaaactcttgacccacagaacctgtgagaaaatatatggatattattttaaactgctaaatttgtagtaatttgttatgcagcaataaaaaaactaatgcaaggagatatcaattattgtaaaaagcttagcttttgttttaaaatatagttcaccagtagtaagttactaataagtaactaaacaaataaaagcaagccatttacaaatcaataataagagtaagtcatgaactaaagattgtaattaatcaatttctgtacgcctgtaatgaaaataaaggaggaaaagaaaatgaaagaaaagagaccagggacccgct

SEQ ID NO: 34603 - DNA, 860 bp, Homo sapiens
tgttaaacaagtgcttgaaggcagtatgcttggtaaaagtcatcgccattctctaatcttgagtacccagggacacgatacactgcggaaggctgcagggacctctgcccaggaaagccaggcttgcatgaaggaaatgatttcctatgattctgcttactgcttaaaaaaattaatcaagttttctgcctgacaagatccagtatctgccggaggagccccaccttctgctactattatgttcttcagatgagtagaagagagtggggagggagagagcaggaagaagaaaggaagaataatgtcttgaaattgttttctaaggataatggtctccagcttcgtcaatgttcctgcaaaggacatgatgctgactttgaagatgcaagcttccacatctacagcctcaaggaaacaaattcagccaaccaactgagggagctttccttgtcctgcctcaagatgagatcacagtctgcccaacaccatgatttagaccttgtgacacctggtatggaagacccagttaagttctctccaaactcttgacccacagaacctgtgagaaaatatatggatattattttaaactgctaaatttgtagtaatttgttatgcagcaataaaaaaactaatgcaaggagatatcaattattgtaaaaagcttagcttttgttttaaaatatagttcaccagtagtaagttactaataagtaactaaacaaataaaagcaagccatttacaaatcaataataagagtaagtcatgaactaaagattgtaattaatcaatttctgtacgcctgtaatgaaaataaaggaggaaaagaaaatgaaagaaaagagaccagggacccgct

SEQ ID NO: 34604 - DNA, 850 bp, Homo sapiens
tgttaaacaagtgcttgaaggcagtatgcttggtaaaagtcatcgccattctctaatcttgagtacccagggacacgatacactgcggaaggctgcagggacctctgcccaggaaagccagttttctaaggataatggtctccagcttcgtcaatgttcctgcaaaggacatgatgctgactttgaagatgcaagcttccacatctacagcctcaaggaaacaaattcagccaaccaactgagggagctttccttgtcctgcctcaagatgagatcacagtctgcccaacaccatgatttagaccttgtgacacctgagctcagatggaaaagaatggtgttactgagacccttcaagattcccagtgtaattcaataaagaaaaggcaacacaaaggggttgtatagaattcgccacattatggacccatgtcatagagagaatccacggtgcatttgttagctgcatttaaatgacaacactttcagatccaagatttatttgggataaaaatttacctggatgcaaggctattcagaatgaagattaatgatatggtttggctgtgtccccacccaaacttcatcttgaattcccacgtgttgtgagagggacctggtgggagataattgaaccatgggggcaggtctttctcatgctgttctcatgagagtgaataagtctcatgaaacctgatggttttataagggggaatttccctgcacaagctctctctctgccttttgccatccatgtaagacgtgacttggtcctccttgccttctaccatgattatgaggcctccccagccacgtggaactgtgagtccattaaacctctttcttttgt

SEQ ID NO: 34605 - DNA, 806 bp, Homo sapiens
tgttaaacaagtgcttgaaggcagtatgcttggtaaaagtcatcgccattctctaatcttgagtacccagggacacgatacactgcggaaggctgcagggacctctgcccaggaaagccaggcttgcatgaaggaaatgatttcctatgattctgcttactgcttaaaaaaattaatcaagttttctgcctgacaaggatcactctaagctccagtgtcaaggggtcaagtccttcaggaattctctgcctccactccctgtggcagagctagagtggctgccatgcttctgagctcagccagcatccagagagagagtgagatacagcctcctcttcttgaagcacccacttctaaactctgtgacagttttcttggaactctgttatgtggatctggagatgacaatgtcacagcactcccctctaagcctaaattcccccacaccgatgaactattagggataaaaatttacctggatgcaaggctattcagaatgaagattaatgatatggtttggctgtgtccccacccaaacttcatcttgaattcccacgtgttgtgagagggacctggtgggagataattgaaccatgggggcaggtctttctcatgctgttctcatgagagtgaataagtctcatgaaacctgatggttttataagggggaatttccctgcacaagctctctctctgccttttgccatccatgtaagacgtgacttggtcctccttgccttctaccatgattatgaggcctccccagccacgtggaactgtgagtccattaaacctctttcttttgt

SEQ ID NO: 34606 - DNA, 388 bp, Homo sapiens
gcccaaatgaacttcattaatgagaaaaaaagataactaatataagacaataccacttctctttattcaaataattggcagtcaattttacttggacaataactatggcctcaaatgtgatttcaggctcaacaaagcagtgcaatttaaggtctatcatgccttgttgtcatgcttcacgcagcctggaataagtaattcaataccccttacaggatcaccagctattaaaccaggataagagcttagaggcagaattacacattctatgatatattattattatataatgtattatttgtattctattattacatgtatacttcagtggcctgagttaatatttttccaccagccactaattccatactcaagagttattcatgaa

SEQ ID NO: 34607 - DNA, 748 bp, Homo sapiens
tcgccattctctaatcttgagtacccagggacacgatacactgcggaaggctgcagggacctctgcccaggaaagccaggtggtttccaaaaggaaaagctttgggagatagaagtcctcgttttgacctctgccctccttgtacaccaggagccagaaaaacttcatctcttttacaagaaacattgagattcctgtaaaattaagaaatcacacaatttgatggtctacattatctaaagcaaatgagacttctatttggaacaaagactaccttgttgggaaatgagtctgcaagttaaagtgttttctgggatcactctaagctccagtgtcaaggggtcaagtccttcaggaattctctgcctccactccctgtggcagagctagagtggctgccatgcttctgagctcagccagcatccagagagagagtgagatacagcctcctcttcttgaagcacccacttctaaactctgtgacagttttcttggaactctgttatgtggatctggagatgacaatgtcacagcactcccctctaagcctaaattcccccacaccgatgaactattaggtgagtttccttcaaatgtcatgtcttcactttatataggatagttaggatgtggtgggcggtagtgatagtcagagtttcttgtaaagccccaaagctgaagagagcaggcaagttcacccatatttttacaacagtgtcaggaagctggcagaggtgccctgtcgagc

SEQ ID NO: 34608 - DNA, 923 bp, Homo sapiens
tcgccattctctaatcttgagtacccagggacacgatacactgcggaaggctgcagggacctctgcccaggaaagccaggtggtttccaaaaggaaaagctttgggagatagaagtcctcgttttgacctctgccctccttgtacaccaggagccagaaaaacttcatctcttttacaagaaacattgagattcctgtaaaattaagaaatcacacaatttgatggtctacattatctaaagcaaatgagacttctatttggaacaaagactaccttgttgggaaatgagtctgcaagttaaagtgttttctgggatcactctaagctccagtgtcaaggggtcaagtccttcaggaattctctgcctccactccctgtggcagagctagagtggctgccatgcttctgagctcagccagcatccagagagagagtgagatacagcctcctcttcttgaagcacccacttctaaactctgtgacagttttcttggaactctgttatgtggatctggagatgacaatgtcacagcactcccctctaagcctaaattcccccacaccgatgaactattagggataaaaatttacctggatgcaaggctattcagaatgaagattaatgatatggtttggctgtgtccccacccaaacttcatcttgaattcccacgtgttgtgagagggacctggtgggagataattgaaccatgggggcaggtctttctcatgctgttctcatgagagtgaataagtctcatgaaacctgatggttttataagggggaatttccctgcacaagctctctctctgccttttgccatccatgtaagacgtgacttggtcctccttgccttctaccatgattatgaggcctccccagccacgtggaactgtgagtccattaaacctctttcttttgt

SEQ ID NO: 34609 - DNA, 1205 bp, Homo sapiens
gggatctgtaactttctcctaaccaatacaatgtgacaaaggtgatggggtatcccttctgtaattaagtcctgttgtatggtaaagatgaaggaattttgaagatgtaattaaagcccctaacaattggatttaaataatcaaaagataaattaccctgggtggggcttacctaatcaggagagcccttaaaatgagtttagaagtcaggtacttaaagcagcagaaactctttctcttcattgctgatttttttttttacttttaatttaagttcaggggtatatatgcaggggtgtgatataggtgcctagtatcttttagttatttttcctgaccctctccctcctcccattctccatcctccagaaggcctcagtgtctgttgttcccctctatgtgtccatgtgttctcatcatttggctcccacttgcaagtgagaacatgcagtattggttctctgttcctgtgttagttttctaaggataatggtctccagcttcgtcaatgttcctgcaaaggacatgatgctgactttgaagatgcaagcttccacatctacagcctcaaggaaacaaattcagccaaccaactgagggagctttccttgtcctgcctcaagatgagatcacagtctgcccaacaccatgatttagaccttgtgacacctgagctcagatggaaaagaatggtgttactgagacccttcaagattcccagtgtaattcaataaagaaaaggcaacacaaaggggttgtatagaattcgccacattatggacccatgtcatagagagaatccacggtgcatttgttagctgcatttaaatgacaacactttcagatccaagatttatttgggataaaaatttacctggatgcaaggctattcagaatgaagattaatgatatggtttggctgtgtccccacccaaacttcatcttgaattcccacgtgttgtgagagggacctggtgggagataattgaaccatgggggcaggtctttctcatgctgttctcatgagagtgaataagtctcatgaaacctgatggttttataagggggaatttccctgcacaagctctctctctgccttttgccatccatgtaagacgtgacttggtcctccttgccttctaccatgattatgaggcctccccagccacgtggaactgtgagtccattaaacctctttcttttgt

SEQ ID NO: 34610 - DNA, 865 bp, Homo sapiens
tgttaaacaagtgcttgaaggcagtatgcttggtaaaagtcatcgccattctctaatcttgagtacccagggacacgatacactgcggaaggctgcagggacctctgcccaggaaagccaggcttgcatgaaggaaatgatttcctatgattctgcttactgcttaaaaaaattaatcaagttttctgcctgacaagtggtttccaaaaggaaaagctttgggagatagaagtcctcgttttgacctctgccctccttgtacaccaggagccagaaaaacttcatctcttttacaagaaacattgagattcctgtaaaattaagaaatcacacaatttgatggtctacattatctaaagcaaatgagacttctatttggaacaaagactaccttgttgggaaatgagtctgcaagttaaagtgttttctgggatcactctaagctccagtgtcaaggggtcaagtccttcaggaattctctgcctccactccctgtggcagagctagagtggctgccatgcttctgagctcagccagcatccagagagagagtgagatacagcctcctcttcttgaagcacccacttctaaactctgtgacagttttcttggaactctgttatgtggatctggagatgacaatgtcacagcactcccctctaagcctaaattcccccacaccgatgaactattaggtgagtttccttcaaatgtcatgtcttcactttatataggatagttaggatgtggtgggcggtagtgatagtcagagtttcttgtaaagccccaaagctgaagagagcaggcaagttcacccatatttttacaacagtgtcaggaagctggcagaggtgccctgtcgagc

SEQ ID NO: 34611 - DNA, 743 bp, Homo sapiens
tcgccattctctaatcttgagtacccagggacacgatacactgcggaaggctgcagggacctctgcccaggaaagccaggatccagtatctgccggaggagccccaccttctgctactattatgttcttcagatgagtagaagagagtggggagggagagagcaggaagaagaaaggaagaataatgtcttgaaattgttttctaaggataatggtctccagcttcgtcaatgttcctgcaaaggacatgatgctgactttgaagatgcaagcttccacatctacagcctcaaggaaacaaattcagccaaccaactgagggagctttccttgtcctgcctcaagatgagatcacagtctgcccaacaccatgatttagaccttgtgacacctggtatggaagacccagttaagttctctccaaactcttgacccacagaacctgtgagaaaatatatggatattattttaaactgctaaatttgtagtaatttgttatgcagcaataaaaaaactaatgcaaggagatatcaattattgtaaaaagcttagcttttgttttaaaatatagttcaccagtagtaagttactaataagtaactaaacaaataaaagcaagccatttacaaatcaataataagagtaagtcatgaactaaagattgtaattaatcaatttctgtacgcctgtaatgaaaataaaggaggaaaagaaaatgaaagaaaagagaccagggacccgct

SEQ ID NO: 34612 - DNA, 687 bp, Homo sapiens
cataaaattccagctccaagacagataaaaatggtgtttctctttctcaggatgggtaattttattgtcattgtcatctctcgcttttttaggatccagtatctgccggaggagccccaccttctgctactattatgttcttcagatgagtagaagagagtggggagggagagagcaggaagaagaaaggaagaataatgtcttgaaattggtaaaagcgtttttgtttgcacatcctgcattattaatatttcttgtttagcataattagctaccctctcaagcttacacacaacctgcagtgtttatgccttccgatgatagctaaaccatcagcaaagcagtccaggtccctgaaggctgaatgcaggtggttctgaaggctgcaggatgcattcaaaaagcaggatacataagctttaattgttgctaaaaatacattcactagaagaatcggactccttctatctgtctggagtggataaaagccaactatggattcagtagtctaaagaaagtcgcagaagaacaaagaaaaggtagacaaatgggcccaaatgaacttcattaatgagaaaaaaagataactaatataagacaataccacttctctttattcaaataattggcagtcaattttacttggacaataactatggcctcaaatgtgatttcaggctcaacaaa

SEQ ID NO: 34613 - DNA, 597 bp, Homo sapiens
  misc_feature (160)..(160): n is a, c, g, or t
aggccgggccttggctggctgtggaagggttaaaacgcacacccagaggcagagagcagactccagagacccccctgggctaaagtgcatctccccctcagcctctgccttggttttgctgttgctccaatggttagttatacccagttaacgaagtgtntcagattcctttttctttgcttaaagcacagacttttctgtgaaatctgcttcccccattttcttgtttataaatttttaattctaataccagaggccacccgtgttcatggaaacagcggtgacctggtttccaggtgcccctctgcgcctgcccagtgagtgactgtgggtgagtcctggaacacacctcccctaaccccaatctcgtgttccgatgggtaaagagaagtggtggcacgtggcaactcctggaggcttggaaatggggtcctagaatattaatccaaagtggctgcagggtgcgccaagtccagccatcacacttaacggaggagaggccctggagagattgaatggcctgtaagctgtgatgttgaagggagaccctcaaacctggtgtatcgtagtttggatttctgaatataaagagcattt

SEQ ID NO: 34614 - DNA, 459 bp, Homo sapiens
tttttttttaatagatggagttgtccaggctggagggcagtggcatgatcttggcttactgcaacctccgcctcctgggttcaagtgattctcctgtctcaaaaaataataataataataatatcatccataatattagttgatagtctcttcataattctaaatccagcatttttcaaagcattaccaatgaaggagaacttttaagatgaagctaaatataaaaaaaaagtgaattactgcaaattactatacatagtataatttgaaattttggtaatattgtctaagacaaatcatccttttgggatagtttttttccatactgttcaaactacccttcatcctataacggcagacatggcctaatgattctcatttttaatcaacagtgttgtcagacatttcaatgattctgaacataatgttatgacattcagggccagagagcaagcattc

SEQ ID NO: 34615 - DNA, 497 bp, Homo sapiens
tatttgaagactgttaagactgattttcccatttgtttgttaacaaataacattttctatttgtaatgggcctgtggatgacttttgcccctttatatgttgggattgtttctgattatcatatgcttgcacaagcttctcatatattaatcatgtattgaacctttctcttcctctgaatatacttaaggcagcaagtgacattcatctcccatacctacaaaattttatacttggatatgctttaatttctcattttctgcatgggtcctttacattgtcatttttcttcaggtctgttctataaaatgtattcagacttttattcagagatatctccttattctggggctttttgcattaagaaacagtataatgtcatctaactcttaagaactacattgtattaatgtgcagattgaatagctgttaactcttaggttttacattggggtagtagatcagaagttcttaagaaataattgcttctatttaaa

SEQ ID NO: 34616 - DNA, 1881 bp, Homo sapiens
tgcaggaatggatgttcaacatagaaagggattgtgactgtacccctcatccaagcttgaacctaggggacatgcattctctgtggatgcagttaccctgaagtattccagaaaggctgtctacaggtgcatccatgctgagctcccatgggggaagcctcagctatgtcgatagtggatgaagaggagaagaaatcaccttctccaagacccttcatgggcaccagggctgactggctgttggggtagagccacagacgttttctgctgagccaagcattgcaactgtgcctctgctaaaagaaacttcccagaaatgggaagttctgggacttaaggcctgccatcttgtgttttttgtttcatggagtgctcccttgatgtcatgtacttcttcttcccttaggagtagaaatccctgaagtccagactactgtgaatgcaactcttatctgggtctagctgcctagtggggctgccacactccagggtggtgctgggggatgtctccaaggaatccagtgatgtgacctgtcctcaagtatcccagcagtgggtaccagcaccagttctgatggggatggcaggggagtgctgtgagattccttggtcatgaaaagccttagtgtgttggttttctcaagtactggttgtagtagtagatgaactggtcacatggacagactcaggatctcttggttagccagggtgttgcaggcaatagtgattgctgaggtcacacatgacttttctccttcctgcatgttgtcttcttctgcctgaagatgctaatctcctatgtcagttggcctccaaccagaaggtggtgcttgcaaaagagtaccagctgtggtggtggtaggatttatgctttgccttatgtacccaggggaagtactctggtgtctcaggcaattggtggggctatagagctccgaaaagtttctgttctttttattaagctaccagggtaggattgaggggcaaagccaggtgagggctgggtcaggcaagtctgtgctctagctctccatatgtgggcaaaagtagaggtcccagtggggatcagaaggcagttttctgactgctggggtatattgaaggaaaaagcacagctgcttctgctgcaccaaagagtctgcatggagaatggggagtagcaggtagcagcaagccctacgcagctttcatgcacttggcaaggcaaatctcatagccacagtgtaccactagcagcagctagctgggtttcagacagttgacactcagaactcaaaactgccccaggccattagcctttgcatggccttcaggccacatttctcttggtctccctacacagcaggggcacccctgtgctctcttatggctgcagcacacttcccacttgcccctcagttctggccaagggagcttgttcccactcatatcgtgaatctcagttgagcttctctcaacctgtgattgctgtctgagttagctggctgacttccacaaggtcccctgtgaggtaggatcagcagtggcttccctctgtccttgctggagactgggagtgcactgaaagcatgtccagtgctactccttctcatatactccccacggctcactgaatcagctttagtgctgggtagggttgagggcttcccttgtggcctggattgccaggttccccagtaggagtgcatatcctagaggtagtttatcctcctctcacactctagggacttagagttttccatctgcctcgtagtaagtttctgggttttttcctgaaaaaaaaattcacagtgtgaatctctccacactattttgtctttccaagtggtagaggcatgctcacagtgcctccaatccactctcttggggattaaaaaaaaa

SEQ ID NO: 34617 - DNA, 148 bp, Homo sapiens
acatatttgactgctggggaagtgtgaggctttgtctacgccacctgtttctggtggcgctgaaaacgggggccatgctggggaccctccctggttttggcttgttttgggttaggggctgaaatgcatattcatcaagctctgtatt

SEQ ID NO: 34618 - DNA, 707 bp, Homo sapiens
cagactttctggaaagagcaaattcttatattttacgaactctcagggaatacaaaaagagagaaagctctccaactgtttttatgagactagtagatcttcactacaagtgagcaaacacatagaaaggtagtatgagaagaaattatagatctgtctcaggaatacagaagctaaaattttcaacatcgtaggtaaaataaagggggagaaatacatcatgaccaagtagggtgtattcccagaaatttatcggaaaatctatcattgcagtgtacacgtgaaatgattgtagaagaacagcattatattcattttggattcagagaggtatttgagaaatttgaccactcaataacttagtaaagggctatttatcaaacctttggcaaacatagttaagggtgaatatttagcagccttaccattaatggtgggaacattctggggcagacccatgctcagtaattcagaaatgaggcataagaactggaaagaaagcaacgagactgattcaattgtctgtataaagaaaccagagaatgtacaacagattgttagacctaataagagttcaacaatttgaaagttgttcaaacaaaatcaacatactaagataattgtttttctatgccccagtgataaccagttgaagaatgcagtggtggaaaaaagattgatcctattcacaagagtaaaaaaaaaga

SEQ ID NO: 34619 - DNA, 317 bp, Homo sapiens
tttttttttttggagacagagtctcactctgtagcccaggctggtctcaaactcctggcctcaaatgatctgcccgcctcagcctcccaaagtgctgggattacaggcgtgagccatcgcacccaccaagaagtttaatttttaaaaaatcaaagagaaacatcagtaagcaattactatttagaaaatcatgttagccaagtgcgctggctcatgcctgtaatgccagcactttgggaggctgaggcagaagtgcttgagacgaggagtttgagaccagcctgggcatcacggtgaaaccccatctctattaaaaa

SEQ ID NO: 34620 - DNA, 234 bp, Homo sapiens
gtaatacaagccaggaatcagtggataaatgacacaccttctcattgtttggagggattgttgtaagacacattctacatagtgcttcttagggttaccagggattgagtcccagttgctgaaaatgggaatgaactcaacaaaatactctttattgacttttcctccgtccctctcactttctcatttcttcttcctgggaccactttctaaataagccacctgctactagga

SEQ ID NO: 34621 - DNA, 870 bp, Homo sapiens
atctaaatccatgtatatggattgtaaaactcaacatagtaaagataccagttatcctcacatagataaagaagtctaacaattcctatcataatcccagccaagattttttggagacaaagaaaagattattctaaaatttatatggaaaggtaagggaatcagatagctaagattttgaaaaataagaataaagggaggactgaatctacccaattgtaagacttactgtagttacggtaatcaagattgtgtagtattggtggaaggaaagagatagatacctaaatcaatagaataagatagagaactcagaaataaagccacgcaaatatgtccaacttattcctttgtttttgacacaggagattctataacttttaattaatcaactgaactgaatgggtacacatttattaaagcattttaaaagactagaacaataatcatgtcataatctacaaatatgaatgttgtttttagaatggctgctccatatccctttatttggatatattataatctaactagtactgtattattggatatttgttttctctgatttttgtaaatgttcatgttctctgcaatcaacatcctctatatatacatgtttaacgactttttaaaaatcaattctttagggaaaataatcttatagggggatttactaggtcaagggcaatgtacaatttaaaagttttttttatatgtgttgctaaattgccttccagacttgttgaacagatttaaattctcatcagcagtgtctgagattgtcatgggaaaacttttcaatgaagtaaccccaattgatctatagcactttcggttgctgagaatgtctaataaaagcaaaagaacaaatga

SEQ ID NO: 34622 - DNA, 389 bp, Homo sapiens
tcttttatcatcagtttatatactgctggtaggaaaaaaatgtaccatatttctgtgaataattttgacaaaatgccaagcatcttaaaattttttatgttctttgattttggtatttcaactttgggttgtttgccttagatttacaggcaaattttgtgaacaaagacgtttgttgtttacctctttatgctccatactttgaacagttgctgggacatggtggtcagtaaatagttgttgaactaaaaaacaattagaaataaatttgatattccacaagagggaaatgatacgtatacatgatggaatatagtacagctattacaggcgacattttaaaagaatttttaatgagattgggacattttggagaatgatcttttatc

SEQ ID NO: 34623 - DNA, 164 bp, Homo sapiens
ctggcttgccaggaaacggccaatggccgaaccttgggtacacctatgagaacatgtctgtcatacttatgaatgtcaaccaattttgtgtgtcttgcaaaaacggtcaaaaactagtgctttaaaaagcctatctatcttttacacagatctgttgatggtgt

SEQ ID NO: 34624 - DNA, 518 bp, Homo sapiens
gaaacagagaaagctgagtttaatcctagccaaaccatttagtaggattaacttttgcttaagtaggcagcgtaactttggagatgacaatacttagctgaggtagatgatatttcaaaataagtaaacacccttcccaattcctttacttacaggatttactataggatgctacaggcactaaacactcccttttccagatgcctttgtagggagagatggctatgcaaacagagctggccaataaactataaataggctgggtgtggtggctcacacctgtaatcccagcactttggtaggctgaggagggcagatcacgaggccaagagatcgagactatcctgaccaacatggtgaaaccccgtctctactaaaaatacaaaaattagctgggtgtggtggtgcatgcctgtagtcccagctactctggaggctgaggcaggagaatcgcttgaacctgggaggcggaggttgcagtgagctgagattacaccactgcactccagcctccagcc

SEQ ID NO: 34625 - DNA, 2574 bp, Homo sapiens
ggagcccaggagtatcccgaggctgcacggggtaggggtggggggcggagggcgagtcttggtcttgagctgctggggcgcggattctctttcaaagccagaaccaggcctgtcccggacccgcgtcccggggaggctgcagcgcagagcagcggggctggggccggtggggggccgtttgggacgcgcggagaggtcctgagcgcggtggctctgcgtctcctagctctgatctccaggctacccctgtgattccgcgcagaggtacctctcggaggacgccggggtcccatgggcggcgccgcgcagggcgctaggaccccgcggggagcggaggcggcctcggcccgggagcctggaggacctggccggtcgatccgcccgggctggaaaactttctttataattacttctccaggtcggagcgcgcggcttgctaggcgcgcggggccggcgctgttacccggcgtggagtcgccgattttttttcctgcgggaccgcggggccccccagactagcggagctggacgccggggcgagcacggggaggggcgcaccgagggaggagacaaacttaactctggggccgggattccgaggcgggggccgcagccctcgaggcccgaagccaccgcttcctcccccgcctccccattcaggtgggcgccaacggcgggagcgagggtgtccaggccgccgggctgccaggtccgagcacgcacagggagaactctgcccagtggttcgccgggcgctgtagtccccgggatcctagggaccgaggcggccaggccctggggccccttgagtgcggcagctaatgctctcaccgcggcgggggaaggagcttgccaccgagacccccagccacgtgcgtccctcgcattctttaccggggccggggtggcggctacggaccgtcagctgggcccagatggagtcttgggagccctcaagtgtctcctgtccttgcccgcgccgcccctcgccactggcgctgaggcctgacgccgcctgcgtcccggctagaggcgcgcttgcctacaggtgagggaagacccccttcaccgacagtggccttaggcctggcaaggcgccacgacccgcccaggagccccggagggggcacagctaaaaacaccgctggagagccccgagcttccacgacgatcgcagtaaagaagcagtttcatctgggcaacgcacactgcgctttaatcaagttcctattcaacatagtcccagtgattaatagcccaactgcttcgttttcggtccagagctcataaacaagatatttttagcttgacgcttttggacgggagggagtaaaaaccagatacgttaaataaatatcccgatgtgagccggagagctgcttgctgagccaaatgcaggacccattcatatagcattcacctgtggagggagacctggacggaaatcaaaaagcaccaagagcgatttgcgtttttttctgcggtgctaaaactaatggcttttcctacctaggaacaaagaaacgccactgtacatgcacggttcccggcctgtggagttgtgggaggaaggcgatgtctggccttttttgcacagctgctgttgcctgcccagagatcgggaactctgccccgtaggactggaagaaacctcagtaatgggaataagactttgtccaatagggggctgatgaatgtgtgggggcgacaatggcaaggagtgggactcccggcccggggttcgccaaccccaggggccacaggtcctcctacaattgaaccagaattcacccacccgggcctgccctgtgcagggtgccgagagcccagggatgcatgagagggtggctcctgcctctgggaactgggacagtgggagagacggataagttgtcacacagaggctgctgggaggaaggaggagacagaaggagtaggggatgggacttcattcattcatcaaatgcacacgaggcacaaatgggaatcaagggtggatgtgctgtgatgaagagaagtcctgccctgaacaaggtggcgctgtggaggaggcagagatcagatttgtctgcggaggtgttatggactgaactgtgtccctgccccaaattcctgtgttgaaggcctaacccccatgtgactgtatttggagataaggcttttaggaagtcattaaagtgagatgatgtcatatgggtagggtcctaatttgataggattggtggccttatcagaagaacaatgtcatgggcatgcacagaaaggaggtggccgtctgcaagcagggaagaggcccctcaccagaacctgagggtgctggcagcttggctttggccttgggcatccagcctccagaaccatgagaaataaatgtttatggtaggtctatgatggcagcctgcttggactgaaccggcggtgagacagggcttcatgcaggagcagacctttgagctgggccttgaaagctgaggcaggagaattgcttgaaccttggcgtttgaggctgaggtgagctatgatggcaccactgcactccatcctgggtgataaagcaagatcctgtctctaaga

SEQ ID NO: 34626 - DNA, 491 bp, Homo sapiens
gtcttttgacttgtaacctagtgatcactgggttataacagtgccaggtatcatgtcctcatgtaactgtgttcagggtaggaagaagaggatgggaagataaaagagagtttttatattaggagggaaatccttcctgtaagtcccctagcacactccttattatgtcctattggccagatctggatttgttggtcattcctagttgcaagggagactgggaaaagaagtgtctggcaaaagggaatgcgattcctacgcttggcttagagagctcatgatccattccttggaactgggctcatggctgcccctgttagcagggaagcagaatgaatagctgttgagtaggcagccaatggcttctgccatactcaattaatgtgtgactggaaatgagatttttatcttttgttccacactggccaagggatatggcctctgttaccatgtaatataaccctttgagacaaatacatttaagaccagaa

SEQ ID NO: 34627 - DNA, 326 bp, Homo sapiens
ttgtacatcttaagtttgaaatgcccatgagacatcttgagttgctggatagttaagtctggagttcagaaaagaaataggacaggccgggcacagtggctcacacctgtaatcccagcactttgggaggctgaggcgggcggaccacctgaggtcaggagtttgagaccagcctggccaacatgatgaaaccccgtctctgctaaaaatttaaaaattagccaggtgtggtggcacgtgcctgtaatcccagctacttgtggagctgagacaggagatcacctgaactcgggaagcggaggttgtagtgagccaagattgtgcca

SEQ ID NO: 34628 - DNA, 491 bp, Homo sapiens
gtttctcatatgctcaccctaaaaacccttagtattgtcaacctcccacatggatggaactcactaatgaggttcttaatctcacaaacacagtccatagttgaaattgtgactgtcatatgtgaacattcagccagagttgaaatggtgaaacatttctaaacccagctcctaggcaggtaaggcatcttctttctggactcagccaattggagacatgttgactctcatacctgggcttagggccacaagtacaatcatgggtccataccagcatgaaggtctcagacaagattgcactcccatgcatacagtacaaagccctcaagtaggacagagaatgttctaatagacctcaggacacaggtgagattgtgacactcataagcacacccagccaacagtaatgattgtcaccctcccacatgaacacaacacattgttgagattctgaaccccacaataaaaaaaaagtgccaaaagttgaacaa

SEQ ID NO: 34629 - DNA, 475 bp, Homo sapiens
gtgaataactcactacaactaaatacagtgaatatcgtaaacctagaataaggagtctgttagatcaatttgaaaccattcaaatcatttcaacctttgatttatatggagggatttggcaagtggctttaaaatcaaaattaaaaatagcttgggaaacagcagatggaggatatgagttgatgctttaccctatagacccaggaggcccgcctgcccttcccagacaactggccaatgaattattgggtcaactgaggacctctgccaagcgcctgttcatgcctccctcacgtgtagtaaaaggcatgaatgcgccagcccatctagtcttgagctttggtgctaaactttctggcttagtatggagttggatttctagaaatcacatattcaaatcatgggatttatgagccccattgcagataaacattggagccattgaaaaattggcaaatacctaggatcgtgtttt

SEQ ID NO: 34630 - DNA, 502 bp, Homo sapiens
gtaggattcatctgcactcacctatgcactggcctatcctccccgctgtcagtaacgtttgagttccctagatctcatctatgccatgtatacgagcatgatctccatccacgaaacggggcagggggactgggggggcactaatcagctggaattagtcatactcacgtgtactgtgccccttgacttctgttgtcatctgcctctggatccctcaaatccagttttcctttctagggcttcaactggaagcttgggattgagtttgggacaaaaaaaaaaacctcaggagggtacatggactcattaagataagtcccaggtggcccttgccagactgcagtcaacagccaggagggctgctctttcactgctttcttaccataagccaaaagctaaggtgaaaactgtggaactgaatcctcctcaaacaagggagagaacagggagtcccttagaatttgggacctgacctaggaacatgtcttccagaaaaaaaaaa

SEQ ID NO: 34631 - DNA, 369 bp, Homo sapiens
ggaaatttggtttgtttttgcataaggatttccaatagttttaccaccatttcttgaaactactatgctttctctattaaaccacatttgtgactttagttaaaatcagtcacatatatcacagggctatttctgactctcaattctgttacattgtctattagtgtatattgatgtcagtactacacttttaattactattgcttcagggtatgtcttgtaaaccaaaaataaaattataggccccccccgcccctgcacaaccaactgaatggacccatcctctcagccaagggcattccaaaattaacctgaaaaactagttcaagccatgatgggaagggggagttggacatgtctcatcacacc

SEQ ID NO: 34632 - DNA, 264 bp, Homo sapiens
tagacaaaagactctatgactttgaaaaataaaactgggtggggaaaatatttgccacatatatagttggttaccatctctcttatgtaaagatctctacaaatcagaaagtgacttttaaaaatctatcaggccaggcacagtggctggccaggtgcagtggctcacacctgtaatcctagtactttgggaggatgaggcgagcagatcacttgaggtcaggaattcgagaccagcccggcccacatggtgaaaccccgttta

SEQ ID NO: 34633 - DNA, 1298 bp, Homo sapiens
ggaggttacagtgagctgagatcgtgccactgcactccatcctggacgacagagtgagactctgtctcaaaccaatcaatcaatcaatcaatcactgtcctggccagttgcagtggctcacgcctataatcccaacacttcgggaggccaaggtgagaggataacttgaaactaggagttcaagaccagccaaggcaacatagtgaggccccatctttacaaaaatacaaaaattagctggacgtgtagtcccagctacttaggaggctgaggggcaaggattgcttgaggctgagagattgagcctgcagtgagctatgacgatgccactcgctgcattcaagtctagatgacagagcaagaccctgctcctggacatactactaagtgctttcagcatttcatgtggtcctcataaaaatcttgagggccgggcatggtggctcacgcctgtaatctcagcactttgggaggccaaggcaggtgggtcacctggggtcaggagttcgagaccagcctgaccaatatggtgaaaccccatctctactaaaaatagaaaaattagccaggtgtagtggtgtgcacctgtagtcccagctcttcaggaggctgagaaaagagaattgtttgaacctggaaggcggaggttgcagtgagccaagatcacagcactgcactgctgcctgggcgacagcgagactctatctcaaaaaaaaaaaaccccacacaaccttatgaggtagaattccattttagagacgaggaaactgggaccctcaattatgcagaatggatgagtggtaccgccaaaattcaaaccccagactcccgaactcatgctcagaactattacaacatgcagaaacaacaaatccagtcatgtgtgcattttaatttggcatagcaacaacaacacatttctcaggcaaaatggatttccagcttctcttgaaaaatcctgaaatctagtccaggaccgtggattgtatttaaaaaaattaaaaatagaagaagaaaaggccgggcatggtggctcatgcctgtaatcccaacactttgggaggctaaggcagctggatcacttgaggccaggagttcaagaccagcctggcaaacatggtgaaaccccgtctctattaaaaatacaaaaattagctgggcgtggtggcgtgcacctgtagtcccagctactcaggatcctgaggcatgagaattgcttgaacctgggaggcagaggctgcagtgagccaagacaatgccactaaatccagctggacaacagagcgagactcagtctc

SEQ ID NO: 34634 - DNA, 590 bp, Homo sapiens
tctgagacagggtctcactctgttgcccagactgagtgcagcggtcctcgacctcccggtctcaagtcattctcccgcctcagcctcccaaagtgctgggattacaggctgagccaccatgccccgccttcaagacaagaaaagccttttctagaagactcctggcctcaggcctgatctctctccttggccgcacctaaggcgcacttaaggcgatcactcacaaggagaacaagtgaaaagtcccttgggattcatccctgagtcataggggaatgatgcacaccagaaggatgctgggctctgccagtccagccccaccagcctcctggagtggccctgaggccggctctccagaccctaggacctgctcctggaggcaggggctcctggaagcgcccctgacactgctccgggtgtctcttcaaggactttcccacattctacaaagaaaccttttggggacagtcagcaacatgtaaccgatagtggaaccagggcagccctgggttaagggtggtagacacgtgccccgcgagggagatctcagactggagaagggaacggcctcctaggcagacctgtactgc

SEQ ID NO: 34635 - DNA, 404 bp, Homo sapiens
gcatgttaacatttatgagcctgttatgtttcttacatgtgtatactcatttaattctcactactattctttattattcccatttaaacagatgaggtaacttgaggttcagagagcttcaattatttgcccagagtcacagttatttgtaaaactggggctggagtccaggtcttctgattcttaatccaggggtttcattgcctcataatagtaacagtggatgtctcttcgcttcactcaaatgctcttttgataaaatatgatttgcttcttggagcttgtaaataacctttatttcacagttcctgctgatactggacaccagtctgacacttaagacacttggaagcttaaggaactttttgttataaagaaaagcagatcaaggaccatcttatgct

SEQ ID NO: 34636 - DNA, 807 bp, Homo sapiens
aattttatatcaccaagcaaaagattgataggatattatgggatgtgaattgttttggtaacaaacaaaaaaaaaaaatgagaagggagaatgaagactctaatatctgtaattttcaggtaaagtttatccctctatatcgggctttaaagagatggcaaagcctgcttgtatgactcttgtagataacaatcactgtctcattcagacttgaggagtaacggctatagtgaatattcaatgtaggttaaactgataaccctgccagtagcctggcttcacagttgcttaactcctaagagatgttcacctctgtcttaccacagttaccataaactccttgttatgaggaatggtcctactgtccaagacctaacaacctaacttcagactcttgatcataacctcctatccttttcaccgtcgctaccctcaaaacttctttatacaacctctttcttgttcaacttgtggctattcctacaaccacctgtgtggcgtggtttgcctcctcatccagcttggccccaccatcagcctttcacccactacactctcaagatcacacacacgttctgaacatccccttctcccaccgttccactgctcctgccttgtcatcctccagtctcccctctcctgccttgtcatcctccagtctcccctctccatacagatgggtggaggtggaaagcaaagtcatgaaaatgctcccagcggctccactttcacattcgtccatgtaatttcaggcggactcttcctgacactgggcaacccctttgtggctttcttaacaactcagta

SEQ ID NO: 34637 - DNA, 342 bp, Homo sapiens
cctgcccccaggactgtgggcctttgctcttgctggtccttttgcctgcatcctccccaccctggcttggtgagcccctactcaattttcagttctcatctcctgtcgcttcctcagtgacagaaccctgacacactaaccgagatctcatcccccctctgacatgctctcatagcatcaccaaatacctctcactcctgacactacttgtagctataatcttatagctggctgtggtctctcacactacactgctagctccatgaggacagggactgtgtctccactctgatatgtccaaggcatggcactgtgcctggactgttgtaagcaatcaaaaaa

SEQ ID NO: 34638 - DNA, 1873 bp, Homo sapiens
gccttgcacatggagatgcttagctgagggggtggctttgttagactatttgcaggtcgtgagatagagcctgagatgggggactgggcccctgcctgggggattgggtcgtgacctgtgtggagccccacactgagctgcagtgggtggggagggtggtttacaggggtgctctgtgcagcccctctgattttcccctgggagtcccaggtccaggggaaggaggacagtggcccaggccacacagctcactgggcggctctcactcccccagggctggctgctggcgggatggacaccctggaggaggtgacttgggccaatgggagcacagcgctacccccacccctggcaccaaacatcagtgtgcctcatcgctgcctgctgctgctctacgaagacattggcacctccagggtccggtactgggacctcttgctgctcatccccaatgtgctcttcctcatcttcctgctctggaagcttccatctgctcgggcgaagatccgcatcacctccagccccatttttatcaccttctacatcctggtgtttgtggtggcgctggtgggcattgcccgggccgtggtatccatgacggtgagcacctcgaacgctgcaactgttgctgataagatcctgtgggagatcacccgcttcttcctgctggccatcgagctgagtgtgatcatcctgggcctggcctttggcacctgggagagtaagtccagcatcaagcgggtgctggccatcaccacagtgctgtccctggcctactctgtcacccaggggaccctggagatcctgtaccctgatgcccatctctcagctgaggactttaatatctatggccatgggggccgccagttctggctggtcagctcctgcttcttcttcctggtctactctctggtggtcatccttcccaagaccccgctgaaggagcgcatctccctgccttctcggaggagcttctacgtgtatgcgggcatcctggcactgctcaacctactgcaggggctggggagtgtgctgctgtgcttcgacatcatcgaggggctctgctgtgtagatgccacaaccttcctgtacttcagcttcttcgctccgctcatctacgtggctttcctccggggcttcttcggctcggagcccaagatcctcttctcctacaaatgccaagtggacgagacagaggagccagatgtacacctaccccagccctacgctgtggcccggcgggagggcctggaggctgcaggggctgctggggcctcagctgccagctactcgagcacgcagttcgactctgccggcggggtggcctacctggatgacatcgcttccatgccctgccacactggcagcatcaacagcacagacagcgagcgctggaaggccatcaatgcctgagggcagctgccagggcctgtggaggacaggccagagaggaggccagcaggcccagagtccccaggggaggaggaccaggtcaagggacgttctgtgggcagtagccctgtgtggccctgttcccaccatgagtctggaggccccacctccctggggctcccaatcccctttgccatctctgctctcactggggaccctcctccccttcccacctgctctcatactgctcagtgacatggcccaggctttccttccagggccatgcttggcaaggttggctgagggcaccctccttctctgcacccttggcacgagggcagggctggctctcccaatgcctccatcccatccccatggtgctttggcctcctcaaagcatccaccatggtggatggactgaagtgtgtatattttcttgatctattttttaataaaaaggaaaaggagcagaaggtgctaa

SEQ ID NO: 34639 - DNA, 544 bp, Homo sapiens
aggcgactgttggtcaattccttccttatctggtggccccatcagcctggagaggaaggctcttcctgaatcactcagtgaggcttccatgcccctcttttccttttatcagctcggagcccaagatcctcttctcctacaaatgccaagtggacgagacagaggagccagatgtacacctaccccagccctacgctgtggcccggcgggagggcctggaggctgcaggggctgctggggcctcagctgccagctactcgagcacgcagttcgactctgccggcggggtggcctacctggatgacatcgcttccatgccctgccacactggcagcatcaacagcacagacagcgagcgctggaaggccatcaatgcctgagggcagctgccagggcctgtggagggctggctctcccaatgcctccatcccatccccatggtgctttggcctcctcaaagcatccaccatggtggatggactgaagtgtgtatattttcttgatctattttttaataaaaaggaaaaggagcagaaggtgctaa

SEQ ID NO: 34640 - DNA, 1842 bp, Homo sapiens
gccttgcacatggagatgcttagctgagggggtggctttgttagactatttgcaggtcgtgagatagagcctgagatgggggactgggcccctgcctgggggattgggtcgtgacctgtgtggagccccacactgagctgcagtgggtggggagggtggtttacaggggtgctctgtgcagcccctctgattttcccctgggagtcccaggtccaggggaaggaggacagtggcccaggccacacagctcactgggcggctctcactcccccagggctggctgctggcgggatggacaccctggaggaggtgacttgggccaatgggagcacagcgctacccccacccctggcaccaaacatcagtgtgcctcatcgctgcctgctgctgctctacgaagacattggcacctccagggtccggtactgggacctcttgctgctcatccccaatgtgctcttcctcatcttcctgctctggaagcttccatctgctcgggcgaagatccgcatcacctccagccccatttttatcaccttctacatcctggtgtttgtggtggcgctggtgggcattgcccgggccgtggtatccatgacggtgagcacctcgaacgctgcaactgttgctgataagatcctgtgggagatcacccgcttcttcctgctggccatcgagctgagtgtgatcatcctgggcctggcctttggcacctgggagagtaagtccagcatcaagcgggtgctggccatcaccacagtgctgtccctggcctactctgtcacccaggggaccctggagatcctgtaccctgatgcccatctctcagctgaggactttaatatctatggccatgggggccgccagttctggctggtcagctcctgcttcttcttcctggtctactctctggtggtcatccttcccaagaccccgctgaaggagcgcatctccctgccttctcggaggagcttctacgtgtatgcgggcatcctggcactgctcaacctactgcaggggctggggagtgtgctgctgtgcttcgacatcatcgaggggctctgcgcttcttcgctccgctcatctacgtggctttcctccggggcttcttcggctcggagcccaagatcctcttctcctacaaatgccaagtggacgagacagaggagccagatgtacacctaccccagccctacgctgtggcccggcgggagggcctggaggctgcaggggctgctggggcctcagctgccagctactcgagcacgcagttcgactctgccggcggggtggcctacctggatgacatcgcttccatgccctgccacactggcagcatcaacagcacagacagcgagcgctggaaggccatcaatgcctgagggcagctgccagggcctgtggaggacaggccagagaggaggccagcaggcccagagtccccaggggaggaggaccaggtcaagggacgttctgtgggcagtagccctgtgtggccctgttcccaccatgagtctggaggccccacctccctggggctcccaatcccctttgccatctctgctctcactggggaccctcctccccttcccacctgctctcatactgctcagtgacatggcccaggctttccttccagggccatgcttggcaaggttggctgagggcaccctccttctctgcacccttggcacgagggcagggctggctctcccaatgcctccatcccatccccatggtgctttggcctcctcaaagcatccaccatggtggatggactgaagtgtgtatattttcttgatctattttttaataaaaaggaaaaggagcagaaggtgctaa

SEQ ID NO: 34641 - DNA, 840 bp, Homo sapiens
aggcgactgttggtcaattccttccttatctggtggccccatcagcctggagaggaaggctcttcctgaatcactcagtgaggcttccatgcccctcttttccttttatcagctcggagcccaagatcctcttctcctacaaatgccaagtggacgagacagaggagccagatgtacacctaccccagccctacgctgtggcccggcgggagggcctggaggctgcaggggctgctggggcctcagctgccagctactcgagcacgcagttcgactctgccggcggggtggcctacctggatgacatcgcttccatgccctgccacactggcagcatcaacagcacagacagcgagcgctggaaggccatcaatgcctgagggcagctgccagggcctgtggaggacaggccagagaggaggccagcaggcccagagtccccaggggaggaggaccaggtcaagggacgttctgtgggcagtagccctgtgtggccctgttcccaccatgagtctggaggccccacctccctggggctcccaatcccctttgccatctctgctctcactggggaccctcctccccttcccacctgctctcatactgctcagtgacatggcccaggctttccttccagggccatgcttggcaaggttggctgagggcaccctccttctctgcacccttggcacgagggcagggctggctctcccaatgcctccatcccatccccatggtgctttggcctcctcaaagcatccaccatggtggatggactgaagtgtgtatattttcttgatctattttttaataaaaaggaaaaggagcagaaggtgctaa

SEQ ID NO: 34642 - DNA, 479 bp, Homo sapiens
attgtccccacaagagacagctttacagggccatgtcagaatatgtcaaagaaatatatttttgggtaaagtacttctgtttctttcagggcctgcaatctgtcatgtgatgctatactagagtcaggttgaaatttggtgtcttattgctacaaagtctgttttgtcagtcttgggatctcttttaatgctaacgctggtcagctgtgcctgaattccatagggagaagggcataatgaggcaagttcgaccccacattcccattatggcttgaactagtttttcaggttaactttggaatgcccttggccaagagcaggagtccattcagttgggtggggggcttagaatttatttttcggtttataccgtgcttactgatgttggcccacgtgcattcattcattgccatgaccccacgttcctttccttctagcctgtgaccctagggctgctgtggtgggactgcaaaaaaaaa

SEQ ID NO: 34643 - DNA, 289 bp, Homo sapiens
agaaggggaagagttgtgctcctgaaacccagacactattggaacagggtaaatgtaaaattaaaatatttactgcatagatgaagagagctatgtggaaatacagtcaagcttttattatcattagaatatcacaggaaacatttgtatcctctttaaatattggattgagctgtcttttttttttttttttttaagatggagactcactctttcgcccaggctgaagtgcagtgagctgagatcaatcacgccattgcactccagcctgggtgacaaagcgagactc

SEQ ID NO: 34644 - DNA, 463 bp, Homo sapiens
ctttggaccttgacagaccacttcataagctttagattttgagaatttcacagcataaagctcatcgctgatgcagtaatgaaggaaatgttctacaagttaatagatgagtgagagaagagggcattcatattagatttatttacttactgaactcagagccttgggttactgcttgacccccactgttatctagtttaagggtccttttattttttgtttttttgaggtggagtttcactcttgttccccaggctagagtgcaatggcccggtctctgctcactgcaatctccgcctcccagattctcctgtctcagcctcccaagtagctgggattataggtacccaccaccacgccctgctagtttttgtatttttagtagagacagggtttcaccatattggtcaggctggtctcgaactcctgacctcaggcagtctgcccacctcagcctcccaaa

SEQ ID NO: 34645 - DNA, 432 bp, Homo sapiens
gaggttgcagtgggccaagattgcatcaccgcactctagtctgggccacagagggagactctgttcctaaataaataaataaataaatacataaaactggtaatactgagtcactgagagagagagtattaaaaaataaaaatgggccaggcacggtggctcacgcctgcaatcccagcactttgggaggccaaggtgggccgatcatctgaggtcaagagctggagaccaacctggccaacatggtgaaacccagtctctactaaaaatacaaaaattagccaggcatgatggcgggtacctgtaatcccagctactcgggaggctgacacaggagaattgcttgaacctaggaggccgaggttgcagtgagctgagatcatgctactggactccagcctgggtgacagagcaagactctgtctcaaaaaa

SEQ ID NO: 34646 - DNA, 482 bp, Homo sapiens
taagcacttctcagagaatgctattgaagggataacgcccagggaacaatgaagaggataagatgaagaagctgcaattctgcctgggtgccttggggtgtattttacttataacctgtgtgttttccacagtccctgcttcccgaggttgtggtattggtaggggtaacaggccaatcggtgtggcttcagcttctgaggatctgccgggtgctgaggtctctcaaactccttgcacaattccgtcaaattcaaattattattttggtcctggtcagggccctcaaggtgatttgactgttgcaagctaaagcagggggcaaggtagataaatgtgagggcttaacatagaatatgaagcaaattggccgggtgcggtggctcacgcctgtaatcccagcactttgggaagccgagggggatgggtcatgaggtcaggagttcgagaccagcctgaccaacatggtgaaaccctgtctcta

SEQ ID NO: 34647 - DNA, 88 bp, Homo sapiens
cactaccaagaggttaaactattctgtccccagatgtggaaatttttagacatgaaggaaccaaaataaacttctcaaaaaattacta

SEQ ID NO: 34648 - DNA, 416 bp, Homo sapiens
gaccacattagtgagagaagtgagacacagatgtgacctctgctgttagagttaaaaatagagtgagaatcagattttaaaacttgtttttgcttgggattttataaaaatagtgttctaatttggtaagtaaaaactggtgtcttaatttgcatttttttttagcgaagttaaactttttacttgtttattgaatacgttttaagaagttatccttgactttaagaaattatccttgactcacttttcttttttgatataagtatttttaatttatttctaaatactcaaaaaatagaaactattagctctttgtcatatttttacaagtattatttcccagtaaaacaattttttaacttaaaatttatatatagaatctcgctgtgttgcccaggctggtcttgaactacttg

SEQ ID NO: 34649 - DNA, 610 bp, Homo sapiens
gtatagcactttatactttttttttcaaagcgttttcacatccattatctcatttgatcctcacaacaaccttatgaggtaggtagggcaggtggtatgacccccattttacagctgagaaaactgagacccagaaagattaaatgactaggcaaaggtcacacagctgggaccagacccttacttcttcactgcaggtccttgttctttctgtgtaccagggaccttagtccctgggtagagggaggcagaatctgtggtagcagggctttctcgaaggtctttggtggctcctaggctgttgtagaatgtcagagactctccatccctagccagccttgtccttgatgccctgcaatggtggttttcaaactgtgagtgcctgtgttccaaaaagtcctggatcacttaaactgatgggttgaacttttccttcccatgcatatctcttccttccccaaattggattaaaccagaagagctccattgtcatctagtttatgtattggagttccagtcaacattttgttaaagaaaaaagcaaagatttctgctaaataaaaaaagaaccagaaacgtttgaaaaccactgctctgggatggcaagaat

SEQ ID NO: 34650 - DNA, 413 bp, Homo sapiens
ttccttcccaaacactgttttactcataacttataggctcaaaatcatttacttaagcaccataactaggcactcaaggcctttcatcagctggtcttactctacctttctaatcttagtttccattatttccttacacaagcccagtaaaatcagtactcactgtactttggacataactttctgcttttctgtctctgtgcctctgctcaaaatgttcgtcatctctaatactctctttcctcaatcttagaaaatccaatatttcttcaagcctttaatggagcagagttcatctgacctccccaatatctactgcattttactgttgtgtatatgcatacatatgtctgctttgtgttccttgcttcagttaaaggacagagatggaaatgtatctatctttataacca

SEQ ID NO: 34651 - DNA, 411 bp, Homo sapiens
  misc_feature (2)..(6): n is a, c, g, or t
tnnnnnatgcagcacagactgtacacatataaagggtatcctgacagaggaatagctccataaataaagggtagcaattacgtgaagggtccggcctccttctgtagaatcagagctgtgaaatcaggcaccttttcagagaactccagtgggtaactggagcactgcctgggttagatcctggctccacccctttccagtgtgacctagtcataatttgcatccagtaacctctgaccccagggctccacactctcacatggcccctgtttaaacctgctgcaaagtaatctccaggtcaagctcctattcctggcctgttctatgatgttcccttcctctatcccacaaacccccagagacttgccttcccatcttcccaacatggccttccctctgatctcactccct

SEQ ID NO: 34652 - DNA, 263 bp, Homo sapiens
gatctctatatagatttctttgcatataaatccttacctggcaagctattttaccagtccagcccccagtgactgaagatagtgtgatgaatctgagagcagtaagtgttaatcacatgaaaaataacccaggagcatggatgtagtatcaaatgtaatatttatgatgtcttgcctaaatttctagactgtgcctatcttattagctcttttggtatttcagtgtgactttgctactcagaaaaccagactccagcataaca

SEQ ID NO: 34653 - DNA, 389 bp, Homo sapiens
tttttcccccctttaattctgtattctgttttcaaaaaaatgtgcatgaagaggaaaaagtcaagtcaggaaaaataagctccttctgggtttattgtaaatttattttcacataagcattctagttcaatcttggtgaaaatattttatttgctctagaattgtaatttaaggggcaaaacagattttcattgcatctggttgctatacttgagaatcttaagaatttctgagaaaaagggaacaaaggctttgggtataaatgcatctgcatggatgtcttgaatctctaatgctgagttttgtaagagctggggcttcaagcctcctccctgtgtgggctgcagtgccaagattacagcagggactggataaattttttggcatgt

SEQ ID NO: 34654 - DNA, 1097 bp, Homo sapiens
gatgagttcccggtggggctctggggggggctcctgagcggggcattccttcctgaagcctcatccccgctcagccctgctcagcccctcctcctactcccctccccctccccctcctgccgggccaggaattgggtttggggcgggttctgcttccaaagccatctcttccagcaggagagggctctactctgagctcctattttccaaggctccgggccgcgctcggcgctggcctgctgccccggcgggtccgccggccggaggcgggagtcacaggaagagccctccacaaaaggaggcctcggcggatcaggacagctgcaggtgggtgtgcagactggtgagctgccagcaggggcccagacgcgccaggcctggagatggctggaaactgctcctgggaggcccatcccggcaacaggaacaagatgtgccctggcctgagcgaggccccggaactctacagccggggcttcctgaccatcgagcagatcgcgatgctgccgcctccggccgtcatgaactacatcttcctgctcctctgcctgtgtggcctggtgggcaacgggctggtcctctggtttttcggcttctccatcaagaggaaccccttctccatctacttcctgcacctggccagcgccgatgtgggctacctcttcagcaaggcggtgttctccatcctgaacacggggggcttcctgggcacgtttgccgactacatccgcagcgtgtgccgggtcctggggctctgcatgttccttaccggcgtgagcctcctgccggccgtcagcgccgagcgctgcgcctcggtcatcttccccgcctggtactggcgccggcggcccaagcgcctgtcggccgtggtgtgcgccctgctgtgggtcctgtccctcctggtcacctgcctgcacaactacttctgcgtgttcctgggccgcggggccccggcgcggcctgcaggcacatggacatcttcctgggcatcctcctgttcctgctctgctgcccgctcatggtgctgccctgcctggccctcatcctgcacgtggagtgccgggcccgacggcgccaggctctgccaagctcaagca

SEQ ID NO: 34655 - DNA, 953 bp, Homo sapiens
ccaaagtggctgtacggctcggattacgggatggagagggctctactctgagctcctattttccaaggctccgggccgcgctcggcgctggcctgctgccccggcgggtccgccggccggaggcgggagtcacaggaagagccctccacaaaaggaggcctcggcggatcaggacagctgcaggtgggtgtgcagactggtgagctgccagcaggggcccagacgcgccaggcctggagatggctggaaactgctcctgggaggcccatcccggcaacaggaacaagatgtgccctggcctgagcgaggccccggaactctacagccggggcttcctgaccatcgagcagatcgcgatgctgccgcctccggccgtcatgaactacatcttcctgctcctctgcctgtgtggcctggtgggcaacgggctggtcctctggtttttcggcttctccatcaagaggaaccccttctccatctacttcctgcacctggccagcgccgatgtgggctacctcttcagcaaggcggtgttctccatcctgaacacggggggcttcctgggcacgtttgccgactacatccgcagcgtgtgccgggtcctggggctctgcatgttccttaccggcgtgagcctcctgccggccgtcagcgccgagcgctgcgcctcggtcatcttccccgcctggtactggcgccggcggcccaagcgcctgtcggccgtggtgtgcgccctgctgtgggtcctgtccctcctggtcacctgcctgcacaactacttctgcgtgttcctgggccgcggggccccggcgcggcctgcaggcacatggacatcttcctgggcatcctcctgttcctgctctgctgcccgctcatggtgctgccctgcctggccctcatcctgcacgtggagtgccgggcccgacggcgccaggctctgccaagctcaagca

SEQ ID NO: 34656 - DNA, 724 bp, Homo sapiens
ccaaagtggctgtacggctcggattacgggatggagagggctctactctgagctcctattttccaaggctccgggccgcgctcggcgctggcctgctgccccggcgggtccgccggccggaggcgggagtcacaggaagagccctccacaaaaggaggcctcggcggatcaggacagctgcaggtgggtgtgcagactggtgagctgccagcaggggcccagacgcgccaggcctggagatggctggaaactgctcctgggaggcccatcccggcaacaggaacaaggtaagtgccacaggcggagggccctggtcttgcccagacgggtgtgggtgggaggggcagacccagcccagcatctcctcccccatcccccccttcctggccccactttccagctctggacccaccgtgggcagtgggctcctctgggctatgtggccgggcacaagttccctggaccctcctaccctcctgtcctcatcagtgaggcaagcaccaggactggacctcaaggtccctcgctgtgctgacactgtggtcgccttgtagcatccttgcaaggtcttgtttcatctcttccctgcagaggtggggcagtcagctacttactacagccaggcgggccaggaagccctgggacgctgactccaaggtggccctgatgtcatgtgctccatggagcctagggggtcctgggccaccccgagagtgttgcccca

SEQ ID NO: 34657 - DNA, 143 bp, Homo sapiens
gttgttttcccattcaagggattattgtaataagctttgttttaaggttttattgtttagcaacattgtgaaaacatctctatgtcttctgttcctcattcttttttaaatacaagattttatttcttcaaatcctatccttg

SEQ ID NO: 34658 - DNA, 205 bp, Homo sapiens
cccctttgttttcggagcacaaagcaggcacttttaaaatggcatgcaggggaggaagtgtatttccgtctttacactggtttccgggggcaagaaatgtttttttttttgcagagggtagagagtgaaagaacacatacataagctctgctgaccatccagtctcaattacaagtaaggactctgctcttgcactttttttggg

SEQ ID NO: 34659 - DNA, 691 bp, Homo sapiens
attttcaaaggggtgtgtgatgtgggcatctgagtttcttctgggagtgaatattggcaactatgtaagtaaatcttcaactctgacttataattgagcacatttgtgaaggaaatggttaattttacaaccaaaggcaaactcgcacctcgacaggtctgctgaaagaaatgtgccccagtctttttgctggcaagcgcaccaccaggtcataaatccacaggctttatttacagcccataacacttatgaatgttaagatatttgacgccacgttggccttataatattcaaggtccgcagacattggcagtagctcagatttctctcactaattataagcaatgagatggggggaggtggtggtatcctaatgcaaatgctgccctcccttctccgctgacccccacctctacaatcttgagtttactgagacagacgccaccactcctttggcagctgacttgtacgtttcctctaggctattgttatacacatttataaagagcactttcaggaatggaaattcagtgggggctctgcacagatgcctttttcaaaagcaaagttgctctaggtgtttgcatcttttcccttttcttttctccctttttcctttctttctcttttcttaattccccccaacacccccacctcctgcaataaaatagtagcatcggcaaaaaaaaaa

SEQ ID NO: 34660 - DNA, 373 bp, Homo sapiens
gtggtgggcagaacaatggtcctcaaatctgtccatgtcctaatcctcagaacctgtgagtattttacctttcatggcaaaaggaattctgaagatgagattaagcttaaggaccctgagatgaggtgactttccaggtaggtccaatctaatgacaaggaaaacctcccctggctccagggaaccagagaggtagtggtgtgagaaggacttgacttgacattgctggctctgaagacggaggatggggccatgagccatggaatgcaggtggcctttagaagctagaaaaagcaggggagcagattatctcctgggtcttgcaaaaaggcatgcagccctgctgacaccccgactttagaccagtgagacc

SEQ ID NO: 34661 - DNA, 402 bp, Homo sapiens
ccaagtttgggtttggaaatgtggtactgtaattttggaggacagcctccctgttcacagattggtgattgcaggtttaggccatctatagtggatgggatccaatcttaacaaaatctttttgcctgtgagtgaagcgggaggggaggtgtgtgtgtactgggatgggggcatgggggtgagcagggtgatgctgctgagctgtccactgggacttctgaaccccaaatttttaacctgaaaaacttgaagaacacttggcaaaggaatttggtagctgtccgcaacattttggcctaagtattgttgatgtagtgtggatttgtggattgttccttatgtggatttttctacaactggaacactagaatgtacctatctcctcttaaatatcagctatgt

SEQ ID NO: 34662 - DNA, 473 bp, Homo sapiens
ccattgcgagggagaagggaagcagacctctggggcctccacctctgcttcaactaaagtgctgcactgtatctcttacatctcaaacttctaagattttatttgaagatttccgttttcaaaatggtggcccaaacacatactgctgccttcccttcagcactaggttttcagacacaatagaaaaaatatgtaacaggccgggcgtggtggctcacgcctgtaatccaagcactttggggtggtcgagatgaggggatcatttgaggttaggagttggagaccagcctggctaacatggtgaaaccccatcactactgaaaatacagaagttagccagccatgttggcactcatctgtaatcccagctactggagaggctgagacaggagaatcgctgaacccaggagacagaggttgctgtgagccgagactgcaccactgtactccagcctgggcaacagagtgagtca

SEQ ID NO: 34663 - DNA, 457 bp, Homo sapiens
ttttttttttgagatggagtcttgctctgccacccagtctggagtgcaatggcacgatttcggctcactgtaacctccgcctcccaggtttaagcgattctcctgcctcagcctcccaggtagctgggactacaggcatgtgccaccacatccggctaattttgttgtatttttagtagagatggggtttcaccatgctgaccaggctggtctcaaactcctgacctcaagggattcacccgcctcggcctcccaaagtgctgggattacagatgtgagccaccgtgcccagccaagcccatctatatatagaaaagggtatgtaacagaatcaaaaatgtgattcaaattttacgtaggctgtcttgaaataaatattcatcaaacatgaacatatcacagtttagaaaagagcagagttttgaatctgtgaattacacacaatagtcttttggtt

SEQ ID NO: 34664 - DNA, 486 bp, Homo sapiens
ttggcagctcgacataacggggtataaatatgatcacagaatgttctaagaaacttctgccagtttttctagctagatacaaactttattcttggtatattttatgacttatttaactgaaaataagtacttccttaatagaaatttgtacttgactttaaaaatcaaactgtttggtctcttctaagaagtttattagaaatgcaacaaagggccaggcacagtggctcatgcctataatcccagcacgttggaaggccaaggtgaagggattgcttgaacccacgagttcaagaccagcctgggcaacatagcaagaccacgtctctacaaaaaatttaaaaattagctgggtatggtggctcacacctgtagtcccagctactctggaggctaaggtgggaggatcacttgaccccaagaggttgaggctgcagtgagctatgattgtgccactgtactccagcctgggtgacagagcaagac

SEQ ID NO: 34665 - DNA, 387 bp, Homo sapiens
aattccccactgcctcctgtaagatatgtctgacagctgaaagtaaactagtctttgcaagcactaaattgctcatcaatcttacaaaaggtgtcatttagtcatttacattcccaagggaaatacaaatggaacacagctgcctgagaaaaattaattcacccaactcgagtaagtagctcacagagaacagctttcataatcctaaaatatctgaatcatatttcattcctggttttcaccaaaaagaagtagggttttcacctttttattaattatttgaattttagctgattagtgcagtgcggtttgcacagttatagcccaatgacaagcaggcataatgtcacccaaagctttgagcatgaaacaaccaaaatgtacctt

SEQ ID NO: 34666 - DNA, 1117 bp, Homo sapiens
gagactgaagtggcaagaagaatcgaatatactctgttctaacctttctgatgtttgcttgttaagtgggaaacttaaaaatttctactgtccactatagtagtactttgaaaaataagttttctcccagcacaaaacccatgtcagccacacacaagtagcaacctacaggcctgtctcttgacctctcgtttataggcacaagcctcccacaggcccagaattattttgcccaccagctgcttgccaggtctgatactcacctaaaagaactttagggagcattgccaaaccagcctgatgaaagggagttctcatgtatctaaatgagtagcaagaattcacatgggaacttcatttatgtcagtggactgacaatagcagatatgatcactaagctttctgtgaagtaaataacaagtctgctttcactttctgttggataagactttggaatttcagaattttctttccaagatgtcaaattaaaaatggtttttattactcagtggctatatgacattgctttttagaacttatctgtgagttttatgtagacaattcatttgcctccctcagcgtgactcttgtaggatttgtttctgatttgtggagttaaaactgttttgaattaatgggctgggaacatggaaagaaatatgtaattaatgaagaaatattagcaccccagtttttagtgatatttaccattactagagttctggattcactgaaaaaatgaattttggtctatatgcaacatattccttaactataatgtttcactatttcctaatagtatgacatcatctctactacctttaaattgtcctttggacatagaaaagaaaagaactatggacccacagtacctcattagatgcccttgggaccagatgtgcattggaattcagaattttttggattttagaagagaaatatagtctgtgtaacatacattatgtaacactccagactctgaaacatttttaaagcaaatatatatataaatatttacattaaatggcccaaataaaaattataagtagtgtcaccaagtgaggtacggctttgttgccaaagttctttttaaaaaaacttcctgaggccaggcacg

SEQ ID NO: 34667 - DNA, 583 bp, Homo sapiens
gtctcccaaagtgctgggattgcaggtgtgagccaccgtgcccggccaaaaattactttttaaacgtttaaacattttaaaagaaagactttttaaaaagtcgcaaatccaccattttgagacagtgtagggcttagagctaagacatgaatgtccgtttgttaagctcccccatccatataaataagcatttactatgtgtcaggtattgggaattttgaaattaataaaacatagttcttgccttaagagtttgtttggcagtgagggagacagatatttgattgtacaagtagtttgagtataagaactgctgttgggaaatatgtactaggtatattggaattcagagaaatgcctagtttagtctggagtgaagggtaaattaaggtttcccacagtttgtttcagtgtaggcctgagactagtagctatgtgtgcagaaggcagtagggatatagttattctgtcagtctgtctaatatctgtatgtcacctacctacctacgtacctgctttcttttttctgacagtgccattcagaagggatatggttattctaaggctgagggaatagttatgt

SEQ ID NO: 34668 - DNA, 351 bp, Homo sapiens
tcctaataaattacactttatttgccaagatcccaaaaagttcttagtaatgatcatagttcttactttatcctctattattatagtgttagtgctttgggactccaagacttttagctccttaagtgtaggaacagccctaaagttaacaaaatcgatcatcccctgtggcacctagcaaagtagaggaattaaaaatatatctgctgtccagcctggcatggtccacttacgtccccagccctgcctgcctttccagcactctctgcacgctgtgcaagcaccccatcctgacacaaacttccctgaccacagctctgccttgccacttcatccaggagctcagctgtg

SEQ ID NO: 34669 - DNA, 100 bp, Homo sapiens
gtgtatagagtgtgagtatgaatttagactccgaatctgagttctggccacagcacctgatgggtaccaaccccgaaagagctgcccacctccaaggaaa

SEQ ID NO: 34670 - DNA, 379 bp, Homo sapiens
aaaattaaatagtattttgtttaatctgatacatccaagatattgtcattttaatatgcaataaaaaatgattgattcgatatttgcatccttcacaacctaccatgtagtttacactcagagcccagctcagtctcacagcaagcaccagcggcccccgtgctggacagcatggctaatgggaggagctgacccgtcggaggcaccaaggtcacgctgtgaccaaggctgtggtgacgcaaaggcagcgggtttcctggcacagcctggaggtgcaccagcctgtcctgtgtgctctgcataatgtggtacagcagtggtcacagagctttgcaccagatgctgattccagcccacctaggggggttcagggaagtgg

SEQ ID NO: 34671 - DNA, 429 bp, Homo sapiens
agggttcttcagagaaacagaatgaacaggaaacaggtaggggtgtgtgtgtgtgtgtgtgtgtgtgtgtgtgtgtgtgtgtgtgtaaagagagggggccaaggagagggagagagatttattttaaagaattatctaaagtgattgtggggctggcaagtccaaaatgtgtagggccagctggctggctggaaactcagaaaggaaactcaatcctgaggcagcattattttttcttctctgggaaacctgagtttttgctgtgaaggccttcaactgattgaatgaggcccactcacattatggaaagtaatctccttcactgaaggtcaactgattgtaggtattcaccatgtctgtaaaataccttcccagccaggtgcggtggctcatgcctgtaatcccagcactttgggaggctgacgtggg

SEQ ID NO: 34672 - DNA, 327 bp, Homo sapiens
acagactcgagattcaaactggcattctctttcattctagaaaagaaagtttggtaaggagtgattttttttttaaggccaggcaatctggttgtatccatcattacccttacttaatgacctgcttgtaagttagcagctgctgttgccaaggagaggtacctggtttctaacagcagtacctcattgctagctggggtgagggaatgagaggactcaatggccagcctcagggccatgtggatgagtggacccaggttaaaaagaatgtgctttttctcagttacctagaaggactgtaagtgtctcccttggaagaaactgaga

SEQ ID NO: 34673 - DNA, 205 bp, Homo sapiens
gagagagcactggaaaagaggtgatacctaaagcaaacaagaattaggtgaggcagcctgcttggccaggatgggctgggtgctgagagactttccaacaaggtcaggggtcagtgatctccagggatccatgttcataccaggtatctctgtaattctagccactggagagctaaccccactcagtgggccctgaaactaacat

SEQ ID NO: 34674 - DNA, 646 bp, Homo sapiens
  misc_feature (420)..(420): n is a, c, g, or t
aatgatgtatggtttttatcaactgtctccaaaataatcccctggttatgccagggagtacagttcttttcattccatacataagttcagtagttgcttccctaactgcaaaggcaatctcatttagttgagtagctcttgaaagcagctttgagttagaagtatgtgtgttacaccctcacattagtgtgcctgtgtggggcagttcaacacaaatgtaacaatgtatttttgtgaatgagagttggcatgtcaaatgcatcctctagaaaaataattagtgttatagtcttaagatttgttttctaaagttgatactgtgggttatttttgtgaacagcctgatgtttgggaccttttttcctcaaaataaacaagtccttattaaaccaggaatttggagaaaaaaaaaaccctggntttttatttttgtattttattattgtttacttcaaactttgttttacagcgtcctccacaaaacctctagaatgcactaggatatatttttcttgggagtcataatcatgatgcataccaacacaacactactcaaattatatttcattgaggatggcatgttgcattgagggagtcaacttggacctaggagtgggagacttttttcaaaatggctttttacatc

SEQ ID NO: 34675 - DNA, 1225 bp, Homo sapiens
aggaggtttgtggatggcgtggagcaatggtaggctggtctgtagccctctgtgagtcaacatcgaatggcgcgtgccggtttccagcactgcgcaacaagtgggaccgccgctgccgccgcgagcacagcagggtgcagcgtggtggcagaactggctggtttctctttgccccagtggaaaccaggaacggcccctcccaaccctcccgatgtccactccgagacccacaacttcaccaaaagaccatacccgactccccactcccccgctttgccaggcgcagtgagcctgagtgggatccagcactcggcccccagcgcccctttcctccgagaagatcaggagtttattcccgactttctttgctggatgaccagtgtttggcaagaatctctgccaatactgtcgagtgccattctgccttttgaagacaagtgcaccttctttcccttcccagtacataaagcttttcggaggctgggggagaaatcaacttatgatacatgaaaccagctccagataccgcgttgtggttgctagaggcgggagcatcgggaggaacggaattacatacactaaattaaatgttttctagctttgcttttagaggcaatcacacccccaaccctcgcccccaccagacagaaaataaagaggggcgggtagggatcggtgtggaagctgcggccgcgcggcgattctcggacgggctggcctgccacctagcggtgggctgagatcgagttcgcggccatgggcggtgggctcgccgttccacctcccgggcggcggtaccctgaccagatgctaggactgacagaaggagggcaccctccaatggggatggcatacaacctccaaagttttggcaagagggatgaaaatcagaaaggcctcgctgcttgcccatcactcagcgatgagcatctatttgcactaagaaaaaccacaaataacccgcttcgaacacaccatcttcctgtccctgtggcccctcttaggggaagtcggtagtggaaggatgccacctaggagctcaggggctttgggacgtacaactctgttttgcagttgaggaaacaggcccgacgaggaggcttgttagtggtgagttagtgacttaaccaggaccagattttaagcttctgaatttcatgtcagtgactgaaagccaaaggcgggtttatctcagctccttagaagtatttatgagaaaggagcg

SEQ ID NO: 34676 - DNA, 694 bp, Homo sapiens
gttaaaaataaaaacatcttcacagatatcagagaaaagtgaaaactcatatctgaaagattataaatatactttatatcaattttccagagaacttaaacttctaataatattggtaatattctcatggttactattttatattctttcctgctttttgtagctactggtgtactatgacagttataataaagattatatgggggtatacttaaatgccatacttttaaaatcctgaatcattgtttataaagttttattcaatatttttctttgcacatgccctttttcagtccaattgaacacttagagatttttctttgctttcacttgcattaaatggaatatacagatgtactaagatagaaagaaaaaggtgaaagagaactatacaggcagaaatgcatgtgtgtgtacctgtcttcaaatggaaaagaaaatgatggatcacaacaggaaactggagaactgttgatttattacagttctcaaattagaaacctcccaaattcttaaagctaaattagcttttcattgcacactgaatttttctctgataaatctaatgtcttctgggttcagactttatcccgtacaaatccttttttcttgcctgtgattcatgtgagaagaattatataattttcttatttcaaagcttataaactattacttataagttcatggattttaa

SEQ ID NO: 34677 - DNA, 304 bp, Homo sapiens
atttatctgtaattctcaaccttttgtcagacagttgaacttaaggcctgcattttgagtaccctttccaaactaacaaatgttcctgtgtccttccagggagtgtcttacctttatttccctaagaatcaagtgccatctgccaggagtttgagatcagcctggccaacatggtgaaaccctacctctaccaaaaatacaaaaaaattagctgggtgtggtggtgtgtgcctgtggttccagctacttagaacattgaggcaggagatcccctgaagctgggaggcagagggtgcagtgagct

SEQ ID NO: 34678 - DNA, 560 bp, Homo sapiens
cttccagacccgctcccgaaaccttgtcgaaggaccaaaggcgaccggtgcaggtgcacgacgccagctcccttctggggggccggggcctgggggttgccatggcccccagccacctgtcacagtgtgaagtctgttgtgtttgagcttctcagagtggaatgactccttttccttcctggccctcgggggcctctcgaggtcagcctctccaacccctacctcagctcctgtctgcactgagaaacctccccgggtgatgtctgcaaagtctgtgctgtccgtgccccaggctgggagagctatctggggagggggagaggaggccgagcagaatacaccccagagttagggtttgcgactccgcctccctgggacctggattgggtcagatgcctgtccttggaggggacaaggttgactgcttaggaggcgcgacgcacagggctgccaggcctggcccctctctgggaaggttgagagctgagacgggcagccctgtcccttcctccagatccgtctggttttttacaccgtttgttaataaagcctgaaaccgc

SEQ ID NO: 34679 - DNA, 1330 bp, Homo sapiens
cttgatatcgaattcgcggccgcgtcgaaggaccaaaggcgaccggtgcaggtgcacgacgccagctcccttctggggggccggggcctgggggttgccatggcccccagccacctgtcagtgcgggagatgagggaagatgagaagcccctggtgctggagatgctgaaggccggcgtgaaggacacggaaaaccgcgtggccctccatgccttgacacggccgccggccctgctcctcctggcggcggccagcagcggcctgcgctttgtcctggcttccttcgccctggccctcctcctgccggtgttcctggctgtggccgccgtgaagctgggcctgcgggcccgatggggctcgctgcctccgccgggtggcctggggggcccctgggtggccgtgcggggctccggtgacgtgtgtggggtcctggctctggcccctggcacaaatgcaggggacggggcccgggtcacccgcctgtctgtctctcgctggcaccgccgccggggcgtgggcaggaggctgctggccttcgcggaggcccgggctcgggcctgggctgggggcatgggggagccccgggcccggctcgtggtccccgtggctgtggccgcctggggggtgggagggatgctggagggctgtggctaccaggccgaggggggctggggctgcctgggctacacgctggtgagggaattcagcaaagacctgtgaagctacagactgacagccagggcaggggaggagggaggggcgccagcacctgatgatcgcctactgtctgcgggttcttttacctgctctccctcagtgagtcctcaaccaccctgggcccagaaacagaggcctgccgaggggaggagcctggcctctgtccacccgtcagcagtgtgaagtctgttgtgtttgagcttctcagagtggaatgactccttttccttcctggccctcgggggcctctcgaggtcagcctctccaacccctacctcagctcctgtctgcactgagaaacctccccgggtgatgtctgcaaagtctgtgctgtccgtgccccaggctgggagagctatctggggagggggagaggaggccgagcagaatacaccccagagttagggtttgcgactccgcctccctgggacctggattgggtcagatgcctgtccttggaggggacaaggttgactgcttaggaggcgcgacgcacagggctgccaggcctggcccctctctgggaaggttgagagctgagacgggcagccctgtcccttcctccagatccgtctggttttttacaccgtttgttaataaagcctgaaaccgc

SEQ ID NO: 34680 - DNA, 1332 bp, Homo sapiens
cttccagacccgctcccgaaaccttgtcgaaggaccaaaggcgaccggtgcaggtgcacgacgccagctcccttctggggggccggggcctgggggttgccatggcccccagccacctgtcagtgcgggagatgagggaagatgagaagcccctggtgctggagatgctgaaggccggcgtgaaggacacggaaaaccgcgtggccctccatgccttgacacggccgccggccctgctcctcctggcggcggccagcagcggcctgcgctttgtcctggcttccttcgccctggccctcctcctgccggtgttcctggctgtggccgccgtgaagctgggcctgcgggcccgatggggctcgctgcctccgccgggtggcctggggggcccctgggtggccgtgcggggctccggtgacgtgtgtggggtcctggctctggcccctggcacaaatgcaggggacggggcccgggtcacccgcctgtctgtctctcgctggcaccgccgccggggcgtgggcaggaggctgctggccttcgcggaggcccgggctcgggcctgggctgggggcatgggggagccccgggcccggctcgtggtccccgtggctgtggccgcctggggggtgggagggatgctggagggctgtggctaccaggccgaggggggctggggctgcctgggctacacgctggtgagggaattcagcaaagacctgtgaagctacagactgacagccagggcaggggaggagggaggggcgccagcacctgatgatcgcctactgtctgcgggttcttttacctgctctccctcagtgagtcctcaaccaccctgggcccagaaacagaggcctgccgaggggaggagcctggcctctgtccacccgtcagcagtgtgaagtctgttgtgtttgagcttctcagagtggaatgactccttttccttcctggccctcgggggcctctcgaggtcagcctctccaacccctacctcagctcctgtctgcactgagaaacctccccgggtgatgtctgcaaagtctgtgctgtccgtgccccaggctgggagagctatctggggagggggagaggaggccgagcagaatacaccccagagttagggtttgcgactccgcctccctgggacctggattgggtcagatgcctgtccttggaggggacaaggttgactgcttaggaggcgcgacgcacagggctgccaggcctggcccctctctgggaaggttgagagctgagacgggcagccctgtcccttcctccagatccgtctggttttttacaccgtttgttaataaagcctgaaaccgc

SEQ ID NO: 34681 - DNA, 1970 bp, Homo sapiens
ggctggtacggtcggagtgtacggatctgaaaccttgtcgaaggaccaaaggcgaccggtgcaggtgcacgacgccagctcccttctggggggccggggcctgggggttgccatggcccccagccacctgtcagtgcgggagatgagggaagatgagaagcccctggtgctggagatgctgaaggtgagaggcaggggccccagggggcctgggagtggctgcagtgggggaattgcaagtggattcagccaccccctcccacccacctgagccagcctggacccctggagcgggatcttttcctcctgagcctcagccgccctgctgctgaaaaccacagcaggtgtggcaggtgggggctcacccccccagccctactgggaccccagcaccaacgccctccctggtctcccatctccagtcggctgtgcacgccagcacaacagccagctctgtgcctcggaccccaactcttcaaagcacagcccagcaccccaacctagcccagcagcctccctccagcctccactccagcctgaggcaacctccctgtccttacttccctggggcctcactgcggcattgctactgaattgagtgcccccacagctcctaattcactcatccatccatcattcgctctcgttcattcattcactccatacccagtgtgccacactgaacatcggactgtgctgccttcccttcccatttgggagctctcaccccgccccgggcagggtctacctcctctctttgtccaggaggccctagcgtttcggatggctgagccacccctcctgcccacaggccggcgtgaaggacacggaaaaccgcgtggccctccatgccttgacacggccgccggccctgctcctcctggcggcggccagcagcggcctgcgctttgtcctggcttccttcgccctggccctcctcctgccggtgttcctggctgtggccgccgtgaagctgggcctgcgggcccgatggggctcgctgcctccgccgggtggcctggggggcccctgggtggccgtgcggggctccggtgacgtgtgtggggtcctggctctggcccctggcacaaatgcaggggacggggcccgggtcacccgcctgtctgtctctcgctggcaccgccgccggggcgtgggcaggaggctgctggccttcgcggaggcccgggctcgggcctgggctgggggcatgggggagccccgggcccggctcgtggtccccgtggctgtggccgcctggggggtgggagggatgctggagggctgtggctaccaggccgaggggggctggggctgcctgggctacacgctggtgagggaattcagcaaagacctgtgaagctacagactgacagccagggcaggggaggagggaggggcgccagcacctgatgatcgcctactgtctgcgggttcttttacctgctctccctcagtgagtcctcaaccaccctgggcccagaaacagaggcctgccgaggggaggagcctggcctctgtccacccgtcagcagtgtgaagtctgttgtgtttgagcttctcagagtggaatgactccttttccttcctggccctcgggggcctctcgaggtcagcctctccaacccctacctcagctcctgtctgcactgagaaacctccccgggtgatgtctgcaaagtctgtgctgtccgtgccccaggctgggagagctatctggggagggggagaggaggccgagcagaatacaccccagagttagggtttgcgactccgcctccctgggacctggattgggtcagatgcctgtccttggaggggacaaggttgactgcttaggaggcgcgacgcacagggctgccaggcctggcccctctctgggaaggttgagagctgagacgggcagccctgtcccttcctccagatccgtctggttttttacaccgtttgttaataaagcctgaaaccgc

SEQ ID NO: 34682 - DNA, 1537 bp, Homo sapiens
  misc_feature (1340)..(1340): n is a, c, g, or t
  misc_feature (1346)..(1346): n is a, c, g, or t
cttgatatcgaattcgcggccgcgtcgaaggaccaaaggcgaccggtgcaggtgcacgacgccagctcccttctggggggccggggcctgggggttgccatggcccccagccacctgtcagtgcgggagatgagggaagatgagaagcccctggtgctggagatgctgaaggccggcgtgaaggacacggaaaaccgcgtggccctccatgccttgacacggccgccggccctgctcctcctggcggcggccagcagcggcctgcgctttgtcctggcttccttcgccctggccctcctcctgccggtgttcctggctgtggccgccgtgaagctgggcctgcgggcccgatggggctcgctgcctccgccgggtggcctggggggcccctgggtggccgtgcggggctccggtgacgtgtgtggggtcctggctctggcccctggcacaaatgcaggggacggggcccgggtcacccgcctgtctgtctctcgctggcaccgccgccggggcgtgggcaggaggctgctggccttcgcggaggcccgggctcgggcctgggctgggggcatgggggagccccgggcccggctcgtggtccccgtggctgtggccgcctggggggtgggagggatgctggagggctgtggctaccaggccgaggggggctggggctgcctgggctacacgctggtgagggaattcagcaaagacctgtgaagctacagactgacagccagggcaggggaggagggaggggcgccagcacctgatgatcgcctactgtctgcgggttcttttacctgctctccctcagtgagtcctcaaccaccctgggcccagaaacagaggcctgccgaggggaggagcctggcctctgtccacccgtcagcagtgtgaagtctgttgtgtttgagcttctcagagtggaatgactccttttccttcctggccctcgggggcctctcgaggtcagcctctccaacccctacctcagctcctgtctgcactgagaaacctccccgggtgatgtctgcaaagtctgtgctgtccgtgccccaggctgggagagctatctggggagggggagaggaggccgagcagaatacaccccagagttagggtttgcgactccgcctccctgggacctggattgggtcagatgcctgtccttggaggggacaaggttgactgcttaggaggcgcgacgcacagggctgccaggcctggcccctctctgggaaggttgagagctgagacgggcagccctgtcccttcctccagatccgtctggttttttacaccgtttgttaataaagcctgaaaccgcaaaaaaaacncaaaanaaaaagacacgaaaaaactcgagcgacaaacagagaagcaggggggcacacaaccggaacaaaagcagaacaagggacacaacggggacactgacaccagacatagcgggcacagagtgcacacactcgggggcacacaccgaagagaggagcaacatagtgcagcaacgacagagaaaacacagcaaaga

SEQ ID NO: 34683 - DNA, 1681 bp, Homo sapiens
ggctggtacggtcggagtgtacggatctgaaaccttgtcgaaggaccaaaggcgaccggtgcaggtgcacgacgccagctcccttctggggggccggggcctgggggttgccatggcccccagccacctgtcagtgcgggagatgagggaagatgagaagcccctggtgctggagatgctgaaggtgagaggcaggggccccagggggcctgggagtggctgcagtgggggaattgcaagtggattcagccaccccctcccacccacctgagccagcctggacccctggagcgggatcttttcctcctgagcctcagccgccctgctgctgaaaaccacagcaggtgtggcaggtgggggctcacccccccagccctactgggaccccagcaccaacgccctccctggtctcccatctccagtcggctgtgcacgccagcacaacagccagctctgtgcctcggaccccaactcttcaaagcacagcccagcaccccaacctagcccagcagcctccctccagcctccactccagcctgaggcaacctccctgtccttacttccctggggcctcactgcggcattgctactgaattgagtgcccccacagctcctaattcactcatccatccatcattcgctctcgttcattcattcactccatacccagtgtgccacactgaacatcggactgtgctgccttcccttcccatttgggagctctcaccccgccccgggcagggtctacctcctctctttgtccaggaggccctagcgtttcggatggctgagccacccctcctgcccacaggccggcgtgaaggacacggaaaaccgcgtggccctccatgccttgacacggccgccggccctgctcctcctggcggcggccagcagcggcctgcgctttgtcctggcttccttcgccctggccctcctcctgccggtgtccccgtggctgtggccgcctggggggtgggagggatgctggagggctgtggctaccaggccgaggggggctggggctgcctgggctacacgctggtgagggaattcagcaaagacctgtgaagctacagactgacagccagggcaggggaggagggaggggcgccagcacctgatgatcgcctactgtctgcgggttcttttacctgctctccctcagtgagtcctcaaccaccctgggcccagaaacagaggcctgccgaggggaggagcctggcctctgtccacccgtcagcagtgtgaagtctgttgtgtttgagcttctcagagtggaatgactccttttccttcctggccctcgggggcctctcgaggtcagcctctccaacccctacctcagctcctgtctgcactgagaaacctccccgggtgatgtctgcaaagtctgtgctgtccgtgccccaggctgggagagctatctggggagggggagaggaggccgagcagaatacaccccagagttagggtttgcgactccgcctccctgggacctggattgggtcagatgcctgtccttggaggggacaaggttgactgcttaggaggcgcgacgcacagggctgccaggcctggcccctctctgggaaggttgagagctgagacgggcagccctgtcccttcctccagatccgtctggttttttacaccgtttgttaataaagcctgaaaccgc

SEQ ID NO: 34684 - DNA, 1344 bp, Homo sapiens
cttgatatcgaattcgcggccgcgtcgaaggaccaaaggcgaccggtgcaggtgcacgacgccagctcccttctggggggccggggcctgggggttgccatggcccccagccacctgtcagtgcgggagatgagggaagatgagaagcccctggtgctggagatgctgaaggccggcgtgaaggacacggaaaaccgcgtggccctccatgccttgacacggccgccggccctgctcctcctggcggcggccagcagcggcctgcgctttgtcctggcttccttcgccctggccctcctcctgccggtgttcctggctgtggccgccgtgaagctgggcctgcgggcccgatggggctcgctgcctccgccgggtggcctggggggcccctgggtggccgtgcggggctccggtgacgtgtgtggggtcctggctctggcccctggcacaaatgcaggggacggggcccgggtcacccgcctgtctgtctctcgctggcaccgccgccggggcgtgggcaggaggctgctggccttcgcggaggcccgggctcgggcctgggctgggggcatgggggagccccgggcccggctcgtggtccccgtggctgtggccgcctggggggtgggagggatgctggagggctgtggctaccaggccgaggggggctggggctgcctgggctacacgctggtgagggaattcagcaaagacctgtgaagctacagactgacagccagggcaggggaggagggaggggcgccagcacctgatgatcgcctactgtctgcgggttcttttacctgctctccctcagtgagtcctcaaccaccctgggcccagaaacagaggcctgccgaggggaggagcctggcctctgtccacccgtcagcagtgtgaagtctgttgtgtttgagcttctcagagtggaatgactccttttccttcctggccctcgggggcctctcgaggtcagcctctccaacccctacctcagctcctgtctgcactgagaaacctccccgggtgatgtctgcaaagtctgtgctgtccgtgccccaggctgggagagctatctggggagggggagaggaggccgagcagaatacaccccagagttagggtttgcgactccgcctccctgggacctggattgggtcagatgcctgtccttggaggggacaaggttgactgcttaggaggcgcgacgcacagggctgccaggcctggcccctctctgggaaggttgagagctgagacgggcagccctgtcccttcctccagatccgtctggttttttacaccgttgtataacatccctttttctcccttcctccttttctg

SEQ ID NO: 34685 - DNA, 1353 bp, Homo sapiens
cttgatatcgaattcgcggccgcgtcgaaggaccaaaggcgaccggtgcaggtgcacgacgccagctcccttctggggggccggggcctgggggttgccatggcccccagccacctgtcagtgcgggagatgagggaagatgagaagcccctggtgctggagatgctgaaggccggcgtgaaggacacggaaaaccgcgtggccctccatgccttgacacggccgccggccctgctcctcctggcggcggccagcagcggcctgcgctttgtcctggcttccttcgccctggccctcctcctgccggtgttcctggctgtggccgccgtgaagctgggcctgcgggcccgatggggctcgctgcctccgccgggtggcctggggggcccctgggtggccgtgcggggctccggtgacgtgtgtggggtcctggctctggcccctggcacaaatgcaggggacggggcccgggtcacccgcctgtctgtctctcgctggcaccgccgccggggcgtgggcaggaggctgctggccttcgcggaggcccgggctcgggcctgggctgggggcatgggggagccccgggcccggctcgtggtccccgtggctgtggccgcctggggggtgggagggatgctggagggctgtggctaccaggccgaggggggctggggctgcctgggctacacgctggtgagggaattcagcaaagacctgtgaagctacagactgacagccagggcaggggaggagggaggggcgccagcacctgatgatcgcctactgtctgcgggttcttttacctgctctccctcagtgagtcctcaaccaccctgggcccagaaacagaggcctgccgaggggaggagcctggcctctgtccacccgtcagcagtgtgaagtctgttgtgtttgagcttctcagagtggaatgactccttttccttcctggccctcgggggcctctcgaggtcagcctctccaacccctacctcagctcctgtctgcactgagaaacctccccgggtgatgtctgcaaagtctgtgctgtccgtgccccaggctgggagagctatctggggagggggagaggaggccgagcagaatacaccccagagttagggtttgcgactccgcctccctgggacctggattgggtcagatgcctgtccttggaggggacaaggttgactgcttaggaggcgcgacgcacagggctgccaggcctggcccctctctgggaaggttgagagctgagacgggcagccctgtcccttcctccagatccgtttaatgctgtacaccgttgtaaactcgcgggtcctcggggtgggtggggtggtgtgtgtggtg

SEQ ID NO: 34686 - DNA, 1463 bp, Homo sapiens
ggctggtacggtcggagtgtacggatctgaaaccttgtcgaaggaccaaaggcgaccggtgcaggtgcacgacgccagctcccttctggggggccggggcctgggggttgccatggcccccagccacctgtcagtgcgggagatgagggaagatgagaagcccctggtgctggagatgctgaaggtgagaggcaggggccccagggggcctgggagtggctgcagtgggggaattgcaagtggattcagccaccccctcccacccacctgagccagcctggacccctggagcgggatcttttcctcctgagcctcagccgccctgctgctgaaaaccacagcaggtgtggcaggtgggggctcacccccccagccctactgggaccccagcaccaacgccctccctggtctcccatctccagtcggctgtgcacgccagcacaacagccagctctgtgcctcggaccccaactcttcaaagcacagcccagcaccccaacctagcccagcagcctccctccagcctccactccagcctgaggcaacctccctgtccttacttccctggggcctcactgcggcattgctactgaattgagtgcccccacagctcctaattcactcatccatccatcattcgctctcgttcattcattcactccatacccagtgtgccacactgaacatcggactgtgctgccttcccttcccatttgggagctctcaccccgccccgggcagggtctacctcctctctttgtccaggaggccctagcgtttcggatggctgagccacccctcctgcccacaggccggcgtgaaggacacggaaaaccgcgtggccctccatgccttgacacggccgccggccctgctcctcctggcggcggccagcagcggcctgcgctttgtcctggcttccttcgccctggccctcctcctgccggtgtccccgtggctgtggccgcctggggggtgggagggatgctggagggctgtggctaccaggccgaggggggctggggctgcctgggctacacgctggtgagggaattcagcaaagacctgtgaagctacagactgacagccagggcaggggaggagggaggggcgccagcacctgatgatcgctcctgtctgcactgagaaacctccccgggtgatgtctgcaaagtctgtgctgtccgtgccccaggctgggagagctatctggggagggggagaggaggccgagcagaatacaccccagagttagggtttgcgactccgcctccctgggacctggattgggtcagatgcctgtccttggaggggacaaggttgactgcttaggaggcgcgacgcacagggctgccaggcctggcccctctctgggaaggttgagagctgagacgggcagccctgtcccttcctccagatccgtctggttttttacaccgtttgttaataaagcctgaaaccgc

SEQ ID NO: 34687 - DNA, 410 bp, Homo sapiens
cgggagactttagcaaggtcgctgagtattgtggggggcgcctgtcctgccgagatcctcgcttgggggccccgagggttctcagtgtcctgatctgggaagtgccgttgctgctccctacccctcgggggagctttggggacagaggtgcccccctgacgctgacctacttatgttctcaccaggtgcacgacgccagctcccttctggggggccggggcctgggggttgccatggcccccagccacctgtcagtgcgggagatgagggaagatgagaagcccctggtgctggagatgctgaaggtgagaggcaggggccccagggggcctgggagtggctgcagtgggggaattgcaagtggattcagccaccccctcccacccacctgagccagcctggacccctgg

SEQ ID NO: 34688 - DNA, 377 bp, Homo sapiens
atgaaacctgggccatgtgctgtgtggtacattctatgctcatcactggggcttatcaacatggaaagtttgatgcttagaaatagaggtattggccgggtgtggtagttcacacctgtaatcccagcactttgggaggccgaggcaggcagatcacttgaggtcaggagatcgagaccagcctggccaacatggtgaaaccctgtctctactaaaaatacaaaaattacccgggcgtgcagcatgtgcatgttagtcccagctactccagaggctgagacaggagaatcactcgaacccagtaggcggaggttacagtgggccaagatcgcgccactgcattccagcctgggtgacagggtgaggctccatctctt

SEQ ID NO: 34689 - DNA, 865 bp, Homo sapiens
cttcctagcttttctccgacacatcatataggcccctttcctcccgtgtgctggccagcctcctaagcagccactccagtgaggtcagggtggagctgagactgtgtgcctccctgctttctactgacagttcaaaaaatgtgacttttgtagagcacaacccacttggtatacccttggacacagtccagtcttttaaagcgtaaagttgagagaaacaatggaattctttcaggattataatgtataaattagcactcaaagtgctgagaaagctggactaaaattttaacatcttaagtttctcatttttctggggactcaacaaatttaggaatccacatcaaaagcaaaaagaaagaatgtacttcttttaaacaattttcagcactttctatccctttactaaataaataccacccatcctaccaaaggatttaactaaaagcagttttgacagtagctatgttggctgattaggctgatgcctaagcattctttaaggaaaaattgatgtagttggttagattgaaggaggtttcttccaagttctttcttcctattgaattgcatctgaaacgttcctttgctgcccagttctttagtgggcaagttttagttggtgagaggtgagagagacagcctggatccagatccattgcttcaactcattttttctgaattcccttcagagatcaaatttaagaatgccttctgggttcaattttaaaaactccaaaatttctaaagcaaaaggaaggaaacctcaaacatattttaaataacagatgtttgtttttactgacaccctgccgtttattttctgggtgggctgtaagaaaactagggtatggacaagacacag

SEQ ID NO: 34690 - DNA, 13935 bp, Homo sapiens
  misc_feature (13516)..(13516): n is a, c, g, or t
catgaggcttttaagaatcatgtgttcaatgtagacaatgcaaaatttgtagttaaatttgacctcaattgactacaaaatttgtagttaaatttgactacaattggaaatgccaaaaactcactaatagggatgtgggcgctatctccaactgtctttgcacttctgagtaagaatctgatgattgtgcacagtgacctggctgttcacttccctgccattcagtatgctgtgctctacacattgtattctcattgtaccaggcatgatcactttatctctagtagcctcagttcttcctctccttctttgtttgatggagctgtgattagcactgtaactacggctacaaagaaacatttctcaattatattaaatcttctgggaatattacttaagaaagataaccttaaccaggacacgaggaaactgttaatgacttgggctttggaagcagctgttttaatgaagaagtctgaaacatacgcacctttattctctcttccgtctttccataaattttgcaaaggccttttagccaacactctcgttgaagatgtgaatatctgtctgcaggcatgcagcagtctacatgctctgtcctcttccttgccagatgatcttttacagagatgtgtcgatgtttgccgtgttcaactagtgcacagtggaactcgtattcgacaagcatttggaaaactgttgaaatcaattcctttagatgttgtcctaagcaataacaatcacacagaaattcaagaaatttctttagcattaagaagtcacatgagtaaagcaccaagtaatacattccacccccaagatttctctgatgttattagttttattttgtatgggaactctcatagaacagggaaggacaattggttggaaagactgttctatagctgccagagactggataagcgtgaccagtcaacaattccacgcaatctcctgaagacagatgctgtcctttggcagtgggccatatgggaagctgcacaattcactgttctttctaagctgagaaccccactgggcagagctcaagacaccttccagacaattgaaggtatcattcgaagtctcgcagctcacacattaaaccctgatcaggatgttagtcagtggacaactgcagacaatgatgaaggccatggtaacaaccaacttagacttgttcttcttctgcagtatctggaaaatctggagaaattaatgtataatgcatacgagggatgtgctaatgcattaacttcacctcccaaggtcattagaacttttttctataccaatcgccaaacttgtcaggactggctaacgcggattcgactctccatcatgagggtaggattgttggcaggccagcctgcagtgacagtgagacatggctttgacttgcttacagagatgaaaacaaccagcctatctcaggggaatgaattggaagtaaccattatgatggtggtagaagcattatgtgaacttcattgtcctgaagctatacagggaattgctgtctggtcatcatctattgttggaaaaaatcttctgtggattaactcagtggctcaacaggctgaagggaggtttgaaaaggcctctgtggagtaccaggaacacctgtgtgccatgacaggtgttgattgctgcatctccagctttgacaaatcggtgctcaccttagccaatgctgggcgtaacagtgccagcccgaaacattctctgaatggtgaatccagaaaaactgtgctgtccaaaccgactgactcttcccctgaggttataaattatttaggaaataaagcatgtgagtgctacatctcaattgccgattgggctgctgtgcaggaatggcagaacgctatccatgacttgaaaaagagtaccagtagcacttccctcaacctgaaagctgacttcaactatataaaatcattaagcagctttgagtctggaaaatttgttgaatgtaccgagcagttagaattgttaccaggagaaaatatcaatctacttgctggaggatcaaaagaaaaaatagacatgaaaaaactgcttcctaacatgttaagtccggatccgagggaacttcagaaatccattgaagttcaattgttaagaagttctgtttgtttggcaactgctttaaacccgatagaacaagatcagaagtggcagtctataactgaaaatgtggtaaagtacttgaagcaaacatcccgcatcgctattggacctctgagactttctactttaacagtttcacagtctttgccagttctaagtaccttgcagctgtattgctcatctgctttggagaacacagtttctaacagactttcaacagaggactgtcttattccactcttcagtgaagctttacgttcatgtaaacagcatgacgtgaggccatggatgcaggcattaaggtatactatgtaccagaatcagttgttggagaaaattaaagaacaaacagtcccaattagaagccatctcatggaattaggtctaacagcagcaaaatttgctagaaaacgagggaatgtgtcccttgcaacaagactgctggcacagtgcagtgaagttcagctgggaaagaccaccactgcacaggatttagtccaacattttaaaaaactatcaacccaaggtcaagtggatgaaaaatgggggcccgaacttgatattgaaaaaaccaaattgctttatacagcaggccagtcaacacatgcaatggaaatgttgagttcttgtgccatatctttctgcaagtctgtgaaagctgaatatgcagttgctaaatcaattctgacactggctaaatggatccaggcagaatggaaagagatttcaggacagctgaaacaggtttacagagctcagcaccaacagaacttcacaggtctttctactttgtctaaaaacatactcactctaatagaactgccatctgttaatacgatggaagaagagtatcctcggatcgagagtgaatctacagtgcatattggagttggagaacctgacttcattttgggacagttgtatcacctgtcttcagtacaggcacctgaagtagccaaatcttgggcagcgttggccagctgggcttataggtggggcagaaaggtggttgacaatgccagtcagggagaaggtgttcgtctgctgcctagagaaaaatctgaagttcagaatctacttccagacactataactgaggaagagaaagagagaatatatggtattcttggacaggctgtgtgtcggccggcggggattcaggatgaagatataacacttcagataactgagagtgaagacaacgaagaagatgacatggttgatgttatctggcgtcagttgatatcaagctgcccatggctttcagaacttgatgaaagtgcaactgaaggagttattaaagtgtggaggaaagttgtagatagaatattcagcctgtacaaactctcttgcagtgcatactttactttccttaaactcaacgctggtcaaattcctttagatgaggatgaccctaggctgcatttaagtcacagagtggaacagagcactgatgacatgattgtgatggccacattgcgcctgctgcggttgctcgtgaagcacgctggtgagcttcggcagtatctggagcacggcttggagacaacacccactgcaccatggagaggaattattccgcaacttttctcacgcttaaaccaccctgaagtgtatgtgcgccaaagtatttgtaaccttctctgccgtgtggctcaagattccccacatctcatattgtatcctgcaatagtgggtaccatatcgcttagtagtgaatcccaggcttcaggaaataaattttccactgcaattccaactttacttggcaatattcaaggagaagaattgctggtttctgaatgtgagggaggaagtcctcctgcatctcaggatagcaataaggatgaacctaaaagtggattaaatgaagaccaagccatgatgcaggattgttacagcaaaattgtagataagctgtcctctgcaaaccccaccatggtattacaggttcagatgctcgtggctgaactgcgcagggtcactgtgctctgggatgagctctggctgggagttttgctgcaacaacacatgtatgtcctgagacgaattcagcagcttgaagatgaggtgaagagagtccagaacaacaacaccttacgcaaagaagagaaaattgcaatcatgagggagaagcacacagctttgatgaagcccatcgtatttgctttggagcatgtgaggagtatcacagcggctcctgcagaaacacctcatgaaaaatggtttcaggataactatggtgatgccattgaaaatgccctagaaaaactgaagactccattgaaccctgcaaagcctgggagcagctggattccatttaaagagataatgctaagtttgcaacagagagcacagaaacgtgcaagttacatcttgcgtcttgaagaaatcagtccatggttggctgccatgactaacactgaaattgctcttcctggggaagtctcagccagagacactgtcacaatccatagtgtgggcggaaccatcacaatcttaccgactaaaaccaagccaaagaaacttctctttcttggatcagatgggaagagctatccttatcttttcaaaggactggaggatttacatctggatgagagaataatgcagttcctatctattgtgaataccatgtttgctacaattaatcgccaagaaacaccccggttccatgctcgacactattctgtaacaccactaggaacaagatcaggactaatccagtgggtagatggagccacacccttatttggtctttacaaacgatggcaacaacgggaagctgccttacaagcacaaaaggcccaagattcctaccaaactcctcagaatcctggaattgtaccccgtcctagtgaactttattacagtaaaattggccctgctttgaaaacagttgggcttagcctggatgtgtcccgtcgggattggcctcttcatgtaatgaaggcagtattggaagagttaatggaggccacacccccgaatctccttgccaaagagctctggtcatcttgcacaacacctgatgaatggtggagagttacgcagtcttatgcaagatctactgcagtcatgtctatggttggatacataattggccttggagacagacatctggataatgttcttatagatatgacgactggagaagttgttcacatagattacaatgtttgctttgaaaaaggtaaaagccttagagttcctgagaaagtaccttttcgaatgacacaaaacattgaaacagcactgggtgtaactggagtagaaggtgtatttaggctttcatgtgagcaggttttacacattatgcggcgtggcagagagaccctgctgacgctgctggaggcctttgtgtacgaccctctggtggactggacagcaggaggcgaggctgggtttgctggtgctgtctatggtggaggtggccagcaggccgagagcaagcagagcaagagagagatggagcgagagatcacccgcagcctgttttcttctagagtagctgagattaaggtgaactggtttaagaatagagatgagatgctggttgtgcttcccaagttggacggtagcttagatgaatacctaagcttgcaagagcaactgacagatgtggaaaaactgcagggcaaactactggaggaaatagagtttctagaaggagctgaaggggtggatcatccttctcatactctgcaacacaggtattctgagcacacccaactacagactcagcaaagagctgttcaggaagcaatccaggtgaagctgaatgaatttgaacaatggataacacattatcaggctgcattcaataatttagaagcaacacagcttgcaagcttgcttcaagagataagcacacaaatggaccttggtcctccaagttacgtgccagcaacagcctttctgcagaatgctggtcaggcccacttgattagccagtgcgagcagctggagggggaggttggtgctctcctgcagcagaggcgctccgtgctccgtggctgtctggagcaactgcatcactatgcaaccgtggccctgcagtatccgaaggccatatttcagaaacatcgaattgaacagtggaagacctggatggaagagctcatctgtaacaccacagtagagcgttgtcaagagctctataggaaatatgaaatgcaatatgctccccagccacccccaacagtgtgtcagttcatcactgccactgaaatgaccctgcagcgatacgcagcagacatcaacagcagacttattagacaagtggaacgcttgaaacaggaagctgtcactgtgccagtttgtgaagatcagttgaaagaaattgaacgttgcattaaagttttccttcatgagaatggagaagaaggatctttgagtctagcaagtgttattatttctgccctttgtacccttacaaggcgtaacctgatgatggaaggtgcagcgtcaagtgctggagaacagctggttgatctgacttctcgggatggagcctggttcttggaggaactctgcagtatgagcggaaacgtcacctgcttggttcagttactgaagcagtgccacctggtgccacaggacttagatatcccgaaccccatggaagcgtctgagacagttcacttagccaatggagtgtatacctcacttcaggaattgaattcgaatttccggcaaatcatatttccagaagcacttcgatgtttaatgaaaggggaatacacgttagaaagtatgctgcatgaactggacggtcttattgagcagaccaccgatggcgttcccctgcagactctagtggaatctcttcaggcctacttaagaaacgcagctatgggactggaagaagaaacacatgctcattacatcgatgttgccagactactacatgctcagtacggtgaattaatccaaccgagaaatggttcagttgatgaaacacccaaaatgtcagctggccagatgcttttggtagcattcgatggcatgtttgctcaagttgaaactgctttcagcttattagttgaaaagttgaacaagatggaaattcccatagcttggcgaaagattgacatcataagggaagccaggagtactcaagttaatttttttgatgatgataatcaccggcaggtgctagaagagattttctttctaaaaagactacagactattaaggagttcttcaggctctgtggtaccttttctaaaacattgtcaggatcaagttcacttgaagatcagaatactgtgaatgggcctgtacagattgtcaatgtgaaaaccctttttagaaactcttgtttcagtgaagaccaaatggccaaacctatcaaggcattcacagctgactttgtgaggcagctcttgatagggctacccaaccaagccctcggactcacactgtgcagttttatcagtgctctgggtgtagacatcattgctcaagtagaggcaaaggactttggtgccgaaagcaaagtttctgttgatgatctctgtaagaaagcggtggaacataacatccagatagggaagttctctcagctggttatgaacagggcaactgtgttagcaagttcttacgacactgcctggaagaagcatgacttggtgcgaaggctagaaaccagtatttcttcttgtaagacaagcctgcagcgggttcagctgcatattgccatgtttcagtggcaacatgaagatctacttatcaatagaccacaagccatgtcagtcacacctcccccacggtctgctatcctaaccagcatgaaaaagaagctgcataccctgagccagattgaaacttctattgcgacagttcaggagaagctagctgcacttgaatcaagtattgaacagcgactcaagtgggcaggtggtgccaaccctgcattggcccctgtactacaagattttgaagcaacgatagctgaaagaagaaatcttgtccttaaagagagccaaagagcaagtcaggtcacatttctctgcagcaatatcattcattttgaaagtttacgaacaagaactgcagaagccttaaacctggatgcggcgttatttgaactaatcaagcgatgtcagcagatgtgttcgtttgcatcacagtttaacagttcagtgtctgagttagagcttcgtttattacagagagtggacactggtcttgaacatcctattggcagctctgaatggcttttgtcagcacacaaacagttgacccaggatatgtctactcagagggcaattcagacagagaaagagcagcagatagaaacggtctgtgaaacaattcagaatctggttgataatataaagactgtgctcactggtcataaccgacagcttggagatgtcaaacatctcttgaaagctatggctaaggatgaagaagctgctctggcagatggtgaagatgttccctatgagaacagtgttaggcagtttttgggtgaatataaatcatggcaagacaacattcaaacagttctatttacattagtccaggctatgggtcaggttcgaagtcaagaacacgttgaaatgctccaggaaatcactcccaccttgaaagaactgaaaacacaaagtcagagtatctataataatttagtgagttttgcatcacccttagtcaccgatgcaacaaatgaatgttcgagtccaacgtcatctgctacttatcagccatccttcgctgcagcagtccggagtaacactggccagaagactcagcctgatgtcatgtcacagaatgctagaaagctgatccagaaaaatcttgctacatcagctgatactccaccaagcaccgttccaggaactggcaagagtgttgcttgtagtcctaaaaaggcagtcagagaccctaaaactgggaaagcggtgcaagagagaaactcctatgcagtgagtgtgtggaagagagtgaaagccaagttagagggccgagatgttgatccgaataggaggatgtcagttgctgaacaggttgactatgtcattaaggaagcaactaatctagataacttggctcagctgtatgaaggttggacagcctgggtgtgaatggcaagacagtagatgagtctggttaagcgaggtcagacatccaccagaatcaactcagcctcaggcatccaaagccacaccacagtcggtggtgatgcaactgggggcttactctgaggaaacctaggaaatctcggtgcactaggaagtgaatcccgcaggacagctgcactcagggatacgcccaacaccatggcctgcaaccccagggtcaagggtgaaggaaagcaagctcaccgcctgaacacggagattgtctttctgccacagaacagcagcagacgtgtcgggaggttagctgcggaaagaaatcgggatgccgcggagcacagagtgatttggaactccattccacctgaccctgtgtgtacaatccaggaaaaaaacaaaccccactcagaaacagagaaaactggggtcgcgaagaaatcacagccaaggaagatttgatgcattcagattctcgtgtaacacttgttgcttggcaacagtactggttgggttgaccagtaagtagaaaaaggctaaaggctatgcgatatgaatttcagaaatggactgaaaatggagagctatgtaacagatacactacagtagaagaacttacttctgaaatgaagggaaaaaaaccaccccatcgttccctactcctccccaccacttacccgttccccctttacctaatctagtagattagccatctttcaaattcacttttatttcagtccttatatttcatatacttccgtctcgatgctgttaacaacttctgataacatggaaaattcaaggattgtttaaaggtctgatgatcacacacaaaatgtaattccggttatttaagtcatttctgtgattctatcatgtacagtttccagaattgtcactgtgcattcaaaagtaatgaatctaacagacatttgatttaatgtacactcccttttgcttatagtgtgcattttttttggaggtcattcaaattttccctcttctgtgatagctgtagtttctttcatagaaagtagctaatccagtgtaatcttttacctttttaaaaaccaagatagagtatctattagagttttacattgttgatgatagattaacaataaagtgatgttctggtggaggtagactgaaatttttttaattcatgtttttcatttgatacttttaatttacacttagtaaattaaaagttgtttaatttacttggcattttaggacatgtacatgaaacagtgaaaatgagatccaccaacatcttttattaagttcagttattagtctgtgaagtgctttactttttgcacaattttaatagcttgctattcagtaatacattatagtgaattcatgatcaaggtttccttaaatttagcattgcatttcagtactgactgtgtaagctaaattgctgatccaaaataaaaacccagactagaatagggttcttaaaatcaagtatcaatacaaaatagaacacaattaaaatcttaattgttggctgggcacagtggctcacgcctgtaatcccagcactttgggaggccgaggcgggcggatcatgaggttaggagagcgagaccatcctggctaacacggtgaaaccccgtctttactaaaaatacaaaaaaaattagccgggtgtggtggcgggcgcctgtagtcccagctactcgggaggctgaggcaggagaatggcgtgaacccaggaggcggagcttgcagtgagccgagattgtgccactgcactccagcctgggcaacagagctagactctgtgtcaaaaataaatgactagataaaaaaaaaaattgtttgagtacattttccctgcattttagagattaggacagtggtcactttctagttgccgtcttcacagacaaacttgaaaggtattaaggaaaaaattccacatagctctgggccttttttgtattctgattgccacgttaatctgtaatcgttaagtacccatgaaagaatgtgtttcagtatcagtgctttttggtactttaacaagtatgtaggcacggtggatttttttgaaatacccatgtgtccaatagcaagttaaggaacctagcgcatcaaattttgttttcttcattcatttggaaccttattttcgcaaaaaacctagctggaataataatgccatatgtattttgcacactgctttattttctagaggctctgggagcaaattacattcatcacattacctctgctctctcaagattaaagtctttcagcaacattctttattgtcatcataaggaaaaacttttatcgcaatgatagtcagttcacattagtttagcactatagatagtattcagaaattgctttctctttggtaaagaagataaataggtgaattttattgcctgtgttttcaggcttcagaggtacctggcaccttactcaagcaaaaacaaaaaacagctttacttcaaaagcatgtgcctctggtaaattatccatcacttttgttttaaagtggtccctccaagaataatgtggcatacacagtgggtttggttgtaaggcagatgtaatagatgacttcaaaagcctgctccttactgcactctggacaaggccctggtctgtatagtttggcttcctctgttaagtcattctacaaggtgacttgccatttgaactttcgtaagagacctcagcagttagactgagaaaagttagagtgctgtagttatgaagtcatacatttttgataaaatacctgtggaaaaccagggatcctctcctgtttctctctcttgcctccccctttccctccattcctctgtcgcctccccctctcctccactttctttaagaatcagggggtacagaataacctacaaacaacctcttcaaagtacccttggaaattgaagttcaatcttaagttttttgctgtctttaatttactagaattgcctaatttttagttgatttctctacagagcttagcttgtgtagttatttctcttttactgttgctttggtgtgtcttgaagtttgattgattatttttggtcattgagttcttagtgtagtttgctagatgattattaagattcttttgtgtctgacacttgtggtgagttgcttttgaaatctgttgagatttccatgtgagaactgataatcaggctcttgatctgcttccctaaattacttttttagagcccaaaccccaggtttagggtgagggtttgtaatacaaagaaacacttccatcacttctgcccttaacccttgcctctattacctaagcttagtaagtagttttcttaatattgtccaatgtttggtgttatctgcattgttttttgtttttttaattgtggttgttctgacgtgtgaaatttaaggaaagagccattttttaaaaatgccgagcagggcaatgcaagtacagccaaatattagacttgatgtgcaatcttcggtcctttttaatctggggtattataggcagtactttaaattgcaaagtcttccgggcctattttcctctacatttttgtaattaactctgggggcttacttgttttggcagtactgaaatcaaaggagctggttcttcttttctcccaattattttcatatgaaagcacctacaattagcctgttagtcctattcagatacatcaaatatcagtgaatgctttactattcgcacatttaagcatctttgttttacataaaattagagtatgaaaaccagtgttcaattttttatcttgttgagcttgtaaaatgccagcaatttaaaactaggacttttccccccataagccaaggaggtagaattactaatacaagggttaaagaaggtagattttgttttcaatatttgggtaatattagaaagattcttcccacagggaagaactagcaagtgtcccaattttttccaaacgttggggaggggaaaattcactgtatcatgaaaccctaagggtttgttgcacttcctgctttttaggcctggataacagtatcaccatccttatttacagaagggtaaaactgactcttaatgagaaaagctttataagttcaagggctgtaaaatatgaactacttagggtcgtttgccttccatgggaacttggctagacttagaaaaagctgtttgttgtgctaatgtaaaagtgtcatacaatttagaagatttttgaagatggtaaacttagaagaattctatgttctgaaatgcacacttttagaatgtttttctttgaaaacaggctaatagttntttctttttttgacaaagtttcagctcctctttaaagttattgtgtcatttttctggtttaaatttcccttatatttccacctgtaatgtcagtggcaacaacatcatacttcacttacttgttaatttactttttacccttattctaagagcaagttgagttgaactgaatcttccttgtcttagtaacaatgtataaatagtggcttttctgtacaaaaggttgtaatgcctcctgatggatataattttgtgattgtatttaaaagttgaataaatcacaccagcttcctgaaaatgttcataatgcatcttttggaaaacaaatacatgcctactttgtgcatatttgcattaacatggcaaagattgtatgaaatacctgtttttcagaaaataaaggttcagtctcaaaagat

SEQ ID NO: 34691 - DNA, 13881 bp, Homo sapiens
  misc_feature (13462)..(13462): n is a, c, g, or t
catgaggcttttaagaatcatgtgttcaatgtagacaatgcaaaatttgtagttaaatttgacctcaattgactacaaaatttgtagttaaatttgactacaattggaaatgccaaaaactcactaatagggatgtgggcgctatctccaactgtctttgcacttctgagtaagaatctgatgattgtgcacagtgacctggctgttcacttccctgccattcagtatgctgtgctctacacattgtattctcattgtaccaggcatgatcactttatctctagtagcctcagttcttcctctccttctttgtttgatggagctgtgattagcactgtaactacggctacaaagaaacatttctcaattatattaaatcttctgggaatattacttaagaaagataaccttaaccaggacacgaggaaactgttaatgacttgggctttggaagcagctgttttaatgaagaagtctgaaacatacgcacctttattctctcttccgtctttccataaattttgcaaaggccttttagccaacactctcgttgaagatgtgaatatctgtctgcaggcatgcagcagtctacatgctctgtcctcttccttgccagatgatcttttacagagatgtgtcgatgtttgccgtgttcaactagtgcacagtggaactcgtattcgacaagcatttggaaaactgttgaaatcaattcctttagatgttgtcctaagcaataacaatcacacagaaattcaagaaatttctttagcattaagaagtcacatgagtaaagcaccaagtaatacattccacccccaagatttctctgatgttattagttttattttgtatgggaactctcatagaacagggaaggacaattggttggaaagactgttctatagctgccagagactggataagcgtgaccagtcaacaattccacgcaatctcctgaagacagatgctgtcctttggcagtgggccatatgggaagctgcacaattcactgttctttctaagctgagaaccccactgggcagagctcaagacaccttccagacaattgaaggtatcattcgaagtctcgcagctcacacattaaaccctgatcaggatgttagtcagtggacaactgcagacaatgatgaaggccatggtaacaaccaacttagacttgttcttcttctgcagtatctggaaaatctggagaaattaatgtataatgcatacgagggatgtgctaatgcattaacttcacctcccaaggtcattagaacttttttctataccaatcgccaaacttgtcaggactggctaacgcggattcgactctccatcatgagggtaggattgttggcaggccagcctgcagtgacagtgagacatggctttgacttgcttacagagatgaaaacaaccagcctatctcaggggaatgaattggaagtaaccattatgatggtggtagaagcattatgtgaacttcattgtcctgaagctatacagggaattgctgtctggtcatcatctattgttggaaaaaatcttctgtggattaactcagtggctcaacaggctgaagggaggtttgaaaaggcctctgtggagtaccaggaacacctgtgtgccatgacaggtgttgattgctgcatctccagctttgacaaatcggtgctcaccttagccaatgctgggcgtaacagtgccagcccgaaacattctctgaatggtgaatccagaaaaactgtgctgtccaaaccgactgactcttcccctgaggttataaattatttaggaaataaagcatgtgagtgctacatctcaattgccgattgggctgctgtgcaggaatggcagaacgctatccatgacttgaaaaagagtaccagtagcacttccctcaacctgaaagctgacttcaactatataaaatcattaagcagctttgagtctggaaaatttgttgaatgtaccgagcagttagaattgttaccaggagaaaatatcaatctacttgctggaggatcaaaagaaaaaatagacatgaaaaaactgcttcctaacatgttaagtccggatccgagggaacttcagaaatccattgaagttcaattgttaagaagttctgtttgtttggcaactgctttaaacccgatagaacaagatcagaagtggcagtctataactgaaaatgtggtaaagtacttgaagcaaacatcccgcatcgctattggacctctgagactttctactttaacagtttcacagtctttgccagttctaagtaccttgcagctgtattgctcatctgctttggagaacacagtttctaacagactttcaacagaggactgtcttattccactcttcagtgaagctttacgttcatgtaaacagcatgacgtgaggccatggatgcaggcattaaggtatactatgtaccagaatcagttgttggagaaaattaaagaacaaacagtcccaattagaagccatctcatggaattaggtctaacagcagcaaaatttgctagaaaacgagggaatgtgtcccttgcaacaagactgctggcacagtgcagtgaagttcagctgggaaagaccaccactgcacaggatttagtccaacattttaaaaaactatcaacccaaggtcaagtggatgaaaaatgggggcccgaacttgatattgaaaaaaccaaattgctttatacagcaggccagtcaacacatgcaatggaaatgttgagttcttgtgccatatctttctgcaagtctgtgaaagctgaatatgcagttgctaaatcaattctgacactggctaaatggatccaggcagaatggaaagagatttcaggacagctgaaacaggtttacagagctcagcaccaacagaacttcacaggtctttctactttgtctaaaaacatactcactctaatagaactgccatctgttaatacgatggaagaagagtatcctcggatcgagagtgaatctacagtgcatattggagttggagaacctgacttcattttgggacagttgtatcacctgtcttcagtacaggcacctgaagtagccaaatcttgggcagcgttggccagctgggcttataggtggggcagaaaggtggttgacaatgccagtcagggagaaggtgttcgtctgctgcctagagaaaaatctgaagttcagaatctacttccagacactataactgaggaagagaaagagagaatatatggtattcttggacaggctgtgtgtcggccggcggggattcaggatgaagatataacacttcagataactgagagtgaagacaacgaagaagatgacatggttgatgttatctggcgtcagttgatatcaagctgcccatggctttcagaacttgatgaaagtgcaactgaaggagttattaaagtgtggaggaaagttgtagatagaatattcagcctgtacaaactctcttgcagtgcatactttactttccttaaactcaacgctggtcaaattcctttagatgaggatgaccctaggctgcatttaagtcacagagtggaacagagcactgatgacatgattgtgatggccacattgcgcctgctgcggttgctcgtgaagcacgctggtgagcttcggcagtatctggagcacggcttggagacaacacccactgcaccatggagaggaattattccgcaacttttctcacgcttaaaccaccctgaagtgtatgtgcgccaaagtatttgtaaccttctctgccgtgtggctcaagattccccacatctcatattgtatcctgcaatagtgggtaccatatcgcttagtagtgaatcccaggcttcaggaaataaattttccactgcaattccaactttacttggcaatattcaaggagaagaattgctggtttctgaatgtgagggaggaagtcctcctgcatctcaggatagcaataaggatgaacctaaaagtggattaaatgaagaccaagccatgatgcaggattgttacagcaaaattgtagataagctgtcctctgcaaaccccaccatggtattacaggttcagatgctcgtggctgaactgcgcagggtcactgtgctctgggatgagctctggctgggagttttgctgcaacaacacatgtatgtcctgagacgaattcagcagcttgaagatgaggtgaagagagtccagaacaacaacaccttacgcaaagaagagaaaattgcaatcatgagggagaagcacacagctttgatgaagcccatcgtatttgctttggagcatgtgaggagtatcacagcggctcctgcagaaacacctcatgaaaaatggtttcaggataactatggtgatgccattgaaaatgccctagaaaaactgaagactccattgaaccctgcaaagcctgggagcagctggattccatttaaagagataatgctaagtttgcaacagagagcacagaaacgtgcaagttacatcttgcgtcttgaagaaatcagtccatggttggctgccatgactaacactgaaattgctcttcctggggaagtctcagccagagacactgtcacaatccatagtgtgggcggaaccatcacaatcttaccgactaaaaccaagccaaagaaacttctctttcttggatcagatgggaagagctatccttatcttttcaaaggactggaggatttacatctggatgagagaataatgcagttcctatctattgtgaataccatgtttgctacaattaatcgccaagaaacaccccggttccatgctcgacactattctgtaacaccactaggaacaagatcaggactaatccagtgggtagatggagccacacccttatttggtctttacaaacgatggcaacaacgggaagctgccttacaagcacaaaaggcccaagattcctaccaaactcctcagaatcctggaattgtaccccgtcctagtgaactttattacagtaaaattggccctgctttgaaaacagttgggcttagcctggatgtgtcccgtcgggattggcctcttcatgtaatgaaggcagtattggaagagttaatggaggccacacccccgaatctccttgccaaagagctctggtcatcttgcacaacacctgatgaatggtggagagttacgcagtcttatgcaagatctactgcagtcatgtctatggttggatacataattggccttggagacagacatctggataatgttcttatagatatgacgactggagaagttgttcacatagattacaatgtttgctttgaaaaaggtaaaagccttagagttcctgagaaagtaccttttcgaatgacacaaaacattgaaacagcactgggtgtaactggagtagaaggtgtatttaggctttcatgtgagcaggttttacacattatgcggcgtggcagagagaccctgctgacgctgctggaggcctttgtgtacgaccctctggtggactggacagcaggaggcgaggctgggtttgctggtgctgtctatggtggaggtggccagcaggccgagagcaagcagagcaagagagagatggagcgagagatcacccgcagcctgttttcttctagagtagctgagattaaggtgaactggtttaagaatagagatgagatgctggttgtgcttcccaagttggacggtagcttagatgaatacctaagcttgcaagagcaactgacagatgtggaaaaactgcagggcaaactactggaggaaatagagtttctagaaggagctgaaggggtggatcatccttctcatactctgcaacacaggtattctgagcacacccaactacagactcagcaaagagctgttcaggaagcaatccaggtgaagctgaatgaatttgaacaatggataacacattatcaggctgcattcaataatttagaagcaacacagcttgcaagcttgcttcaagagataagcacacaaatggaccttggtcctccaagttacgtgccagcaacagcctttctgcagaatgctggtcaggcccacttgattagccagtgcgagcagctggagggggaggttggtgctctcctgcagcagaggcgctccgtgctccgtggctgtctggagcaactgcatcactatgcaaccgtggccctgcagtatccgaaggccatatttcagaaacatcgaattgaacagtggaagacctggatggaagagctcatctgtaacaccacagtagagcgttgtcaagagctctataggaaatatgaaatgcaatatgctccccagccacccccaacagtgtgtcagttcatcactgccactgaaatgaccctgcagcgatacgcagcagacatcaacagcagacttattagacaagtggaacgcttgaaacaggaagctgtcactgtgccagtttgtgaagatcagttgaaagaaattgaacgttgcattaaagttttccttcatgagaatggagaagaaggatctttgagtctagcaagtgttattatttctgccctttgtacccttacaaggcgtaacctgatgatggaaggtgcagcgtcaagtgctggagaacagctggttgatctgacttctcgggatggagcctggttcttggaggaactctgcagtatgagcggaaacgtcacctgcttggttcagttactgaagcagtgccacctggtgccacaggacttagatatcccgaaccccatggaagcgtctgagacagttcacttagccaatggagtgtatacctcacttcaggaattgaattcgaatttccggcaaatcatatttccagaagcacttcgatgtttaatgaaaggggaatacacgttagaaagtatgctgcatgaactggacggtcttattgagcagaccaccgatggcgttcccctgcagactctagtggaatctcttcaggcctacttaagaaacgcagctatgggactggaagaagaaacacatgctcattacatcgatgttgccagactactacatgctcagtacggtgaattaatccaaccgagaaatggttcagttgatgaaacacccaaaatgtcagctggccagatgcttttggtagcattcgatggcatgtttgctcaagttgaaactgctttcagcttattagttgaaaagttgaacaagatggaaattcccatagcttggcgaaagattgacatcataagggaagccaggagtactcaagttaatttttttgatgatgataatcaccggcaggtgctagaagagattttctttctaaaaagactacagactattaaggagttcttcaggctctgtggtaccttttctaaaacattgtcaggatcaagttcacttgaagatcagaatactgtgaatgggcctgtacagattgtcaatgtgaaaaccctttttagaaactcttgtttcagtgaagaccaaatggccaaacctatcaaggcattcacagctgactttgtgaggcagctcttgatagggctacccaaccaagccctcggactcacactgtgcagttttatcagtgctctgggtgtagacatcattgctcaagtagaggcaaaggactttggtgccgaaagcaaagtttctgttgatgatctctgtaagaaagcggtggaacataacatccagatagggaagttctctcagctggttatgaacagggcaactgtgttagcaagttcttacgacactgcctggaagaagcatgacttggtgcgaaggctagaaaccagtatttcttcttgtaagacaagcctgcagcgggttcagctgcatattgccatgtttcagtggcaacatgaagatctacttatcaatagaccacaagccatgtcagtcacacctcccccacggtctgctatcctaaccagcatgaaaaagaagctgcataccctgagccagattgaaacttctattgcgacagttcaggagaagctagctgcacttgaatcaagtattgaacagcgactcaagtgggcaggtggtgccaaccctgcattggcccctgtactacaagattttgaagcaacgatagctgaaagaagaaatcttgtccttaaagagagccaaagagcaagtcaggtcacatttctctgcagcaatatcattcattttgaaagtttacgaacaagaactgcagaagccttaaacctggatgcggcgttatttgaactaatcaagcgatgtcagcagatgtgttcgtttgcatcacagtttaacagttcagtgtctgagttagagcttcgtttattacagagagtggacactggtcttgaacatcctattggcagctctgaatggcttttgtcagcacacaaacagttgacccaggatatgtctactcagagggcaattcagacagagaaagagcagcagatagaaacggtctgtgaaacaattcagaatctggttgataatataaagactgtgctcactggtcataaccgacagcttggagatgtcaaacatctcttgaaagctatggctaaggatgaagaagctgctctggcagatggtgaagatgttccctatgagaacagtgttaggcagtttttgggtgaatataaatcatggcaagacaacattcaaacagttctatttacattagtccaggctatgggtcaggttcgaagtcaagaacacgttgaaatgctccaggaaatcactcccaccttgaaagaactgaaaacacaaagtcagagtatctataataatttagtgagttttgcatcacccttagtcaccgatgcaacaaatgaatgttcgagtccaacgtcatctgctacttatcagccatccttcgctgcagcagtccggagtaacactggccagaagactcagcctgatgtcatgtcacagaatgctagaaagctgatccagaaaaatcttgctacatcagctgatactccaccaagcaccgttccaggaactggcaagagtgttgcttgtagtcctaaaaaggcagtcagagaccctaaaactgggaaagcggtgcaagagagaaactcctatgcagtgagtgtgtggaagagagtgaaagccaagttagagggccgagatgttgatccgaataggaggatgtcagttgctgaacaggttgactatgtcattaaggaagcaactaatctagataacttggctcagctgtatgaaggttggacagcctgggtgtgaatggcaagacagtagatgagtctggttaagcgaggtcagacatccaccagaatcaactcagcctcaggcatccaaagccacaccacagtcggtggtgatgcaactgggggcttactctgaggaaacctaggaaatctcggtgcactaggaagtgaatcccgcaggacagctgcactcagggatacgcccaacaccatggcctgcaaccccagggtcaagggtgaaggaaagcaagctcaccgcctgaacacggagattgtctttctgccacagaacagcagcagacgtgtcgggaggttagctgcggaaagaaatcgggatgccgcggagcacagagtgatttggaactccattccacctgaccctgtgtgtacaatccaggaaaaaaacaaaccccactcagaaacagagaaaactggggtcgcgaagaaatcacagccaaggaagatttgatgcattcagattctcgtgtaacacttgttgcttggcaacagtactggttgggttgaccagtaagtagaaaaaggctaaaggctatgcgatatgaatttcagaaatggactgaaaatggagagctatgtaacagatacactacagtagaagaacttacttctgaaatgaagggaaaaaaaccaccccatcgttccctactcctccccaccacttacccgttccccctttacctaatctagtagattagccatctttcaaattcacttttatttcagtccttatatttcatatacttccgtctcgatgctgttaacaacttctgataacatggaaaattcaaggattgtttaaaggtctgatgatcacacacaaaatgtaattccggttatttaagtcatttctgtgattctatcatgtacagtttccagaattgtcactgtgcattcaaaagtaatgaatctaacagacatttgatttaatgtacactcccttttgcttatagtgtgcattttttttggaggtcattcaaattttccctcttctgtgatagctgtagtttctttcatagaaagtagctaatccagtgtaatcttttacctttttaaaaaccaagatagagtatctattagagttttacattgttgatgatagattaacaataaagtgatgttctggtggaggtagactgaaatttttttaattcatgtttttcatttgatacttttaatttacacttagtaaattaaaagttgtttaatttacttggcattttaggacatgtacatgaaacagtgaaaatgagatccaccaacatcttttattaagttcagttattagtctgtgaagtgctttactttttgcacaattttaatagcttgctattcagtaatacattatagtgaattcatgatcaaggtttccttaaatttagcattgcatttcagtactgactgtgtaagctaaattgctgatccaaaataaaaacccagactagaatagggttcttaaaatcaagtatcaatacaaaatagaacacaattaaaatcttaattgttggctgggcacagtggctcacgcctgtaatcccagcactttgggaggccgaggcgggcggatcatgaggttaggagagcgagaccatcctggctaacacggtgaaaccccgtctttactaaaaatacaaaaaaaattagccgggtgtggtggcgggcgcctgtagtcccagctactcgggaggctgaggcaggagaatggcgtgaacccaggaggcggagcttgcagtgagccgagattgtgccactgcactccagcctgggcaacagagctagactctgtgtcaaaaataaatgactagataaaaaaaaaaattgtttgagtacattttccctgcattttagagattaggacagtggtcactttctagttgccgtcttcacagacaaacttgaaaggtattaaggaaaaaattccacatagctctgggccttttttgtattctgattgccacgttaatctgtaatcgttaagtacccatgaaagaatgtgtttcagtatcagtgctttttggtactttaacaagtatgtaggcacggtggatttttttgaaatacccatgtgtccaatagcaagttaaggaacctagcgcatcaaattttgttttcttcattcatttggaaccttattttcgcaaaaaacctagctggaataataatgccatatgtattttgcacactgctttattttctagaggctctgggagcaaattacattcatcacattacctctgctctctcaagattaaagtctttcagcaacattctttattgtcatcataaggaaaaacttttatcgcaatgatagtcagttcacattagtttagcactatagatagtattcagaaattgctttctctttggtaaagaagataaataggtgaattttattgcctgtgttttcaggcttcagaggtacctggcaccttactcaagcaaaaacaaaaaacagctttacttcaaaagcatgtgcctctggtaaattatccatcacttttgttttaaagtggtccctccaagaataatgtggcatacacagtgggtttggttgtaaggcagatgtaatagatgacttcaaaagcctgctccttactgcactctggacaaggccctggtctgtatagtttggcttcctctgttaagtcattctacaaggtgacttgccatttgaactttcgtaagagacctcagcagttagactgagaaaagttagagtgctgtagttatgaagtcatacatttttgataaaatacctgtggaaaaccagggatcctctcctgtttctctctcttgcctccccctttccctccattcctctgtcgcctccccctctcctccactttctttaagaatcagggggtacagaataacctacaaacaacctcttcaaagtacccttggaaattgaagttcaatcttaagttttttgctgtctttaatttactagaattgcctaatttttagttgatttctctacagagcttagcttgtgtagttatttctcttttactgttgctttggtgtgtcttgaagtttgattgattatttttggtcattgagttcttagtgtagtttgctagatgattattaagattcttttgtgtctgacacttgtggtgagttgcttttgaaatctgttgagatttccatgtgagaactgataatcaggctcttgatctgcttccctaaattacttttttagagcccaaaccccaggtttagggtgagggtttgtaatacaaagaaacacttccatcacttctgcccttaacccttgcctctattacctaagcttagtaagtagttttcttaatattgtccaatgtttggtgttatctgcattgttttttgtttttttaattgtggttgttctgacgtgtgaaatttaaggaaagagccattttttatcttcggtcctttttaatctggggtattataggcagtactttaaattgcaaagtcttccgggcctattttcctctacatttttgtaattaactctgggggcttacttgttttggcagtactgaaatcaaaggagctggttcttcttttctcccaattattttcatatgaaagcacctacaattagcctgttagtcctattcagatacatcaaatatcagtgaatgctttactattcgcacatttaagcatctttgttttacataaaattagagtatgaaaaccagtgttcaattttttatcttgttgagcttgtaaaatgccagcaatttaaaactaggacttttccccccataagccaaggaggtagaattactaatacaagggttaaagaaggtagattttgttttcaatatttgggtaatattagaaagattcttcccacagggaagaactagcaagtgtcccaattttttccaaacgttggggaggggaaaattcactgtatcatgaaaccctaagggtttgttgcacttcctgctttttaggcctggataacagtatcaccatccttatttacagaagggtaaaactgactcttaatgagaaaagctttataagttcaagggctgtaaaatatgaactacttagggtcgtttgccttccatgggaacttggctagacttagaaaaagctgtttgttgtgctaatgtaaaagtgtcatacaatttagaagatttttgaagatggtaaacttagaagaattctatgttctgaaatgcacacttttagaatgtttttctttgaaaacaggctaatagttntttctttttttgacaaagtttcagctcctctttaaagttattgtgtcatttttctggtttaaatttcccttatatttccacctgtaatgtcagtggcaacaacatcatacttcacttacttgttaatttactttttacccttattctaagagcaagttgagttgaactgaatcttccttgtcttagtaacaatgtataaatagtggcttttctgtacaaaaggttgtaatgcctcctgatggatataattttgtgattgtatttaaaagttgaataaatcacaccagcttcctgaaaatgttcataatgcatcttttggaaaacaaatacatgcctactttgtgcatatttgcattaacatggcaaagattgtatgaaatacctgtttttcagaaaataaaggttcagtctcaaaagat

SEQ ID NO: 34692 - DNA, 2794 bp, Homo sapiens
  misc_feature (2375)..(2375): n is a, c, g, or t
ggctggtacggaccggaagttagggatttttgtattctgattgccacgttaatctgtaatcgttaagtacccatgaaagaatgtgtttcagtatcagtgctttttggtactttaacaagtatgtaggcacggtggatttttttgaaatacccatgtgtccaatagcaagttaaggaacctagcgcatcaaattttgttttcttcattcatttggaaccttattttcgcaaaaaacctagctggaataataatgccatatgtattttgcacactgctttattttctagaggctctgggagcaaattacattcatcacattacctctgctctctcaagattaaagtctttcagcaacattctttattgtcatcataaggaaaaacttttatcgcaatgatagtcagttcacattagtttagcactatagatagtattcagaaattgctttctctttggtaaagaagataaataggtgaattttattgcctgtgttttcaggcttcagaggtacctggcaccttactcaagcaaaaacaaaaaacagctttacttcaaaagcatgtgcctctggtaaattatccatcacttttgttttaaagtggtccctccaagaataatgtggcatacacagtgggtttggttgtaaggcagatgtaatagatgacttcaaaagcctgctccttactgcactctggacaaggccctggtctgtatagtttggcttcctctgttaagtcattctacaaggtgacttgccatttgaactttcgtaagagacctcagcagttagactgagaaaagttagagtgctgtagttatgaagtcatacatttttgataaaatacctgtggaaaaccagggatcctctcctgtttctctctcttgcctccccctttccctccattcctctgtcgcctccccctctcctccactttctttaagaatcagggggtacagaataacctacaaacaacctcttcaaagtacccttggaaattgaagttcaatcttaagttttttgctgtctttaatttactagaattgcctaatttttagttgatttctctacagagcttagcttgtgtagttatttctcttttactgttgctttggtgtgtcttgaagtttgattgattatttttggtcattgagttcttagtgtagtttgctagatgattattaagattcttttgtgtctgacacttgtggtgagttgcttttgaaatctgttgagatttccatgtgagaactgataatcaggctcttgatctgcttccctaaattacttttttagagcccaaaccccaggtttagggtgagggtttgtaatacaaagaaacacttccatcacttctgcccttaacccttgcctctattacctaagcttagtaagtagttttcttaatattgtccaatgtttggtgttatctgcattgttttttgtttttttaattgtggttgttctgacgtgtgaaatttaaggaaagagccattttttaaaaatgccgagcagggcaatgcaagtacagccaaatattagacttgatgtgcaatcttcggtcctttttaatctggggtattataggcagtactttaaattgcaaagtcttccgggcctattttcctctacatttttgtaattaactctgggggcttacttgttttggcagtactgaaatcaaaggagctggttcttcttttctcccaattattttcatatgaaagcacctacaattagcctgttagtcctattcagatacatcaaatatcagtgaatgctttactattcgcacatttaagcatctttgttttacataaaattagagtatgaaaaccagtgttcaattttttatcttgttgagcttgtaaaatgccagcaatttaaaactaggacttttccccccataagccaaggaggtagaattactaatacaagggttaaagaaggtagattttgttttcaatatttgggtaatattagaaagattcttcccacagggaagaactagcaagtgtcccaattttttccaaacgttggggaggggaaaattcactgtatcatgaaaccctaagggtttgttgcacttcctgctttttaggcctggataacagtatcaccatccttatttacagaagggtaaaactgactcttaatgagaaaagctttataagttcaagggctgtaaaatatgaactacttagggtcgtttgccttccatgggaacttggctagacttagaaaaagctgtttgttgtgctaatgtaaaagtgtcatacaatttagaagatttttgaagatggtaaacttagaagaattctatgttctgaaatgcacacttttagaatgtttttctttgaaaacaggctaatagttntttctttttttgacaaagtttcagctcctctttaaagttattgtgtcatttttctggtttaaatttcccttatatttccacctgtaatgtcagtggcaacaacatcatacttcacttacttgttaatttactttttacccttattctaagagcaagttgagttgaactgaatcttccttgtcttagtaacaatgtataaatagtggcttttctgtacaaaaggttgtaatgcctcctgatggatataattttgtgattgtatttaaaagttgaataaatcacaccagcttcctgaaaatgttcataatgcatcttttggaaaacaaatacatgcctactttgtgcatatttgcattaacatggcaaagattgtatgaaatacctgtttttcagaaaataaaggttcagtctcaaaagat

SEQ ID NO: 34693 - DNA, 9589 bp, Homo sapiens
catgaggcttttaagaatcatgtgttcaatgtagacaatgcaaaatttgtagttaaatttgacctcaattgactacaaaatttgtagttaaatttgactacaattggaaatgccaaaaactcactaatagggatgtgggcgctatctccaactgtctttgcacttctgagtaagaatctgatgattgtgcacagtgacctggctgttcacttccctgccattcagtatgctgtgctctacacattgtattctcattgtaccaggcatgatcactttatctctagtagcctcagttcttcctctccttctttgtttgatggagctgtgattagcactgtaactacggctacaaagaaacatttctcaattatattaaatcttctgggaatattacttaagaaagataaccttaaccaggacacgaggaaactgttaatgacttgggctttggaagcagctgttttaatgaagaagtctgaaacatacgcacctttattctctcttccgtctttccataaattttgcaaaggccttttagccaacactctcgttgaagatgtgaatatctgtctgcaggcatgcagcagtctacatgctctgtcctcttccttgccagatgatcttttacagagatgtgtcgatgtttgccgtgttcaactagtgcacagtggaactcgtattcgacaagcatttggaaaactgttgaaatcaattcctttagatgttgtcctaagcaataacaatcacacagaaattcaagaaatttctttagcattaagaagtcacatgagtaaagcaccaagtaatacattccacccccaagatttctctgatgttattagttttattttgtatgggaactctcatagaacagggaaggacaattggttggaaagactgttctatagctgccagagactggataagcgtgaccagtcaacaattccacgcaatctcctgaagacagatgctgtcctttggcagtgggccatatgggaagctgcacaattcactgttctttctaagctgagaaccccactgggcagagctcaagacaccttccagacaattgaaggtatcattcgaagtctcgcagctcacacattaaaccctgatcaggatgttagtcagtggacaactgcagacaatgatgaaggccatggtaacaaccaacttagacttgttcttcttctgcagtatctggaaaatctggagaaattaatgtataatgcatacgagggatgtgctaatgcattaacttcacctcccaaggtcattagaacttttttctataccaatcgccaaacttgtcaggactggctaacgcggattcgactctccatcatgagggtaggattgttggcaggccagcctgcagtgacagtgagacatggctttgacttgcttacagagatgaaaacaaccagcctatctcaggggaatgaattggaagtaaccattatgatggtggtagaagcattatgtgaacttcattgtcctgaagctatacagggaattgctgtctggtcatcatctattgttggaaaaaatcttctgtggattaactcagtggctcaacaggctgaagggaggtttgaaaaggcctctgtggagtaccaggaacacctgtgtgccatgacaggtgttgattgctgcatctccagctttgacaaatcggtgctcaccttagccaatgctgggcgtaacagtgccagcccgaaacattctctgaatggtgaatccagaaaaactgtgctgtccaaaccgactgactcttcccctgaggttataaattatttaggaaataaagcatgtgagtgctacatctcaattgccgattgggctgctgtgcaggaatggcagaacgctatccatgacttgaaaaagagtaccagtagcacttccctcaacctgaaagctgacttcaactatataaaatcattaagcagctttgagtctggaaaatttgttgaatgtaccgagcagttagaattgttaccaggagaaaatatcaatctacttgctggaggatcaaaagaaaaaatagacatgaaaaaactgcttcctaacatgttaagtccggatccgagggaacttcagaaatccattgaagttcaattgttaagaagttctgtttgtttggcaactgctttaaacccgatagaacaagatcagaagtggcagtctataactgaaaatgtggtaaagtacttgaagcaaacatcccgcatcgctattggacctctgagactttctactttaacagtttcacagtctttgccagttctaagtaccttgcagctgtattgctcatctgctttggagaacacagtttctaacagactttcaacagaggactgtcttattccactcttcagtgaagctttacgttcatgtaaacagcatgacgtgaggccatggatgcaggcattaaggtatactatgtaccagaatcagttgttggagaaaattaaagaacaaacagtcccaattagaagccatctcatggaattaggtctaacagcagcaaaatttgctagaaaacgagggaatgtgtcccttgcaacaagactgctggcacagtgcagtgaagttcagctgggaaagaccaccactgcacaggatttagtccaacattttaaaaaactatcaacccaaggtcaagtggatgaaaaatgggggcccgaacttgatattgaaaaaaccaaattgctttatacagcaggccagtcaacacatgcaatggaaatgttgagttcttgtgccatatctttctgcaagtctgtgaaagctgaatatgcagttgctaaatcaattctgacactggctaaatggatccaggcagaatggaaagagatttcaggacagctgaaacaggtttacagagctcagcaccaacagaacttcacaggtctttctactttgtctaaaaacatactcactctaatagaactgccatctgttaatacgatggaagaagagtatcctcggatcgagagtgaatctacagtgcatattggagttggagaacctgacttcattttgggacagttgtatcacctgtcttcagtacaggcacctgaagtagccaaatcttgggcagcgttggccagctgggcttataggtggggcagaaaggtggttgacaatgccagtcagggagaaggtgttcgtctgctgcctagagaaaaatctgaagttcagaatctacttccagacactataactgaggaagagaaagagagaatatatggtattcttggacaggctgtgtgtcggccggcggggattcaggatgaagatataacacttcagataactgagagtgaagacaacgaagaagatgacatggttgatgttatctggcgtcagttgatatcaagctgcccatggctttcagaacttgatgaaagtgcaactgaaggagttattaaagtgtggaggaaagttgtagatagaatattcagcctgtacaaactctcttgcagtgcatactttactttccttaaactcaacgctggtcaaattcctttagatgaggatgaccctaggctgcatttaagtcacagagtggaacagagcactgatgacatgattgtgatggccacattgcgcctgctgcggttgctcgtgaagcacgctggtgagcttcggcagtatctggagcacggcttggagacaacacccactgcaccatggagaggaattattccgcaacttttctcacgcttaaaccaccctgaagtgtatgtgcgccaaagtatttgtaaccttctctgccgtgtggctcaagattccccacatctcatattgtatcctgcaatagtgggtaccatatcgcttagtagtgaatcccaggcttcaggaaataaattttccactgcaattccaactttacttggcaatattcaaggagaagaattgctggtttctgaatgtgagggaggaagtcctcctgcatctcaggatagcaataaggatgaacctaaaagtggattaaatgaagaccaagccatgatgcaggattgttacagcaaaattgtagataagctgtcctctgcaaaccccaccatggtattacaggttcagatgctcgtggctgaactgcgcagggtcactgtgctctgggatgagctctggctgggagttttgctgcaacaacacatgtatgtcctgagacgaattcagcagcttgaagatgaggtgaagagagtccagaacaacaacaccttacgcaaagaagagaaaattgcaatcatgagggagaagcacacagctttgatgaagcccatcgtatttgctttggagcatgtgaggagtatcacagcggctcctgcagaaacacctcatgaaaaatggtttcaggataactatggtgatgccattgaaaatgccctagaaaaactgaagactccattgaaccctgcaaagcctgggagcagctggattccatttaaagagataatgctaagtttgcaacagagagcacagaaacgtgcaagttacatcttgcgtcttgaagaaatcagtccatggttggctgccatgactaacactgaaattgctcttcctggggaagtctcagccagagacactgtcacaatccatagtgtgggcggaaccatcacaatcttaccgactaaaaccaagccaaagaaacttctctttcttggatcagatgggaagagctatccttatcttttcaaaggactggaggatttacatctggatgagagaataatgcagttcctatctattgtgaataccatgtttgctacaattaatcgccaagaaacaccccggttccatgctcgacactattctgtaacaccactaggaacaagatcaggactaatccagtgggtagatggagccacacccttatttggtctttacaaacgatggcaacaacgggaagctgccttacaagcacaaaaggcccaagattcctaccaaactcctcagaatcctggaattgtaccccgtcctagtgaactttattacagtaaaattggccctgctttgaaaacagttgggcttagcctggatgtgtcccgtcgggattggcctcttcatgtaatgaaggcagtattggaagagttaatggaggccacacccccgaatctccttgccaaagagctctggtcatcttgcacaacacctgatgaatggtggagagttacgcagtcttatgcaagatctactgcagtcatgtctatggttggatacataattggccttggagacagacatctggataatgttcttatagatatgacgactggagaagttgttcacatagattacaatgtttgctttgaaaaaggtaaaagccttagagttcctgagaaagtaccttttcgaatgacacaaaacattgaaacagcactgggtgtaactggagtagaaggtgtatttaggctttcatgtgagcaggttttacacattatgcggcgtggcagagagaccctgctgacgctgctggaggcctttgtgtacgaccctctggtggactggacagcaggaggcgaggctgggtttgctggtgctgtctatggtggaggtggccagcaggccgagagcaagcagagcaagagagagatggagcgagagatcacccgcagcctgttttcttctagagtagctgagattaaggtgaactggtttaagaatagagatgagatgctggttgtgcttcccaagttggacggtagcttagatgaatacctaagcttgcaagagcaactgacagatgtggaaaaactgcagggcaaactactggaggaaatagagtttctagaaggagctgaaggggtggatcatccttctcatactctgcaacacaggtattctgagcacacccaactacagactcagcaaagagctgttcaggaagcaatccaggtgaagctgaatgaatttgaacaatggataacacattatcaggctgcattcaataatttagaagcaacacagcttgcaagcttgcttcaagagataagcacacaaatggaccttggtcctccaagttacgtgccagcaacagcctttctgcagaatgctggtcaggcccacttgattagccagtgcgagcagctggagggggaggttggtgctctcctgcagcagaggcgctccgtgctccgtggctgtctggagcaactgcatcactatgcaaccgtggccctgcagtatccgaaggccatatttcagaaacatcgaattgaacagtggaagacctggatggaagagctcatctgtaacaccacagtagagcgttgtcaagagctctataggaaatatgaaatgcaatatgctccccagccacccccaacagtgtgtcagttcatcactgccactgaaatgaccctgcagcgatacgcagcagacatcaacagcagacttattagacaagtggaacgcttgaaacaggaagctgtcactgtgccagtttgtgaagatcagttgaaagaaattgaacgttgcattaaagttttccttcatgagaatggagaagaaggatctttgagtctagcaagtgttattatttctgccctttgtacccttacaaggcgtaacctgatgatggaaggtgcagcgtcaagtgctggagaacagctggttgatctgacttctcgggatggagcctggttcttggaggaactctgcagtatgagcggaaacgtcacctgcttggttcagttactgaagcagtgccacctggtgccacaggacttagatatcccgaaccccatggaagcgtctgagacagttcacttagccaatggagtgtatacctcacttcaggaattgaattcgaatttccggcaaatcatatttccagaagcacttcgatgtttaatgaaaggggaatacacgttagaaagtatgctgcatgaactggacggtcttattgagcagaccaccgatggcgttcccctgcagactctagtggaatctcttcaggcctacttaagaaacgcagctatgggactggaagaagaaacacatgctcattacatcgatgttgccagactactacatgctcagtacggtgaattaatccaaccgagaaatggttcagttgatgaaacacccaaaatgtcagctggccagatgcttttggtagcattcgatggcatgtttgctcaagttgaaactgctttcagcttattagttgaaaagttgaacaagatggaaattcccatagcttggcgaaagattgacatcataagggaagccaggagtactcaagttaatttttttgatgatgataatcaccggcaggtgctagaagagattttctttctaaaaagactacagactattaaggagttcttcaggctctgtggtaccttttctaaaacattgtcaggatcaagttcacttgaagatcagaatactgtgaatgggcctgtacagattgtcaatgtgaaaaccctttttagaaactcttgtttcagtgaagaccaaatggccaaacctatcaaggcattcacagctgactttgtgaggcagctcttgatagggctacccaaccaagccctcggactcacactgtgcagttttatcagtgctctgggtgtagacatcattgctcaagtagaggcaaaggactttggtgccgaaagcaaagtttctgttgatgatctctgtaagaaagcggtggaacataacatccagatagggaagttctctcagctggttatgaacagggcaactgtgttagcaagttcttacgacactgcctggaagaagcatgacttggtgcgaaggctagaaaccagtatttcttcttgtaagacaagcctgcagcgggttcagctgcatattgccatgtttcagtggcaacatgaagatctacttatcaatagaccacaagccatgtcagtcacacctcccccacggtctgctatcctaaccagcatgaaaaagaagctgcataccctgagccagattgaaacttctattgcgacagttcaggagaagctagctgcacttgaatcaagtattgaacagcgactcaagtgggcaggtggtgccaaccctgcattggcccctgtactacaagattttgaagcaacgatagctgaaagaagaaatcttgtccttaaagagagccaaagagcaagtcaggtcacatttctctgcagcaatatcattcattttgaaagtttacgaacaagaactgcagaagccttaaacctggatgcggcgttatttgaactaatcaagcgatgtcagcagatgtgttcgtttgcatcacagtttaacagttcagtgtctgagttagagcttcgtttattacagagagtggacactggtcttgaacatcctattggcagctctgaatggcttttgtcagcacacaaacagttgacccaggatatgtctactcagagggcaattcagacagagaaagagcagcagatagaaacggtctgtgaaacaattcagaatctggttgataatataaagactgtgctcactggtcataaccgacagcttggagatgtcaaacatctcttgaaagctatggctaaggatgaagaagctgctctggcagatggtgaagatgttccctatgagaacagtgttaggcagtttttgggtgaatataaatcatggcaagacaacattcaaacagttctatttacattagtccaggctatgggtcaggttcgaagtcaagaacacgttgaaatgctccaggaaatcactcccaccttgaaagaactgaaaacacaaagtcagagtatctataataatttagtgagttttgcatcacccttagtcaccgatgcaacaaatgaatgttcgagtccaacgtcatctgctacttatcagccatccttcgctgcagcagtccggagtaacactggccagaagactcagcctgatgtcatgtcacagaatgctagaaagctgatccagaaaaatcttgctacatcagctgatactccaccaagcaccgttccaggaactggcaagagtgttgcttgtagtcctaaaaaggcagtcagagaccctaaaactgggaaagcggtgcaagagagaaactcctatgcagtgagtgtgtggaagagagtgaaagccaagttagagggccgagatgttgatccgaataggaggatgtcagttgctgaacaggtgaccgtgttttaaacttgggctacacattttaatgctgctggaaaagtagaggtgtataaagatccctctcatcgatttccttaatagttcatcaaggaacttaaatgtgttttcaggattcagaagattttgagtaacacagctctggcgtcgtcaagtagtcaccattttactctgacccttccctatgagcactttcctttcccctagccctgttttaacccaaatataagtccgatcctcctccaccagactacagttagtttccatttaaagaagactgttgaaggtttcaaatgaaatgccaaggaccctttgggttgcaggtgtagtatgagtggagcatccctaattagaaactcatatgctccaaatccgaagcattttgagagttgacatgatgccataagtgaaaagttccatgcctgacctggtg

SEQ ID NO: 34694 - DNA, 6854 bp, Homo sapiens
catgaggcttttaagaatcatgtgttcaatgtagacaatgcaaaatttgtagttaaatttgacctcaattgactacaaaatttgtagttaaatttgactacaattggaaatgccaaaaactcactaatagggatgtgggcgctatctccaactgtctttgcacttctgagtaagaatctgatgattgtgcacagtgacctggctgttcacttccctgccattcagtatgctgtgctctacacattgtattctcattgtaccaggcatgatcactttatctctagtagcctcagttcttcctctccttctttgtttgatggagctgtgattagcactgtaactacggctacaaagaaacatttctcaattatattaaatcttctgggaatattacttaagaaagataaccttaaccaggacacgaggaaactgttaatgacttgggctttggaagcagctgttttaatgaagaagtctgaaacatacgcacctttattctctcttccgtctttccataaattttgcaaaggccttttagccaacactctcgttgaagatgtgaatatctgtctgcaggcatgcagcagtctacatgctctgtcctcttccttgccagatgatcttttacagagatgtgtcgatgtttgccgtgttcaactagtgcacagtggaactcgtattcgacaagcatttggaaaactgttgaaatcaattcctttagatgttgtcctaagcaataacaatcacacagaaattcaagaaatttctttagcattaagaagtcacatgagtaaagcaccaagtaatacattccacccccaagatttctctgatgttattagttttattttgtatgggaactctcatagaacagggaaggacaattggttggaaagactgttctatagctgccagagactggataagcgtgaccagtcaacaattccacgcaatctcctgaagacagatgctgtcctttggcagtgggccatatgggaagctgcacaattcactgttctttctaagctgagaaccccactgggcagagctcaagacaccttccagacaattgaaggtatcattcgaagtctcgcagctcacacattaaaccctgatcaggatgttagtcagtggacaactgcagacaatgatgaaggccatggtaacaaccaacttagacttgttcttcttctgcagtatctggaaaatctggagaaattaatgtataatgcatacgagggatgtgctaatgcattaacttcacctcccaaggtcattagaacttttttctataccaatcgccaaacttgtcaggactggctaacgcggattcgactctccatcatgagggtaggattgttggcaggccagcctgcagtgacagtgagacatggctttgacttgcttacagagatgaaaacaaccagcctatctcaggggaatgaattggaagtaaccattatgatggtggtagaagcattatgtgaacttcattgtcctgaagctatacagggaattgctgtctggtcatcatctattgttggaaaaaatcttctgtggattaactcagtggctcaacaggctgaagggaggtttgaaaaggcctctgtggagtaccaggaacacctgtgtgccatgacaggtgttgattgctgcatctccagctttgacaaatcggtgctcaccttagccaatgctgggcgtaacagtgccagcccgaaacattctctgaatggtgaatccagaaaaactgtgctgtccaaaccgactgactcttcccctgaggttataaattatttaggaaataaagcatgtgagtgctacatctcaattgccgattgggctgctgtgcaggaatggcagaacgctatccatgacttgaaaaagagtaccagtagcacttccctcaacctgaaagctgacttcaactatataaaatcattaagcagctttgagtctggaaaatttgttgaatgtaccgagcagttagaattgttaccaggagaaaatatcaatctacttgctggaggatcaaaagaaaaaatagacatgaaaaaactgcttcctaacatgttaagtccggatccgagggaacttcagaaatccattgaagttcaattgttaagaagttctgtttgtttggcaactgctttaaacccgatagaacaagatcagaagtggcagtctataactgaaaatgtggtaaagtacttgaagcaaacatcccgcatcgctattggacctctgagactttctactttaacagtttcacagtctttgccagttctaagtaccttgcagctgtattgctcatctgctttggagaacacagtttctaacagactttcaacagaggactgtcttattccactcttcagtgaagctttacgttcatgtaaacagcatgacgtgaggccatggatgcaggcattaaggtatactatgtaccagaatcagttgttggagaaaattaaagaacaaacagtcccaattagaagccatctcatggaattaggtctaacagcagcaaaatttgctagaaaacgagggaatgtgtcccttgcaacaagactgctggcacagtgcagtgaagttcagctgggaaagaccaccactgcacaggatttagtccaacattttaaaaaactatcaacccaaggtcaagtggatgaaaaatgggggcccgaacttgatattgaaaaaaccaaattgctttatacagcaggccagtcaacacatgcaatggaaatgttgagttcttgtgccatatctttctgcaagtctgtgaaagctgaatatgcagttgctaaatcaattctgacactggctaaatggatccaggcagaatggaaagagatttcaggacagctgaaacaggtttacagagctcagcaccaacagaacttcacaggtctttctactttgtctaaaaacatactcactctaatagaactgccatctgttaatacgatggaagaagagtatcctcggatcgagagtgaatctacagtgcatattggagttggagaacctgacttcattttgggacagttgtatcacctgtcttcagtacaggcacctgaagtagccaaatcttgggcagcgttggccagctgggcttataggtggggcagaaaggtggttgacaatgccagtcagggagaaggtgttcgtctgctgcctagagaaaaatctgaagttcagaatctacttccagacactataactgaggaagagaaagagagaatatatggtattcttggacaggctgtgtgtcggccggcggggattcaggatgaagatataacacttcagataactgagagtgaagacaacgaagaagatgacatggttgatgttatctggcgtcagttgatatcaagctgcccatggctttcagaacttgatgaaagtgcaactgaaggagttattaaagtgtggaggaaagttgtagatagaatattcagcctgtacaaactctcttgcagtgcatactttactttccttaaactcaacgctggtcaaattcctttagatgaggatgaccctaggctgcatttaagtcacagagtggaacagagcactgatgacatgattgtgatggccacattgcgcctgctgcggttgctcgtgaagcacgctggtgagcttcggcagtatctggagcacggcttggagacaacacccactgcaccatggagaggaattattccgcaacttttctcacgcttaaaccaccctgaagtgtatgtgcgccaaagtatttgtaaccttctctgccgtgtggctcaagattccccacatctcatattgtatcctgcaatagtgggtaccatatcgcttagtagtgaatcccaggcttcaggaaataaattttccactgcaattccaactttacttggcaatattcaaggagaagaattgctggtttctgaatgtgagggaggaagtcctcctgcatctcaggatagcaataaggatgaacctaaaagtggattaaatgaagaccaagccatgatgcaggattgttacagcaaaattgtagataagctgtcctctgcaaaccccaccatggtattacaggttcagatgctcgtggctgaactgcgcagggtcactgtgctctgggatgagctctggctgggagttttgctgcaacaacacatgtatgtcctgagacgaattcagcagcttgaagatgaggtgaagagagtccagaacaacaacaccttacgcaaagaagagaaaattgcaatcatgagggagaagcacacagctttgatgaagcccatcgtatttgctttggagcatgtgaggagtatcacagcggctcctgcagaaacacctcatgaaaaatggtttcaggataactatggtgatgccattgaaaatgccctagaaaaactgaagactccattgaaccctgcaaagcctgggagcagctggattccatttaaagagataatgctaagtttgcaacagagagcacagaaacgtgcaagttacatcttgcgtcttgaagaaatcagtccatggttggctgccatgactaacactgaaattgctcttcctggggaagtctcagccagagacactgtcacaatccatagtgtgggcggaaccatcacaatcttaccgactaaaaccaagccaaagaaacttctctttcttggatcagatgggaagagctatccttatcttttcaaaggactggaggatttacatctggatgagagaataatgcagttcctatctattgtgaataccatgtttgctacaattaatcgccaagaaacaccccggttccatgctcgacactattctgtaacaccactaggaacaagatcaggactaatccagtgggtagatggagccacacccttatttggtctttacaaacgatggcaacaacgggaagctgccttacaagcacaaaaggcccaagattcctaccaaactcctcagaatcctggaattgtaccccgtcctagtgaactttattacagtaaaattggccctgctttgaaaacagttgggcttagcctggatgtgtcccgtcgggattggcctcttcatgtaatgaaggcagtattggaagagttaatggaggccacacccccgaatctccttgccaaagagctctggtcatcttgcacaacacctgatgaatggtggagagttacgcagtcttatgcaagatctactgcagtcatgtctatggttggatacataattggccttggagacagacatctggataatgttcttatagatatgacgactggagaagttgttcacatagattacaatgtttgctttgaaaaaggtaaaagccttagagttcctgagaaagtaccttttcgaatgacacaaaacattgaaacagcactgggtgtaactggagtagaaggtgtatttaggctttcatgtgagcaggttttacacattatgcggcgtggcagagagaccctgctgacgctgctggaggcctttgtgtacgaccctctggtggactggacagcaggaggcgaggctgggtttgctggtgctgtctatggtggaggtggccagcaggccgagagcaagcagagcaagagagagatggagcgagagatcacccgcagcctgttttcttctagagtagctgagattaaggtgaactggtttaagaatagagatgagatgctggttgtgcttcccaagttggacggtagcttagatgaatacctaagcttgcaagagcaactgacagatgtggaaaaactgcagggcaaactactggaggaaatagagtttctagaaggagctgaaggggtggatcatccttctcatactctgcaacacaggtattctgagcacacccaactacagactcagcaaagagctgttcaggaagcaatccaggtgaagctgaatgaatttgaacaatggataacacattatcaggctgcattcaataatttagaagcaacacagcttgcaagcttgcttcaagagataagcacacaaatggaccttggtcctccaagttacgtgccagcaacagcctttctgcagaatgctggtcaggcccacttgattagccagtgcgagcagctggagggggaggttggtgctctcctgcagcagaggcgctccgtgctccgtggctgtctggagcaactgcatcactatgcaaccgtggccctgcagtatccgaaggccatatttcagaaacatcgaattgaacagtggaagacctggatggaagagctcatctgtaacaccacagtagagcgttgtcaagagctctataggaaatatgaaatgcaatatgctccccagccacccccaacagtgtgtcagttcatcactgccactgaaatgaccctgcagcgatacgcagcagacatcaacagcagacttattagacaagtggaacgcttgaaacaggaagctgtcactgtgccagtttgtgaagatcagttgaaagaaattgaacgttgcattaaagttttccttcatgagaatggagaagaaggatctttgagtctagcaagtgttattatttctgccctttgtacccttacaaggcgtaacctgatgatggaaggtgcagcgtcaagtgctggagaacagctggttgatctgacttctcgggatggagcctggttcttggaggaactctgcagtatgagcggaaacgtcacctgcttggttcagttactgaagcagtgccccactgatagcagggactggacctatacccatgatagagggatcacatccagatacataagtagcccacattcttgccgtggtgtgaagttatgtttcttgacagcatcttcactagctatgattacgctcctccc

SEQ ID NO: 34695 - DNA, 1806 bp, Homo sapiens
aggaaatgaggctgaactttgtagtgccctcgctaaccttcagaccagtaaaccagatgctgtagagcagacatgtatattggaatctacagaaattgctttgcttaacaacatcccatatcatgaaggctttaaaatggcaatgagcaaagttttgtcttcactgactccagagaaactgtatcagaccatggatactcactgtcagaatgagatgagctctggaactggacagagtaatactgtacagaacatccttgaacctttctacgtgttagatgtgtccgaaggcttctctgttctgcctgttattgctggcacacttgggcaggttaaaccatacagttctgtggagaaagaccagcatcgtattgctctggacctcatatctgaagccaatcactttcctaaagaaacacttgagttttggctgagacatgtggaggatgaatctgctatgttacaaaggccaaaatcagacaagttatggagcataattatattggatgtcattgagccatctgggctcattcagcaggaaataatggaaaaagctgcaatatccaggtgtttactacaatctggaggcaagatctttcctcagtatgtgctgatgtttgggttgcttgtggaatcacagacactcctagaggagaatgctgttcaaggaacagaacgtactcttggattaaatatagcaccttttattaaccagtttcaggtacctatacgtgtatttttggacctatcctcattgccctgtatacctttaagcaagccagtggaactcttaagactagatttaatgactccgtatttgaacacctctaacagagaagtaaaggtatacgtttgtaaatctggaagactgactgctattccattttggtatcatatgtaccttgatgaagagattaggttggatacttcaagtgaagcctcccactggaaacaagctgcagttgttttagataatcccatccaggttgaaatgggagaggaacttgtactcagcattcagcatcacaaaagcaatgtcagcatcacagtaaagcaatgaagagcagttttccaatgaaaactgtgtaaatagagcatcaacaagtacaaaattcttgtcttaattagtgggggtatataaaaattccttgtaatggtcaaatattttttaaaattgacattaataaagcatattttaaaagattctaaaaaaaagggtagcattattatagaaatactgctgcagatttgctttctggaaaaggatacatcactagttttttaaattaggaaacttcttttgctcgattttacagaatagggattttaaaagtcttatcgttattgacatgtgtaagtaaagcaaaactttacttttgtaggcatcttggccttttttcttaaatccaaacttgtaattgggaaacactgaaaggcttccactgaagactgagggttatggttacctgtaaattccaatcttgcttcctttaaatactcagtgtacatctgaaacatctcaggttttgttttgagaatgcaagcttgaaaaagaatttaagctataagctaaatgtaattaaaacagtaaaggagttagggaataaatcttcaggaggcagcatttttcttggtctactttggcaaaagaacatttaaaagctggtaacaaaacaaagttaaattgaaggaagacttaatcctatactatttttcaaagttttgatttggatgtacaataagtacattaattgatccaatttttacaaacttttgaaataaaggaagatcattattatgcctcct

SEQ ID NO: 34696 - DNA, 1474 bp, Homo sapiens
aggaaatgaggctgaactttgtagtgccctcgctaaccttcagaccagtaaaccagatgctgtagagcagacatgtatattggaatctacagaaattgctttgcttaacaacatcccatatcatgaaggctttaaaatggcaatgagcaaagttttgtcttcactgactccagagaaactgtatcagaccatggatactcactgtcagaatgagatgagctctggaactggacagagtaatactgtacagaacatccttgaacctttctacgtgttagatgtgtccgaaggcttctctgttctgcctgttattgctggcacacttgggcaggttaaaccatacagttctgtggagaaagaccagcatcgtattgctctggacctcatatctgaagccaatcactttcctaaagaaacacttgagttttggctgagacatgtggaggatgaatctgctatgttacaaaggccaaaatcagacaagttatggagcataattatattggatgtcattgagccatctgggctcattcagcaggaaataatggaaaaagctgcaatatccaggtgtttactacaatctggaggcaagatctttcctcagtatgtgctgatgtttgggttgcttgtggaatcacagacactcctagaggagaatgctgttcaaggaacagaacgtactcttggattaaatatagcaccttttattaaccagtttcaggtacctatacgtgtatttttggacctatcctcattgccctgtatacctttaagcaagccagtggaactcttaagactagatttaatgactccgtatttgaacacctctaacagagaagtaaaggtatacgtttgtaaatctggaagactgactgctattccattttggtatcatatgtaccttgatgaagagattaggttggatacttcaagtgaagcctcccactggaaacaagctgcagttgttttagataatcccatccaggttgaaatgggagaggaacttgtactcagcattcagcatcacaaaagcaatgtcagcatcacagtaaagcaatgaagagcagttttccaatgaaaactgtgtaaatagagcatcaacaagtacaaaattcttgtcttaattagtgggggtatataaaaattccttgtaatggtcaaatattttttaaaattgacattaataaagcatattttaaaagattctaaaaaaaagaaaattggtctcttgggctaagcggtggagctttgcggcgtttccttaaggagggtaatcatgatctcgcttattgctcgttgcgttcggcgtcggttggggaagcggttaacttattcaagcgggaattcggttatcccaatcaggggtacgcaggaaaacttgtgacaaaggccgcaaagccggaaccgaaaggccggtggtgggttttctatggtccgcccctcaaattacaaaatcacttcaagaagggctacc

SEQ ID NO: 34697 - DNA, 959 bp, Homo sapiens
atactaaatatttttatcactgtataatgttcataataaagatctaattctagtgtttactacaatctggaggcaagatctttcctcagtatgtgctgatgtttgggttgcttgtggaatcacagacactcctagaggagaatgctgttcaaggaacagaacgtactcttggattaaatatagcaccttttattaaccagtttcaggtacctatacgtgtatttttggacctatcctcattgccctgtatacctttaagcaagccagtggaactcttaagactagatttaatgactccgtatttgaacacctctaacagagaagtaaaggtatacgtttgtaaatctggaagactgactgctattccattttggtatcatatgtaccttgatgaagagattaggttggatacttcaagtgaagcctcccactggaaacaagctgcagttgttttagataatcccatccaggttgaaatgggagaggaacttgtactcagcattcagcatcacaaaagcaatgtcagcatcacagtaaagcaatgaagagcagttttccaatgaaaactgtgtaaatagagcatcaacaagtacaaaattcttgtcttaattagtgggggtatataaaaattccttgtaatggtcaaatattttttaaaattgacattaataaagcatattttaaaagattctaaaaaaaagaaaattggtctcttgggctaagcggtggagctttgcggcgtttccttaaggagggtaatcatgatctcgcttattgctcgttgcgttcggcgtcggttggggaagcggttaacttattcaagcgggaattcggttatcccaatcaggggtacgcaggaaaacttgtgacaaaggccgcaaagccggaaccgaaaggccggtggtgggttttctatggtccgcccctcaaattacaaaatcacttcaagaagggctacc

SEQ ID NO: 34698 - DNA, 953 bp, Homo sapiens
gcggccgcctactactactactgcctactactactaaattcgcggccgcttgatgaagagattaggttggatacttcaagtgaagcctcccactggaaacaagctgcagttgttttagataatcccatccaggttgaaatgggagaggaacttgtactcagcattcagcatcacaaaagcaatgtcagcatcacagtaaagcaatgaagagcagttttccaatgaaaactgtgtaaatagagcatcaacaagtacaaaattcttgtcttaattagtgggggtatataaaaattccttgtaatggtcaaatattttttaaaattgacattaataaagcatattttaaaagattctaaaaaaaagggtagcattattatagaaatactgctgcagatttgctttctggaaaaggatacatcactagttttttaaattaggaaacttcttttgctcgattttacagaatagggattttaaaagtcttatcgttattgacatgtgtaagtaaagcaaaactttacttttgtaggcatcttggccttttttcttaaatccaaacttgtaattgggaaacactgaaaggcttccactgaagactgagggttatggttacctgtaaattccaatcttgcttcctttaaatactcagtgtacatctgaaacatctcaggttttgttttgagaatgcaagcttgaaaaagaatttaagctataagctaaatgtaattaaaacagtaaaggagttagggaataaatcttcaggaggcagcatttttcttggtctactttggcaaaagaacatttaaaagctggtaacaaaacaaagttaaattgaaggaagacttaatcctatactatttttcaaagttttgatttggatgtacaataagtacattaattgatccaatttttacaaacttttgaaataaaggaagatcattattatgcctcct

SEQ ID NO: 34699 - DNA, 320 bp, Homo sapiens
cacagacactcctagaggagaatgctgttcaaggaacagaacgtactcttggattaaatatagcaccttttattaaccagtttcaggtaagtgtctagaggagaagttcaaccaggatgctgttgaacagtctaccatcgctctctctttagtcactgtttaatctagctaaacacagtgactaaagtttagctggattaatcacagtgacttagatttttacctataataagttcctagaacaaaggaacttattataggtaaaaatcaacctagaggttacaataaccaaggaattttgtcatgactgctgataaaag

SEQ ID NO: 34700 - DNA, 429 bp, Homo sapiens
tattttgtgatcttctgacttctttgtaccttagaggccaggagatgataggactttattatcttctgacaaggtaaatcttattcatggaaaatctggacagtctattttatactatccagttgtatacaaatgggtaaagttatgtattcaccaaatcaaattttttttactacttgtctatatttctattacacgcaatttatatttttacactgaaattacattgagtaatatttaaaaaattaaatttgaatgctgaataaatgagtattttaccaaataattgtattaaagatagatgttgctaagttggaaagtgacatttaaaggtttcagccaggtgcagtggctcacacctgtaacatcaccactttgggaagccgaggcaggtggactccttgagctcaggagtttgagaccagcctg

SEQ ID NO: 34701 - DNA, 387 bp, Homo sapiens
gtgcatgcctgtagtcccagctactcaggaggctgaggtggaaggatcacttgagccccaggcatctaggagtttgaggctgcagtgagctatgatcttgccattgtagagtttgaggctgcagtgagctatgatcttgccattgtaccacggcctgggcaacactgacaccccatctcttaaaaaaaaaaaaaattaactccttaggggctctttcccccagatgttaaattctcaattcctatagaatatatcttaattgaaaatgttacaccaatgctgaatgatgcaccactgttttataacttatcttaagaagactggatgtggtggctcactcctgtaatcccaactcctcaagaggttgaggtgagaggatcactggag

SEQ ID NO: 34702 - DNA, 848 bp, Homo sapiens
gctccccaggttgcacttcgtaattctcactatccatggccttgttgataactgaggatctgatactggcttcctgatgtttcttttttttttggagacagagtctcgatctgttgcccgggctggagtgcaatggcaagatcaatctcagctcagtgcaaccttcacctcccgggttcaagcaatcctcctgcctcagactcccaagttgctgggattacagaaaaacctacatcacaaaggagaggtaacacgaccaaatcattaacagggaagcgaaagcaactgcaccaggaacctggagtcttatcaggagaataaatatgtatgtgaaatctcatactggattttcctgttcctttcctataaaagacgtggtttccgatgttgacctggggcaaaatcaaagctcacctgggctaagtcagcacacagttcctaatccttaggtaaaaagatacacttgtgaacagtaacgctcagtcaagctcacagcctctccacatcatcagggagttaacgtgcaatttataagcaggctaggatgcttgaagaatcccattccattcactaaaaacccagggatctcattcccaccctaagtgcagggcaagccctcggtattgtttcagttaacattcctgggcctcagtttcctcgtctgaaaaaggaagggactttggaatgggaaatctctacgatccctctcatgattcagataggctatttttcttttccaccaatagaggaagagactttctgacagccaacatttccattcctactattttggaacaaccagaacactgaaaatttggtacgaaaagcttttcttacgataaagagat

SEQ ID NO: 34703 - DNA, 758 bp, Homo sapiens
attcactcagaaaaaaaaataaccaacaaagagttatatgttaaacagcaaaaagaaaataatacagactagagccaaatatttattgactgagtaaggaagatgatttagaccattatttacatcatttcagaaaaacctacatcacaaaggagaggtaacacgaccaaatcattaacagggaagcgaaagcaactgcaccaggaacctggagtcttatcaggagaataaatatgtatgtgaaatctcatactggattttcctgttcctttcctataaaagacgtggtttccgatgttgacctggggcaaaatcaaagctcacctgggctaagtcagcacacagttcctaatccttaggtaaaaagatacacttgtgaacagtaacgctcagtcaagctcacagcctctccacatcatcagggagttaacgtgcaatttataagcaggctaggatgcttgaagaatcccattccattcactaaaaacccagggatctcattcccaccctaagtgcagggcaagccctcggtattgtttcagttaacattcctgggcctcagtttcctcgtctgaaaaaggaagggactttggaatgggaaatctctacgatccctctcatgattcagataggctatttttcttttccaccaatagaggaagagactttctgacagccaacatttccattcctactattttggaacaaccagaacactgaaaatttggtacgaaaagcttttcttacgataaagagat

SEQ ID NO: 34704 - DNA, 396 bp, Homo sapiens
tttttgagacagtgtcttactttgtcacccaggctgaagtgcagtggcacgatctcagttcactgcagcctcgacctcctgggttcaagtgatcctcccacctcagccccaagcggtcatacaccaccacacccaactaattttttgtatttgtggttgggggggaaccctcagacgaggttttgccatgttgcccaggcagatctcaaactcatgagctcaagcaatccacccacctcagccacccaaaacaaaggtcattcttaatgtgctatcagctgacgacaccatcaggtactctttgaattttgctgcaagcagggaactggaaatacctccctggccccaggatgacaatgactggccactgtacttgaccaccaggagggttttatg

SEQ ID NO: 34705 - DNA, 1160 bp, Homo sapiens
gagtcttttaaatcaagtactgattaactattaagtacaactttgagattttagttttaactcttcagaagccagtgtgaaatagaattggttattctcaaagactcaggataaactaaataagctatatatagagtacatttaaaatgtacaacacaaattggaaataaaataagttacaagataagtttacagggatatattgcttacaatttttaaaaggcagtttgttttttatgtgaatatgtttcttagtgaaattttacattcctttgttttggaagattggcgatatttgaagagttaaaaatagtacagaaatgtgaagtttggtatctctaaatgtgttgtacttgactttcttttttattttgtttttttttttttttgactacttagaattttcacaattctaataagattgtttccaagtctctcatgtgcaagctttaaaggatgcactcttgccattttatgtactggaagatcattggtcagatgaatactgtgtctgacaaaaatgtaaactgtataaactgaggaacctcagctaatcagtattactttgtagatcaccatgcccaccacatttcaaactcaaactatctgtagatttcaaaatccattgtgtttgagtttgtttgcagttccctcagcttgctggtaattgtggtgttttgttttttgttttgttttcaatgcaaatgtgatgtaatattcttattttctttggatcaaagctggactggaaattgtatcgtgtaattatttttgtgttcttaatgttatttggtactcaagttgtaaataacgtctactactgtttattccagtttctactacctcaggtgtcctatagatttttcttctaccaaagttcactttcacaatgaaattatatttgctgtgtgactatgattcctaagatttccagggcttaagggctaacttctattagcaccttactgtgtaagcaaatgttacaaaaaaaaaaaaaaaaaatctctgggttaagaaaatttggcttaaatgtatcctttgttattttaaatatattgagatattttaattaaaatttttaccccattgaaccgattttatagtatttgtacctattttggtgtttttgtctttatagtaaataaaagtttttgaacaaa

SEQ ID NO: 34706 - DNA, 931 bp, Homo sapiens
aaactccatctcaaaaataaataaataaataaatattagattaaataaacattaaattaaatgcactaaatattagatttttgaaaaatcttttgtgatgtcttagtccatcacggctgctataacaaatcccaccatagactaggttgtctataagcaacggccctttatctctcacagttcttgggggtttggttttaatgcatgaatttagctgggaaacaaactttcagaccatagcagatgccttgtgatcttcatgacaccttgaggccacattttgggatttttcccccactgtgaacacgcaatcctgaaatgacccaaagcagcgataaatatgatttggtttatatacaactttatagtaacatcttcactggaaaatgaaggatagttcaatggtctttttcctcttcagtgaatagtatggctggccaacatggcaaaaccccatctctgcaaaaaatacaaaaattagctgggcatggtggcatgcgcctgtaaatcccagctactcgggaggctgaggcaggagatttgcttgaatccaggaggtggaggttgcagtgagctgagatcacacaactgcactccagtctgggtgacagagtgagactccatctcaaaaaaaaaaaaaacccaaaaaactatatatatatatatacatgaatgtatccatcaaacagtggtcattgcacgtggctttttcagaacttatggttccttcatgtaacgtgagatatagtataggacacagtatatgcaggagaagacaagttctaccattgtacgtgagctagaaatgatcatctcaacaagaatttcaggctctttgatgcaagaatgtatggtgtctttctggtgttccttggccacttctgtctttgatgaatcattttgatactggattgggattcactgttaattt

SEQ ID NO: 34707 - DNA, 140 bp, Homo sapiens
caacaaacaacagcgaagaatttattgcatgaatttgggcacagagatagatatggaagcaatctttcttcactgtggcttttctggcaaaccagctttctaggcaagggaagtgggagaacccctggtttctagcattg

SEQ ID NO: 34708 - DNA, 338 bp, Homo sapiens
ccagcaaagtctcttttgaccacacgctttatccgagatgcttagaagtatatttggctgttttatttgcatctttgattaagatgtctatcattgtaaaaaggtattcaaaacaaaagtgtactcttttattattatgaatcacattgtactgagctgtgaagtcagtgttttaaaaatgtagagtttattcatggagcatgccattgaggtttggatggtggcaggtaaaacagaaaggcaagatgtcatctgacattaggctacttataaataaatgtttatctagcttttatttcatgccctaatgaataaaacatgcttggaaaaagaaagta

SEQ ID NO: 34709 - DNA, 739 bp, Homo sapiens
agcggaggaaggggctcccacagtgcagtgggggggctgaagggctcctcaaatgccaccaaagtgggagcccaggcaggggaggtgccgagagcaagcgagggctctgaggactgccagcatgctgtcacctctcagcaggctggattggatttggcacttctttactgaaggctggagtgcaatggtgcgatctcagctcatcaagttcaagagactctaatgcctcagcctcccaagtagcaggggttacagattctttaatctccagctcagcttcaacaattcaacgctgttctttctgaaaaagtacacatcgtgccttctctacttcgctcttggaacataatttctcatggcaggtatgtgtgatttcagtcactaaattaaaaataaccagaaaagctatttcttggattggctgattttggggtaatgctttaagagaaaaggacatgattaacagtggatgtttttaggattttcatgcattagcactttccacattcattatattttcctgattcttcattgtataacttagacatgatttcatgaagttttttccacaggtttgaagagtggtttctgacagggctacctttaaattctgagtgagaactgaactttagcctggttaaattgtgagcaacagtgttctagtatagcaatagaaaatgccaaatattaatgacacaatgctgaaaaggttttaattgactatttatgttgtgacatc

SEQ ID NO: 34710 - DNA, 548 bp, Homo sapiens
ctgtattgtggttcctggaacactttagaggcttgtgattctactgcttcttattcacactataatacatgtctcaccaatagatgattcaagaacatcatttaaatacacaatttttcattctctatttttgctaaatttcttcatactcaactttcagattctttaatctccagctcagcttcaacaattcaacgctgttctttctgaaaaagtacacatcgtgccttctctacttcgctcttggaacataatttctcatggcagcttttactaaactgagtattgagccagcatttactccaggacccaacatagaactccagaaagactctgactgctgttcttgccaagaaaaatgggttgggtaccggtgcaactgttacttcatttccagtgaacagaaaacttggaacgaaagtcggcatctctgtgcttctcagaaatccagcctgcttcagcttcaaaacacagatgaactggcatgtgctgagtctgattttctacattttctttgatctagaaaaatatactatctaaacaagtta

SEQ ID NO: 34711 - DNA, 1730 bp, Homo sapiens
ctgtattgtggttcctggaacactttagaggcttgtgattctactgcttcttattcacactataatacatgtctcaccaatagatgattcaagaacatcatttaaatacacaatttttcattctctatttttgctaaatttcttcatactcaactttcagattctttaatctccagctcagcttcaacaattcaacgctgttctttctgaaaaagtacacatcgtgccttctctacttcgctcttggaacataatttctcatggcagtgtttaagaccactctgtggaggttaatttctgggaccttagggataatatgcctttcgttgatggctacgttgggaattttgttgaaaaattcttttactaaactgagtattgagccagcatttactccaggacccaacatagaactccagaaagactctgactgctgttcttgccaagaaaaatgggttgggtaccggtgcaactgttacttcatttccagtgaacagaaaacttggaacgaaagtcggcatctctgtgcttctcagaaatccagcctgcttcagcttcaaaacacagatgaactggattttatgagctccagtcaacaattttactggattggactctcttacagtgaggagcacaccgcctggttgtgggagaatggctctgcactctcccagtatctatttccatcatttgaaacttttaatacaaagaactgcatagcgtataatccaaatggaaatgctttagatgaatcctgtgaagataaaaatcgttatatctgtaagcaacagctcatttaaatgtttcttggggcagagaaggtggagagtaaagacccaacattactaacaatgatacagttgcatgttatattattactaattgtctacttctggagtctataaaatgtttttaaacagtgtcatatacaattgtcatgtatgtgaaacaatgtgttttaaaattgatgaaattcgttcacctacatttgagaattataaaattaacataaagaattttgtattttcatttaatgtatataatgttaaattcaatgtagttttattacacatttatgtaattttatttacattcttgctaattctcagcagaaatttaaataagatttaattcacatcaaataaaatttagaaaataaaatttaactcacactgcccaggctggagcatagtggcaagatcatagctcattgcaagctcaagtgatcctcctgactcagcctcccaagtagctaggactgcaggcaccatgtcactatgcccgactaatttttaatttttaattttttgtcaagacaaggtcttgctatgttgcccaggctggtcttgaactcctggcctcaagggattctcccaccttggattcccaaagtgctgggattataggtgtgaaccaccatccctggccctcttcacattcttgtatgaagattgatttgggaaaaatgcatttcaggtaactgacaaaagatataggatgaaaaataatatctttcaaatgtttaatttgaactaagagagcttatgcattgcactttctggagatttgtaatgttttggttttgttgtccatgtgactacaaaataatatattttttaattaaaaaatttaaaataataaaaaacagaaaaagcaaaacaaaaagaaaaaaacatttgtgggggcggcttggggccctgggaaaagttttataaaacacaatcgggtgg

SEQ ID NO: 34712 - DNA, 1637 bp, Homo sapiens
ctgtattgtggttcctggaacactttagaggcttgtgattctactgcttcttattcacactataatacatgtctcaccaatagatgattcaagaacatcatttaaatacacaatttttcattctctatttttgctaaatttcttcatactcaactttcagattctttaatctccagctcagcttcaacaattcaacgctgttctttctgaaaaagtacacatcgtgccttctctacttcgctcttggaacataatttctcatggcagcttttactaaactgagtattgagccagcatttactccaggacccaacatagaactccagaaagactctgactgctgttcttgccaagaaaaatgggttgggtaccggtgcaactgttacttcatttccagtgaacagaaaacttggaacgaaagtcggcatctctgtgcttctcagaaatccagcctgcttcagcttcaaaacacagatgaactggattttatgagctccagtcaacaattttactggattggactctcttacagtgaggagcacaccgcctggttgtgggagaatggctctgcactctcccagtatctatttccatcatttgaaacttttaatacaaagaactgcatagcgtataatccaaatggaaatgctttagatgaatcctgtgaagataaaaatcgttatatctgtaagcaacagctcatttaaatgtttcttggggcagagaaggtggagagtaaagacccaacattactaacaatgatacagttgcatgttatattattactaattgtctacttctggagtctataaaatgtttttaaacagtgtcatatacaattgtcatgtatgtgaaacaatgtgttttaaaattgatgaaattcgttcacctacatttgagaattataaaattaacataaagaattttgtattttcatttaatgtatataatgttaaattcaatgtagttttattacacatttatgtaattttatttacattcttgctaattctcagcagaaatttaaataagatttaattcacatcaaataaaatttagaaaataaaatttaactcacactgcccaggctggagcatagtggcaagatcatagctcattgcaagctcaagtgatcctcctgactcagcctcccaagtagctaggactgcaggcaccatgtcactatgcccgactaatttttaatttttaattttttgtcaagacaaggtcttgctatgttgcccaggctggtcttgaactcctggcctcaagggattctcccaccttggattcccaaagtgctgggattataggtgtgaaccaccatccctggccctcttcacattcttgtatgaagattgatttgggaaaaatgcatttcaggtaactgacaaaagatataggatgaaaaataatatctttcaaatgtttaatttgaactaagagagcttatgcattgcactttctggagatttgtaatgttttggttttgttgtccatgtgactacaaaataatatattttttaattaaaaaatttaaaataataaaaaacagaaaaagcaaaacaaaaagaaaaaaacatttgtgggggcggcttggggccctgggaaaagttttataaaacacaatcgggtgg

SEQ ID NO: 34713 - DNA, 1195 bp, Homo sapiens
ctgtattgtggttcctggaacactttagaggcttgtgattctactgcttcttattcacactataatacatgtctcaccaatagatgattcaagaacatcatttaaatacacaatttttcattctctatttttgctaaatttcttcatactcaactttcagattctttaatctccagctcagcttcaacaattcaacgctgttctttctgaaaaagtacacatcgtgccttctctacttcgctcttggaacataatttctcatggcagtgtttaagaccactctgtggaggttaatttctgggaccttagggataatatgcctttcgttgatggctacgttgggaattttgttgaaaaattcttttactaaactgagtattgagccagcatttactccaggacccaacatagaactccagaaagactctgactgctgttcttgccaagaaaaatgggttgggtaccggtgcaactgttacttcatttccagtgaacagaaaacttggaacgaaagtcggcatctctgtgcttctcagaaatccagcctgcttcagcttcaaaacacagatgaactggattttatgagctccagtcaacaattttactggattggactctcttacagtgaggagcacaccgcctggttgtgggagaatggctctgcactctcccagtatctatttccatcatttgaaacttttaatacaaagaactgcatagcgtataatccaaatggaaatgctttagatgaatcctgtgaagataaaaatcgttatatctacaaggtcttgctatgttgcccaggctggtcttgaactcctggcctcaagggattctcccaccttggattcccaaagtgctgggattataggtgtgaaccaccatccctggccctcttcacattcttgtatgaagattgatttgggaaaaatgcatttcaggtaactgacaaaagatataggatgaaaaataatatctttcaaatgtttaatttgaactaagagagcttatgcattgcactttctggagatttgtaatgttttggttttgttgtccatgtgactacaaaataatatattttttaattaaaaaatttaaaataataaaaaacagaaaaagcaaaacaaaaagaaaaaaacatttgtgggggcggcttggggccctgggaaaagttttataaaacacaatcgggtgg

SEQ ID NO: 34714 - DNA, 526 bp, Homo sapiens
aaacatttaacacagaaaagccatagacttacatctagattctaccattaagatatttctatacttgctttatcacctatcttcccatctattcattcatcagttaatcttattttcagtgaattttaaagtataatacattgcagatatcagtacatatctccctaatacttcaacatttatatcattaagtagagttcaatatttgcttacagctttttaaagttacaatgtatatgcaatgatgtttaaaatattaaatatacactcactgagttttgaccaatgcatatacctatttaacccaaacccttatcaagatataaaatattactatcactacaggaagtactctcatacttctgcacatacatctcagaggaacccacagtttgattttcttttaccactatagattagatttttgcctgttctgtttatctcttcttttatgaatacacatctggactctttccagtttcaggttattatgaataaagttgctgtgaacattcatgtaaaagtg

SEQ ID NO: 34715 - DNA, 2011 bp, Homo sapiens
acgcgtccgcccacgcgtccgaagaacaacaatttgaatgggacaacagaagaagtgacttcagaagaagaggaagaagaagaagagatggctgaagatatagaagacttagatcactatgagatgaaggaagaagagcctattagtgggaaaaagtcagaggatgaaggaattgaaaaagaaaatttggcaatattagagaaaattaggaagactcaaaggcaagaccatttaaatgataactttccatttgatcctccatttgttcgagtggtgttacctgttctctcaggaggaatcaatataatctagcaagagcccaacaatcctataattccattgtacagatacatgagaaaaatggctggtacacccctccaaaggaagatggctaaatatgttgactgttgtatgtttggactaatgttgctttaaagaaaatctttccaacatgcagacaaaagctttgagtgcccctattacagcagtaccgaagatgttagttaatagatattttagtggataatctgtcatctgacatccagtataagttacagccttcgcattttgctcattttagatatcttggactgagcagtggggcctttactgtatttttcctgataaatacacatactggccactccttatctctttttcttgaaaagtgaactttttaaagcagccaagtcaacatcaggctactgaagttgaggctttagggtaactttcctatattgagcccatgggttacaaggatttgcaatatattgttccatttacagccaatacaggtttaatcgatgttcaatattggtttaggaaatttaaggccttctaaatcataatagctctttcatgtctaaaaccattttatgatattgccaaaatgtgataggaaacctactcattaaattgttaaactttttaatgactatgtgaagatatgaattgtttcctgaagataatactcttaattgagttgtattgtacttcttaggcaaagcagtgtaaaactgtatcaattaaggcttgtgagtagtgatttccactggggcatcagagtcttggctgggctgaatctgctgcttgttggttcagtgtttcttatgaacaagagccacagtacagagcttcaagttatttaaaatactaagtcatcttacgtttccattttattaacgggatgttgcaatcgtttgtaaactaataaacttataaagtgattggcacaaagactccttgagcaaaagctgtgcagttaagtacaaaaagatacttaatttggagactcttacagtaatttttgccatgtcaaaacaatggcttttacattgaaagattaatagaaactctacatatgttaatttttttatagaacctgactcaaatcaaggtactctccattttattgccttacctgaatcagtcctttttggttggtaatagatttttttatacacccacgtttgatttaaaagtaaattctagttcttaagcacttttaacaagaaatccagaagcacatttttctgcacaaacaagttacaaagttcaaaagtgtttcttgtgcattagctttgagattcagtttttaactttgtaaaccacatctgagagacttgtcatttctacattgtgtgtgtttaatttcttttgattccattttggttaagagagcagtaaatagattttctggtattcttgttcacttgattacatttgtataaagttctgattgccagttgctcagataacaagtgacaaggcagaattctttaaatcagtaaagttccttaagcctaaggctaaatcttgaatacattgttgaattctttaatatcctgatggcaagcagactgatagctgcacatttggcatgctttgtttaatggattttatttttaattgcagatttatttggcaatgtacagtaaattttgtaaacttgcatcaagtttatgaataaagaaccatttaaaaattttgtttgtgctgatcatggcaagca

SEQ ID NO: 34716 - DNA, 2999 bp, Homo sapiens
gtgcacgcgctgaaaccggagcgcgcagggcgcgccagggtgagggggacgggggcggggtgggggcagccctttcccaggcggtagcgggggcggcgtcgctgttgcccttttaagccgcggggccgccgcctcctgccgctggagtcggttacaaaggaagcgccacccaggccgccacacgccgaggcttccgcgcccctcgccattttccagcagcgctcgacgaggcggagccgcgagagcgcggcccaggccggccccgcggggcggtcgcggccgtgacggcggctccgggcccggctccccttccgcgcccggctccccttccgcgcccctcccgccggagatgaggggaagatgtccgtgtcagggctcaaggccgagctgaagttcctggcgtccatcttcgacaagaaccacgagcgattccgcatcgtcagttggaagctggacgagctgcactgccagttcctggtgccgcagcagggcagcccgcactcgctgccgccgccactcacgctccactgcaacatcacggaatcctatccatcttcttcaccgatatggtttgtggattctgaagacccaaatctgacatcagttctggaacgtctagaagatactaagaacaacaatttgaatgggacaacagaagaagtgacttcagaagaagaggaagaagaagaagagatggctgaagatatagaagacttagatcactatgagatgaaggaagaagagcctattagtgggaaaaagtcagaggatgaaggaattgaaaaagaaaatttggcaatattagagaaaattaggaagactcaaaggcaagaccatttaaatggtgcagtgtctgggtcagtgcaagcttcagatagacttatgaaagagctcagggacatatacagatcacagagttataaaacagggatttattcagtggaactcataaatgacagtttatatgactggcatgttaaactgcagaaggttgaccctgatagtcctttgcacagtgatcttcagatcttaaaagaaaaagaaggcatagaatatattttgcttaacttctcttttaaggataactttccatttgatcctccatttgttcgagtggtgttacctgttctctcaggagggtatgtattgggtggaggagcattatgtatggaacttctcacaaaacagggctggagcagtgcctactcaatagaatcggtcatcatgcaaataaatgccaccttagtcaaaggcaaagccagagtgcagtttggagcaaataagaatcaatataatctagcaagagcccaacaatcctataattccattgtacagatacatgagaaaaatggctggtacacccctccaaaggaagatggctaaatatgttgactgttgtatgtttggactaatgttgctttaaagaaaatctttccaacatgcagacaaaagctttgagtgcccctattacagcagtaccgaagatgttagttaatagatattttagtggataatctgtcatctgacatccagtataagttacagccttcgcattttgctcattttagatatcttggactgagcagtggggcctttactgtatttttcctgataaatacacatactggccactccttatctctttttcttgaaaagtgaactttttaaagcagccaagtcaacatcaggctactgaagttgaggctttagggtaactttcctatattgagcccatgggttacaaggatttgcaatatattgttccatttacagccaatacaggtttaatcgatgttcaatattggtttaggaaatttaaggccttctaaatcataatagctctttcatgtctaaaaccattttatgatattgccaaaatgtgataggaaacctactcattaaattgttaaactttttaatgactatgtgaagatatgaattgtttcctgaagataatactcttaattgagttgtattgtacttcttaggcaaagcagtgtaaaactgtatcaattaaggcttgtgagtagtgatttccactggggcatcagagtcttggctgggctgaatctgctgcttgttggttcagtgtttcttatgaacaagagccacagtacagagcttcaagttatttaaaatactaagtcatcttacgtttccattttattaacgggatgttgcaatcgtttgtaaactaataaacttataaagtgattggcacaaagactccttgagcaaaagctgtgcagttaagtacaaaaagatacttaatttggagactcttacagtaatttttgccatgtcaaaacaatggcttttacattgaaagattaatagaaactctacatatgttaatttttttatagaacctgactcaaatcaaggtactctccattttattgccttacctgaatcagtcctttttggttggtaatagatttttttatacacccacgtttgatttaaaagtaaattctagttcttaagcacttttaacaagaaatccagaagcacatttttctgcacaaacaagttacaaagttcaaaagtgtttcttgtgcattagctttgagattcagtttttaactttgtaaaccacatctgagagacttgtcatttctacattgtgtgtgtttaatttcttttgattccattttggttaagagagcagtaaatagattttctggtattcttgttcacttgattacatttgtataaagttctgattgccagttgctcagataacaagtgacaaggcagaattctttaaatcagtaaagttccttaagcctaaggctaaatcttgaatacattgttgaattctttaatatcctgatggcaagcagactgatagctgcacatttggcatgctttgtttaatggattttatttttaattgcagatttatttggcaatgtacagtaaattttgtaaacttgcatcaagtttatgaataaagaaccatttaaaaattttgtttgtgctgatcatggcaagca

SEQ ID NO: 34717 - DNA, 414 bp, Homo sapiens
ccacgcgtccgcacacaatgtagaaatgacaagtctctcagatgtgtgtttaatttcttttgattccattttggttaagagagcagtaaatagattttctggtattcttgttcacttgattacatttgtataaagttctgattgccagttgctcagataacaagtgacaaggcagaattctttaaatcagtaaagttccttaagcctaaggctaaatcttgaatacattgttgaattctttaatatcctgatggcaagcagactgatagctgcacatttggcatgctttgtttaatggattttatttttaattgcagatttatttggcaatgtacagtaaattttgtaaacttgcatcaagtttatgaataaagaaccatttaaaaattttgtttgtgctgatcatggcaagca

SEQ ID NO: 34718 - DNA, 913 bp, Homo sapiens
cttctcgccaggggctggcttgggggcttctggcccatctcggtccccgtctcctagccccgaggggggagtccgcggcggcccaagcccttgtggggtccatggccgccctcagccggcctgctcccgggaccggggcggggcggggcggggcggcgcagctccggctgttgtttgagcccaggccggcaaggggaacggcccttaagttttaacgcctcatttttcagtcggattttccttcttcccgcttgttcagccaattgtttttaagtttgcgtttaaggagaaactgacaatgagaatggactcgttgacggaggaaaagttggaatgcagactctggtgctgtttgagcgacccctctcccccgggcctggctgcgcgctgctgtgttctggaaaggagcatagtaccgtcgttgcggcaggaatcctatccatcttcttcaccgatatggtttgtggattctgaagacccaaatctgacatcagttctggaacgtctagaagatactaagaacaacaatttgcttcgtcagcaattgaagtggttgatatgtgaactctgcagtttatataaccttcctaagcacctggatgttgagatgctagatcaaccactacccacgggtcagaatgggacaacagaagaagtgacttcagaagaagaggaagaagaagaagagatggctgaagataactttccatttgatcctccatttgttcgagtggtgttacctgttctctcaggaggtgtattgcgtggcaggaagcattaatgtatggaacttctcacaaaacagggctggaaccatgcctactccatagaattcggcaatatgcaattaaatgccactttagtcaaagcaaagcagaggagttggacaatagaatatttatctacgacccaa

SEQ ID NO: 34719 - DNA, 598 bp, Homo sapiens
atagcttagttgttccatgttttaagagcaaaatttctagctttcgttggctatttagtgtatacatttataccatagtaatagttatatgatgaaatgaagagtagctaacatgctctatatcttaacagggatttattcagtggaactcataaatgacagtttatatgactggcatgttaaactgcagaagtaagtggctttttaatgctcacccactctttgcaatggtagactatcacagtggaggttattttccttctaacttgatacctttatactatggcttttacttagaactttagactttgtttctatagaaatagttcttagattgtttaaatgagctgttgctgaggtctaataagaaagtgagaaagaggaaggacagaaagagggaccagctgcgggataaagtgttgagctcaacgctttatacttctcaacgctttatactttctcaacgctttatacttcctcaacgctttatactttctcacgctttatacttcctcacgctttatacttccgtattgaattcaagtataatattaagtatgctggagaagtataaagcgtgaaaagtataaagcgttga

SEQ ID NO: 34720 - DNA, 191 bp, Homo sapiens
gcggccgcctactactactactactgctcgaattcaagcttctaacgatgtacggggacatgctttgtttaatggattttatttttaattgcagatttatttggcaatgtacagtaaattttgtaaacttgcatcaagtttatgaataaagaaccatttaaaaattttgtttgtgctgatcatggcaagca

SEQ ID NO: 34721 - DNA, 2892 bp, Homo sapiens
gtgcacgcgctgaaaccggagcgcgcagggcgcgccagggtgagggggacgggggcggggtgggggcagccctttcccaggcggtagcgggggcggcgtcgctgttgcccttttaagccgcggggccgccgcctcctgccgctggagtcggttacaaaggaagcgccacccaggccgccacacgccgaggcttccgcgcccctcgccattttccagcagcgctcgacgaggcggagccgcgagagcgcggcccaggccggccccgcggggcggtcgcggccgtgacggcggctccgggcccggctccccttccgcgcccggctccccttccgcgcccctcccgccggagatgaggggaagatgtccgtgtcagggctcaaggccgagctgaagttcctggcgtccatcttcgacaagaaccacgagcgattccgcatcgtcagttggaagctggacgagctgcactgccagttcctggtgccgcagcagggcagcccgcactcgctgccgccgccactcacgctccactgcaacatcacggaatcctatccatcttcttcaccgatatggtttgtggattctgaagacccaaatctgacatcagttctggaacgtctagaagatactaagaacaacaatttgcttcgtcagcaattgaagtggttgatatgtgaactctgcagtttatataaccttcctaagcacctggatgttgagatgctagatcaaccactacccacgggtcagaatgggacaacagaagaagtgacttcagaagaagaggaagaagaagaagagatggctgaagatatagaagacttagatcactatgagatgaaggaagaagagcctattagtgggaaaaagtcagaggatgaaggaattgaaaaagaaaatttggcaatattagagaaaattaggaagactcaaaggcaagaccatttaaatggtgcagtgtctgggtcagtgcaagcttcagatagacttatgaaagagctcagggacatatacagatcacagagttataaaacagggatttattcagtggaactcataaatgacagtttatatgactggcatgttaaactgcagaaggttgaccctgatagtcctttgcacagtgatcttcagatcttaaaagaaaaagaaggcatagaatatattttgcttaacttctcttttaaggataactttccatttgatcctccatttgttcgagtggtgttacctgttctctcaggagggctggtacacccctccaaaggaagatggctaaatatgttgactgttgtatgtttggactaatgttgctttaaagaaaatctttccaacatgcagacaaaagctttgagtgcccctattacagcagtaccgaagatgttagttaatagatattttagtggataatctgtcatctgacatccagtataagttacagccttcgcattttgctcattttagatatcttggactgagcagtggggcctttactgtatttttcctgataaatacacatactggccactccttatctctttttcttgaaaagtgaactttttaaagcagccaagtcaacatcaggctactgaagttgaggctttagggtaactttcctatattgagcccatgggttacaaggatttgcaatatattgttccatttacagccaatacaggtttaatcgatgttcaatattggtttaggaaatttaaggccttctaaatcataatagctctttcatgtctaaaaccattttatgatattgccaaaatgtgataggaaacctactcattaaattgttaaactttttaatgactatgtgaagatatgaattgtttcctgaagataatactcttaattgagttgtattgtacttcttaggcaaagcagtgtaaaactgtatcaattaaggcttgtgagtagtgatttccactggggcatcagagtcttggctgggctgaatctgctgcttgttggttcagtgtttcttatgaacaagagccacagtacagagcttcaagttatttaaaatactaagtcatcttacgtttccattttattaacgggatgttgcaatcgtttgtaaactaataaacttataaagtgattggcacaaagactccttgagcaaaagctgtgcagttaagtacaaaaagatacttaatttggagactcttacagtaatttttgccatgtcaaaacaatggcttttacattgaaagattaatagaaactctacatatgttaatttttttatagaacctgactcaaatcaaggtactctccattttattgccttacctgaatcagtcctttttggttggtaatagatttttttatacacccacgtttgatttaaaagtaaattctagttcttaagcacttttaacaagaaatccagaagcacatttttctgcacaaacaagttacaaagttcaaaagtgtttcttgtgcattagctttgagattcagtttttaactttgtaaaccacatctgagagacttgtcatttctacattgtgtgtgtttaatttcttttgattccattttggttaagagagcagtaaatagattttctggtattcttgttcacttgattacatttgtataaagttctgattgccagttgctcagataacaagtgacaaggcagaattctttaaatcagtaaagttccttaagcctaaggctaaatcttgaatacattgttgaattctttaatatcctgatggcaagcagactgatagctgcacatttggcatgctttgtttaatggattttatttttaattgcagatttatttggcaatgtacagtaaattttgtaaacttgcatcaagtttatgaataaagaaccatttaaaaattttgtttgtgctgatcatggcaagca

SEQ ID NO: 34722 - DNA, 3104 bp, Homo sapiens
gtgcacgcgctgaaaccggagcgcgcagggcgcgccagggtgagggggacgggggcggggtgggggcagccctttcccaggcggtagcgggggcggcgtcgctgttgcccttttaagccgcggggccgccgcctcctgccgctggagtcggttacaaaggaagcgccacccaggccgccacacgccgaggcttccgcgcccctcgccattttccagcagcgctcgacgaggcggagccgcgagagcgcggcccaggccggccccgcggggcggtcgcggccgtgacggcggctccgggcccggctccccttccgcgcccggctccccttccgcgcccctcccgccggagatgaggggaagatgtccgtgtcagggctcaaggccgagctgaagttcctggcgtccatcttcgacaagaaccacgagcgattccgcatcgtcagttggaagctggacgagctgcactgccagttcctggtgccgcagcagggcagcccgcactcgctgccgccgccactcacgctccactgcaacatcacggaatcctatccatcttcttcaccgatatggtttgtggattctgaagacccaaatctgacatcagttctggaacgtctagaagatactaagaacaacaatttgcttcgtcagcaattgaagtggttgatatgtgaactctgcagtttatataaccttcctaagcacctggatgttgagatgctagatcaaccactacccacgggtcagaatgggacaacagaagaagtgacttcagaagaagaggaagaagaagaagagatggctgaagatatagaagacttagatcactatgagatgaaggaagaagagcctattagtgggaaaaagtcagaggatgaaggaattgaaaaagaaaatttggcaatattagagaaaattaggaagactcaaaggcaagaccatttaaatggtgcagtgtctgggtcagtgcaagcttcagatagacttatgaaagagctcagggacatatacagatcacagagttataaaacagggatttattcagtggaactcataaatgacagtttatatgactggcatgttaaactgcagaaggttgaccctgatagtcctttgcacagtgatcttcagatcttaaaagaaaaagaaggcatagaatatattttgcttaacttctcttttaaggataactttccatttgatcctccatttgttcgagtggtgttacctgttctctcaggagggtatgtattgggtggaggagcattatgtatggaacttctcacaaaacagggctggagcagtgcctactcaatagaatcggtcatcatgcaaataaatgccaccttagtcaaaggcaaagccagagtgcagtttggagcaaataagaatcaatataatctagcaagagcccaacaatcctataattccattgtacagatacatgagaaaaatggctggtacacccctccaaaggaagatggctaaatatgttgactgttgtatgtttggactaatgttgctttaaagaaaatctttccaacatgcagacaaaagctttgagtgcccctattacagcagtaccgaagatgttagttaatagatattttagtggataatctgtcatctgacatccagtataagttacagccttcgcattttgctcattttagatatcttggactgagcagtggggcctttactgtatttttcctgataaatacacatactggccactccttatctctttttcttgaaaagtgaactttttaaagcagccaagtcaacatcaggctactgaagttgaggctttagggtaactttcctatattgagcccatgggttacaaggatttgcaatatattgttccatttacagccaatacaggtttaatcgatgttcaatattggtttaggaaatttaaggccttctaaatcataatagctctttcatgtctaaaaccattttatgatattgccaaaatgtgataggaaacctactcattaaattgttaaactttttaatgactatgtgaagatatgaattgtttcctgaagataatactcttaattgagttgtattgtacttcttaggcaaagcagtgtaaaactgtatcaattaaggcttgtgagtagtgatttccactggggcatcagagtcttggctgggctgaatctgctgcttgttggttcagtgtttcttatgaacaagagccacagtacagagcttcaagttatttaaaatactaagtcatcttacgtttccattttattaacgggatgttgcaatcgtttgtaaactaataaacttataaagtgattggcacaaagactccttgagcaaaagctgtgcagttaagtacaaaaagatacttaatttggagactcttacagtaatttttgccatgtcaaaacaatggcttttacattgaaagattaatagaaactctacatatgttaatttttttatagaacctgactcaaatcaaggtactctccattttattgccttacctgaatcagtcctttttggttggtaatagatttttttatacacccacgtttgatttaaaagtaaattctagttcttaagcacttttaacaagaaatccagaagcacatttttctgcacaaacaagttacaaagttcaaaagtgtttcttgtgcattagctttgagattcagtttttaactttgtaaaccacatctgagagacttgtcatttctacattgtgtgtgtttaatttcttttgattccattttggttaagagagcagtaaatagattttctggtattcttgttcacttgattacatttgtataaagttctgattgccagttgctcagataacaagtgacaaggcagaattctttaaatcagtaaagttccttaagcctaaggctaaatcttgaatacattgttgaattctttaatatcctgatggcaagcagactgatagctgcacatttggcatgctttgtttaatggattttatttttaattgcagatttatttggcaatgtacagtaaattttgtaaacttgcatcaagtttatgaataaagaaccatttaaaaattttgtttgtgctgatcatggcaagca

SEQ ID NO: 34723 - DNA, 3443 bp, Homo sapiens
gtgcacgcgctgaaaccggagcgcgcagggcgcgccagggtgagggggacgggggcggggtgggggcagccctttcccaggcggtagcgggggcggcgtcgctgttgcccttttaagccgcggggccgccgcctcctgccgctggagtcggttacaaaggaagcgccacccaggccgccacacgccgaggcttccgcgcccctcgccattttccagcagcgctcgacgaggcggagccgcgagagcgcggcccaggccggccccgcggggcggtcgcggccgtgacggcggctccgggcccggctccccttccgcgcccggctccccttccgcgcccctcccgccggagatgaggggaagatgtccgtgtcagggctcaaggccgagctgaagttcctggcgtccatcttcgacaagaaccacgagcgattccgcatcgtcagttggaagctggacgagctgcactgccagttcctggtgccgcagcagggcagcccgcactcgctgccgccgccactcacgctccactgcaacatcacggaatcctatccatcttcttcaccgatatggtttgtggattctgaagacccaaatctgacatcagttctggaacgtctagaagatactaagaacaacaatttgcttcgtcagcaattgaagtggttgatatgtgaactctgcagtttatataaccttcctaagcacctggatgttgagatgctagatcaaccactacccacgggtcagaatgggacaacagaagaagtgacttcagaagaagaggaagaagaagaagagatggctgaagatatagaagacttagatcactatgagatgaaggaagaagagcctattagtgggaaaaagtcagaggatgaaggaattgaaaaagaaaatttggcaatattagagaaaattaggaagactcaaaggcaagaccatttaaatggtgcagtgtctgggtcagtgcaagcttcagatagacttatgaaagagctcagggacatatacagatcacagagttataaaacagggatttattcagtggaactcataaatgacagtttatatgactggcatgttaaactgcagaagtaagtggctttttaatgctcacccactctttgcaatggtagactatcacagtggaggttattttccttctaacttgatacctttatactatggcttttacttagaactttagactttgtttctatagaaatagttcttagattgtttaaatgagctgttgctgaggtctaataagaaagtgagaaagaggaaggacagaaagagggaccagctgcgggataaagtgttttatggagttagagcaggggaacttaaaaacaaaagtgtatttaataacttcatgagactgtgataaccagtttatatttgaaatatatacagcactttgggagactgagggttgaccctgatagtcctttgcacagtgatcttcagatcttaaaagaaaaagaaggcatagaatatattttgcttaacttctcttttaaggataactttccatttgatcctccatttgttcgagtggtgttacctgttctctcaggagggtatgtattgggtggaggagcattatgtatggaacttctcacaaaacagggctggagcagtgcctactcaatagaatcggtcatcatgcaaataaatgccaccttagtcaaaggcaaagccagagtgcagtttggagcaaataagaatcaatataatctagcaagagcccaacaatcctataattccattgtacagatacatgagaaaaatggctggtacacccctccaaaggaagatggctaaatatgttgactgttgtatgtttggactaatgttgctttaaagaaaatctttccaacatgcagacaaaagctttgagtgcccctattacagcagtaccgaagatgttagttaatagatattttagtggataatctgtcatctgacatccagtataagttacagccttcgcattttgctcattttagatatcttggactgagcagtggggcctttactgtatttttcctgataaatacacatactggccactccttatctctttttcttgaaaagtgaactttttaaagcagccaagtcaacatcaggctactgaagttgaggctttagggtaactttcctatattgagcccatgggttacaaggatttgcaatatattgttccatttacagccaatacaggtttaatcgatgttcaatattggtttaggaaatttaaggccttctaaatcataatagctctttcatgtctaaaaccattttatgatattgccaaaatgtgataggaaacctactcattaaattgttaaactttttaatgactatgtgaagatatgaattgtttcctgaagataatactcttaattgagttgtattgtacttcttaggcaaagcagtgtaaaactgtatcaattaaggcttgtgagtagtgatttccactggggcatcagagtcttggctgggctgaatctgctgcttgttggttcagtgtttcttatgaacaagagccacagtacagagcttcaagttatttaaaatactaagtcatcttacgtttccattttattaacgggatgttgcaatcgtttgtaaactaataaacttataaagtgattggcacaaagactccttgagcaaaagctgtgcagttaagtacaaaaagatacttaatttggagactcttacagtaatttttgccatgtcaaaacaatggcttttacattgaaagattaatagaaactctacatatgttaatttttttatagaacctgactcaaatcaaggtactctccattttattgccttacctgaatcagtcctttttggttggtaatagatttttttatacacccacgtttgatttaaaagtaaattctagttcttaagcacttttaacaagaaatccagaagcacatttttctgcacaaacaagttacaaagttcaaaagtgtttcttgtgcattagctttgagattcagtttttaactttgtaaaccacatctgagagacttgtcatttctacattgtgtgtgtttaatttcttttgattccattttggttaagagagcagtaaatagattttctggtattcttgttcacttgattacatttgtataaagttctgattgccagttgctcagataacaagtgacaaggcagaattctttaaatcagtaaagttccttaagcctaaggctaaatcttgaatacattgttgaattctttaatatcctgatggcaagcagactgatagctgcacatttggcatgctttgtttaatggattttatttttaattgcagatttatttggcaatgtacagtaaattttgtaaacttgcatcaagtttatgaataaagaaccatttaaaaattttgtttgtgctgatcatggcaagca

SEQ ID NO: 34724 - DNA, 1085 bp, Homo sapiens
gtgcacgcgctgaaaccggagcgcgcagggcgcgccagggtgagggggacgggggcggggtgggggcagccctttcccaggcggtagcgggggcggcgtcgctgttgcccttttaagccgcggggccgccgcctcctgccgctggagtcggttacaaaggaagcgccacccaggccgccacacgccgaggcttccgcgcccctcgccattttccagcagcgctcgacgaggcggagccgcgagagcgcggcccaggccggccccgcggggcggtcgcggccgtgacggcggctccgggcccggctccccttccgcgcccggctccccttccgcgcccctcccgccggagatgaggggaagatgtccgtgtcagggctcaaggccgagctgaagttcctggcgtccatcttcgacaagaaccacgagcgattccgcatcgtcagttggaagctggacgagctgcactgccagttcctggtgccgcagcagggcagcccgcactcgctgccgccgccactcacgctccactgcaacatcacggaatcctatccatcttcttcaccgatatggtttgtggattctgaagacccaaatctgacatcagttctggaacgtctagaagatactaagaacaacaatttgcttcgtcagcaattgaagtggttgatatgtgaactctgcagtttatataaccttcctaagcacctggatgttgagatgctagatcaaccactacccacgggtcagaatgggacaacagaagaagtgacttcagaagaagaggaagaagaagaagagatggctgaagatatagaagacttagatcactatgagatgaaggaagaagagcctattagtgggaaaaagtcagaggatgaaggaattgaaaaagaaaatttggcaatattagagaaaattaggaagactcaaaggcaagaccatttaaatgtgcagtgtctggatcatgcaggcactgggctcctggaagatgtccttgaagaagtgacgtccctgagccccaaaccctcctcagggtggttgagttccagccatgctccctataaatgtcatgtggcttacctctc

SEQ ID NO: 34725 - DNA, 1019 bp, Homo sapiens
gtgcacgcgctgaaaccggagcgcgcagggcgcgccagggtgagggggacgggggcggggtgggggcagccctttcccaggcggtagcgggggcggcgtcgctgttgcccttttaagccgcggggccgccgcctcctgccgctggagtcggttacaaaggaagcgccacccaggccgccacacgccgaggcttccgcgcccctcgccattttccagcagcgctcgacgaggcggagccgcgagagcgcggcccaggccggccccgcggggcggtcgcggccgtgacggcggctccgggcccggctccccttccgcgcccggctccccttccgcgcccctcccgccggagatgaggggaagatgtccgtgtcagggctcaaggccgagctgaagttcctggcgtccatcttcgacaagaaccacgagcgattccgcatcgtcagttggaagctggacgagctgcactgccagttcctggtgccgcagcagggcagcccgcactcgctgccgccgccactcacgctccactgcaacatcacggaatcctatccatcttcttcaccgatatggtttgtggattctgaagacccaaatctgacatcagttctggaacgtctagaagatactaagaacaacaatttgcttcgtcagcaattgaagtggttgatatgtgaactctgcagtttatataaccttcctaagcacctggatgttgagatgctagatcaaccactacccacgggtcagaatgggacaacagaagaagtgacttcagaagaagaggaagaagaagaagagatggctgaagatatagaagacttagatcactatgagatgaaggaagaagagcctattagtgggaaaaagtcagaggatgaaggaattgaaaaagaaaatttggcaatattagagaaaattaggaagactcaaaggcaagaccatttaaataccagcctggccaacatggcaaaaccccgtctctactaaaaatacaaaaattagctgggcgtggtggtggg

SEQ ID NO: 34726 - DNA, 978 bp, Homo sapiens
gtgcacgcgctgaaaccggagcgcgcagggcgcgccagggtgagggggacgggggcggggtgggggcagccctttcccaggcggtagcgggggcggcgtcgctgttgcccttttaagccgcggggccgccgcctcctgccgctggagtcggttacaaaggaagcgccacccaggccgccacacgccgaggcttccgcgcccctcgccattttccagcagcgctcgacgaggcggagccgcgagagcgcggcccaggccggccccgcggggcggtcgcggccgtgacggcggctccgggcccggctccccttccgcgcccggctccccttccgcgcccctcccgccggagatgaggggaagatgtccgtgtcagggctcaaggccgagctgaagttcctggcgtccatcttcgacaagaaccacgagcgattccgcatcgtcagttggaagctggacgagctgcactgccagttcctggtgccgcagcagggcagcccgcactcgctgccgccgccactcacgctccactgcaacatcacggaatcctatccatcttcttcaccgatatggtttgtggattctgaagacccaaatctgacatcagttctggaacgtctagaagatactaagaacaacaatttgcttcgtcagcaattgaagtggttgatatgtgaactctgcagtttatataaccttcctaagcacctggatgttgagatgctagatcaaccactacccacgggtcagtatggtactacagtatgaagtgacttcagaagtagaggaagaagaagaagtagtatggctgtaggatatagaagtacttagatctactataagatgaagaatgagaacgcagacaagttactatagagcgaaaagcaaatgaagaagtctgagaaatagagcagcagagaagagaccgagcgagaagaactataggaggtaaaacagaacaggatggctatcagagacccc

SEQ ID NO: 34727 - DNA, 272 bp, Homo sapiens
catgcaaataaatgccaccttagtcaaaggcaaagccagagtgcagtttggagcaaataaggtacttctgttaagaattttacataaaccataagatacattttatattactttataagctttcttcctgtcttgacttaattcttttttgagatagtttcattttcatttggtttgttttcttcttgttacaaaagtgatctatagaaaatatggaattataagaaaattaaagatactaattgataatcacttaatgatttcgtatctgt

SEQ ID NO: 34728 - DNA, 1604 bp, Homo sapiens
ggcacgaggccgccacccgagccggagcgggctgggccgccaaggcaagatggtggactacagcgtgtgggaccacattgaggtgtctgatgatgaagacgagacgcaccccaacatcgacacggccagtctcttccgctggcggcatcaggcccgggtggaacgcatggagcagttccagaaggagaaggaggaactggacaggggctgccgcgagtgcaagcgcaaggtggccgagtgccagaggaaactgaaggagctggaggtggccgagggcggcaaggcagagctggagcgcctgcaggccgaggcacagcagctgcgcaaggaggagcggagctgggagcagaagctggaggagatgcgcaagaaggagaagagcatgccctggaacgtggacacgctcagcaaagacggcttcagcaagagcatggtaaataccaagcccgagaagacggaggaggactcagaggaggtgagggagcagaaacacaagaccttcgtggaaaaatacgagaaacagatcaagcactttggcatgcttcgccgctgggatgacagccaaaagtacctgtcagacaacgtccacctggtgtgcgaggagacagccaattacctggtcatttggtgcattgacctagaggtggaggagaaatgtgcactcatggagcaggtggcccaccagacaatcgtcatgcaatttatcctggagctggccaagagcctaaaggtggacccccgggcctgcttccggcagttcttcactaagattaagacagccgatcgccagtacatggagggcttcaacgacgagctggaagccttcaaggagcgtgtgcggggccgtgccaagctgcgcatcgagaaggccatgaaggagtacgaggaggaggagcgcaagaagcggctcggccccggcggcctggaccccgtcgaggtctacgagtccctccctgaggaactccagaagtgcttcgatgtgaaggacgtgcagatgctgcaggacgccatcagcaagatggaccccaccgacgcaaagtaccacatgcagcgctgcattgactctggcctctgggtccccaactctaaggccagcgaggccaaggagggagaggaggcaggtcctggggacccattactggaagctgttcccaagacgggcgatgagaaggatgtcagtgtgtgacctgccccagctaccaccgccacctgcttccaggcccctatgtgccccttttcagaaaacagatagatgccatctcgcccgctcctgacttcctctacttgcgctgctcggcccagcctggggggcccgcccagccctccctggcctctccactgtctccactctccagcgcccattcaagtctctgctttgagtcaaggggcttcactgcctgcagccccccatcagcattatgccaaaggcccgggggtccggggaagggcagaggtcaccaggctggtctaccaggtagttggggagggtccccagccaaggggccggctctcgtcactgggctctgttttcactgttcgtctgctgtctgtgtcttctatttggcaaacagcaatgatcttccaataaaagatttcagatgctc

SEQ ID NO: 34729 - DNA, 1652 bp, Homo sapiens
ggcacgaggccgccacccgagccggagcgggctgggccgccaaggcaagatggtggactacagcgtgtgggaccacattgaggtgtctgatgatgaagacgagacgcaccccaacatcgacacggccagtctcttccgctggcggcatcaggcccgggtggaacgcatggagcagttccagaaggagaaggaggaactggacaggggctgccgcgagtgcaagcgcaaggtggccgagtgccagaggaaactgaaggagctggaggtggccgagggcggcaaggcagagctggagcgcctgcaggccgaggcacagcagctgcgcaaggaggagcggagctgggagcagaagctggaggagatgcgcaagaaggagaagagcatgccctggaacgtggacacgctcagcaaagacggcttcagcaagagcatggtaaataccaagcccgagaagacggaggaggactcagaggaggtgagggagcagaaacacaagaccttcgtggaaaaatacgagaaacagatcaagcactttggcatgcttcgccgctgggatgacagccaaaagtacctgtcagacaacgtccacctggtgtgcgaggagacagccaattacctggtcatttggtgcattgacctagaggtggaggagaaatgtgcactcatggagcaggtggcccaccagacaatcgtcatgcaatttatcctggagctggccaagagcctaaaggtggacccccgggcctgcttccggcagttcttcactaagattaagacagccgatcgccagtacatggagggcttcaacgacgagctggaagccttcaaggagcgtgtgcggggccgtgccaagctgcgcatcgagaaggccatgaaggagtacgaggaggaggagcgcaagaagcggctcggccccggcggcctggaccccgtcgaggtctacgagtccctccctgaggaactccagaagtgcttcgatgtgaaggacgtgcagatgctgcaggacgccatcagcaagatggaccccaccgacgcaaagtaccacatgcagcgctgcattgactctggcctctgggtccccaactctaaggccagcgaggccaaggagggagaggaggcaggtcctggggacccattactggaagctgttcccaagacgggcgatgagaaggatgtcagtgtgtgacctgccccagctaccaccgccacctgcttccaggcccctatgtgccccttttcagaaaacagatagatgccatctcgcccgctcctgacttcctctacttgcgctgctcggcccagcctggggggcccgcccagccctccctggcctctccactgtctccactctccagcgcccattcaagtctctgctttgagtcaaggggcttcactgcctgcagccccccatcagcattatgccaaaggcccgggggtccggggaagggcagaggtcaccaggctggtctaccaggtagttggggagggtccccagccaaggggccggctctcgtcactgggctctgttttcactgttcgtctgctgtctgtgtcttctatttggcaaacagcaatgatcttccaataaaagatttcagatgctcaaaaaaaaaaacaaataaaaaaacaagcacacacaacaaaaacaaaaa

SEQ ID NO: 34730 - DNA, 1352 bp, Homo sapiens
  misc_feature (129)..(129): n is a, c, g, or t
aagcttggcacgagggcaaggcccatgcccacgctcccgccaccttgatgctcatggcttcgtcaccacctccgccgtggatgggatgggcgctgcgaccacggcccgcccggccgcgctcgaggcgcnttccgcagccttgccccagcccactccccctctcaccctaccacagagcatggtaaataccaagcccgagaagacggaggaggactcagaggaggtgagggagcagaaacacaagaccttcgtggaaaaatacgagaaacagatcaagcactttggcatgcttcgccgctgggatgacagccaaaagtacctgtcagacaacgtccacctggtgtgcgaggagacagccaattacctggtcatttggtgcattgacctagaggtggaggagaaatgtgcactcatggagcaggtggcccaccagacaatcgtcatgcaatttatcctggagctggccaagagcctaaaggtggacccccgggcctgcttccggcagttcttcactaagattaagacagccgatcgccagtacatggagggcttcaacgacgagctggaagccttcaaggagcgtgtgcggggccgtgccaagctgcgcatcgagaaggccatgaaggagtacgaggaggaggagcgcaagaagcggctcggccccggcggcctggaccccgtcgaggtctacgagtccctccctgaggaactccagaagtgcttcgatgtgaaggacgtgcagatgctgcaggacgccatcagcaagatggaccccaccgacgcaaagtaccacatgcagcgctgcattgactctggcctctgggtccccaactctaaggccagcgaggccaaggagggagaggaggcaggtcctggggacccattactggaagctgttcccaagacgggcgatgagaaggatgtcagtgtgtgacctgccccagctaccaccgccacctgcttccaggcccctatgtgccccttttcagaaaacagatagatgccatctcgcccgctcctgacttcctctacttgcgctgctcggcccagcctggggggcccgcccagccctccctggcctctccactgtctccactctccagcgcccattcaagtctctgctttgagtcaaggggcttcactgcctgcagccccccatcagcattatgccaaaggcccgggggtccggggaagggcagaggtcaccaggctggtctaccaggtagttggggagggtccccagccaaggggccggctctcgtcactgggctctgttttcactgttcgtctgctgtctgtgtcttctatttggcaaacagcaatgatcttccaataaaagatttcagatgctc

SEQ ID NO: 34731 - DNA, 560 bp, Homo sapiens
tgcaggaagccggggtgaatcggccgaggccaaggagggagaggaggcaggtcctggggacccattactggaagctgttcccaagacgggcgatgagaaggatgtcagtgtgtgacctgccccagctaccaccgccacctgcttccaggcccctatgtgccccttttcagaaaacagatagatgccatctcgcccgctcctgacttcctctacttgcgctgctcggcccagcctggggggcccgcccagccctccctggcctctccactgtctccactctccagcgcccattcaagtctctgctttgagtcaaggggcttcactgcctgcagccccccatcagcattatgccaaaggcccgggggtccggggaagggcagaggtcaccaggctggtctaccaggtagttggggagggtccccagccaaggggccggctctcgtcactgggctctgttttcactgttcgtctgctgtctgtgtcttctatttggcaaacagcaatgatcttccaataaaagatttcagatgctcctctgggctgctgggagggccgttcag

SEQ ID NO: 34732 - DNA, 1695 bp, Homo sapiens
ggcacgaggccgccacccgagccggagcgggctgggccgccaaggcaagatggtggactacagcgtgtgggaccacattgaggtgtctgatgatgaagacgagacgcaccccaacatcgacacggccagtctcttccgctggcggcatcaggcccgggtggaacgcatggagcagttccagaaggagaaggaggaactggacaggggctgccgcgagtgcaagcgcaaggtggccgagtgccagaggaaactgaaggagctggaggtggccgagggcggcaaggcagagctggagcgcctgcaggccgaggcacagcagctgcgcaaggaggagcggagctgggagcagaagctggaggagatgcgcaagaaggagaagagcatgccctggaacgtggacacgctcagcaaagacggcttcagcaagagcatggtaaataccaagcccgagaagacggaggaggactcagaggaggtgagggagcagaaacacaagaccttcgtggaaaaatacgagaaacagatcaagcactttggtgagtggggcttgtgggttatggggggcaaggtcgaggcaggccctttgcctccagggccctccagcaccttgccagcatcttcccacaggcatgcttcgccgctgggatgacagccaaaagtacctgtcagacaacgtccacctggtgtgcgaggagacagccaattacctggtcatttggtgcattgacctagaggtggaggagaaatgtgcactcatggagcaggtggcccaccagacaatcgtcatgcaatttatcctggagctggccaagagcctaaaggtggacccccgggcctgcttccggcagttcttcactaagattaagacagccgatcgccagtacatggagggcttcaacgacgagctggaagccttcaaggagcgtgtgcggggccgtgccaagctgcgcatcgagaaggccatgaaggagtacgaggaggaggagcgcaagaagcggctcggccccggcggcctggaccccgtcgaggtctacgagtccctccctgaggaactccagaagtgcttcgatgtgaaggacgtgcagatgctgcaggacgccatcagcaagatggaccccaccgacgcaaagtaccacatgcagcgctgcattgactctggcctctgggtccccaactctaaggccagcgaggccaaggagggagaggaggcaggtcctggggacccattactggaagctgttcccaagacgggcgatgagaaggatgtcagtgtgtgacctgccccagctaccaccgccacctgcttccaggcccctatgtgccccttttcagaaaacagatagatgccatctcgcccgctcctgacttcctctacttgcgctgctcggcccagcctggggggcccgcccagccctccctggcctctccactgtctccactctccagcgcccattcaagtctctgctttgagtcaaggggcttcactgcctgcagccccccatcagcattatgccaaaggcccgggggtccggggaagggcagaggtcaccaggctggtctaccaggtagttggggagggtccccagccaaggggccggctctcgtcactgggctctgttttcactgttcgtctgctgtctgtgtcttctatttggcaaacagcaatgatcttccaataaaagatttcagatgctc

SEQ ID NO: 34733 - DNA, 1631 bp, Homo sapiens
ggcacgaggccgccacccgagccggagcgggctgggccgccaaggcaagatggtggactacagcgtgtgggaccacattgaggtgtctgatgatgaagacgagacgcaccccaacatcgacacggccagtctcttccgctggcggcatcaggcccgggtggaacgcatggagcagttccagaaggagaaggaggaactggacaggggctgccgcgagtgcaagcgcaaggtggccgagtgccagaggaaactgaaggagctggaggtggccgagggcggcaaggcagagctggagcgcctgcaggccgaggcacagcagctgcgcaaggaggagcggagctgggagcagaagctggaggagatgcgcaagaaggagaagagcatgccctggaacgtggacacgctcagcaaagacggcttcagcaagagcatggtaaataccaagcccgagaagacggaggaggactcagaggaggtgagggagcagaaacacaagaccttcgtggaaaaatacgagaaacagatcaagcactttggcatgcttcgccgctgggatgacagccaaaagtacctgtcagacaacgtccacctggtgtgcgaggagacagccaattacctggtcatttggtgcattgacctagaggtggaggagaaatgtgcactcatggagcaggtggcccaccagacaatcgtcatgcaatttatcctggagctggccaagagcctaaaggtggacccccgggcctgcttccggcagttcttcactaagattaagacagccgatcgccagtacatggagggcttcaacgacgagctggaagccttcaaggagcgtgtgcggggccgtgccaagctgcgcatcgagaaggccatgaaggagtacgaggaggaggagcgcaagaagcggctcggccccggcggcctggaccccgtcgaggtctacgagtccctccctgaggaactccagaagtgcttcgatgtgaaggacgtgcagatgctgcaggacgccatcagcaagatggaccccaccgacgcaaagtaccacatgcagcgctgcattgactctggcctctgggtccccaactctaaggccagcgaggccaaggagggagaggaggcaggtcctggggacccattactggaagctgttcccaagacgggcgatgagaaggatgtcagtgtgtgacctgccccagctaccaccgccacctgcttccaggcccctatgtgccccttttcagaaaacagatagatgccatctcgcccgctcctgacttcctctacttgcgctgctcggcccagcctggggggcccgcccagccctccctggcctctccactgtctccactctccagcgcccattcaagtctctgctttgagtcaaggggcttcactgcctgcagccccccatcagcattatgccaaaggcccgggggtccggggaagggcagaggtcaccaggctggtctaccaggtagttggggagggtccccagccaaggggccggctctcgtcactgggctctgttttcactgttcgtctgctgtctgtgtcttctatttggcaaacagcaatgatcttccaataaaagatttcagatgctcctctgggctgctgggagggccgttcag

SEQ ID NO: 34734 - DNA, 3012 bp, Homo sapiens
  misc_feature (1613)..(1613): n is a, c, g, or t
  misc_feature (1618)..(1618): n is a, c, g, or t
ggcacgaggccgccacccgagccggagcgggctgggccgccaaggcaagatggtggactacagcgtgtgggaccacattgaggtgtctgatgatgaagacgagacgcaccccaacatcgacacggccagtctcttccgctggcggcatcaggcccgggtggaacgcatggagcagttccagaaggagaaggaggaactggacaggggctgccgcgagtgcaagcgcaaggtggccgagtgccagaggaaactgaaggagctggaggtggccgagggcggcaaggcagagctggagcgcctgcaggccgaggcacagcagctgcgcaaggaggagcggagctgggagcagaagctggaggagatgcgcaagaaggagaagagcatgccctggaacgtggacacgctcagcaaagacggcttcagcaagagcatggtaaataccaagcccgagaagacggaggaggactcagaggaggtgagggagcagaaacacaagaccttcgtggaaaaatacgagaaacagatcaagcactttggcatgcttcgccgctgggatgacagccaaaagtacctgtcagacaacgtccacctggtgtgcgaggagacagccaattacctggtcatttggtgcattgacctagaggtggaggagaaatgtgcactcatggagcaggtggcccaccagacaatcgtcatgcaatttatcctggagctggccaagagcctaaaggtggacccccgggcctgcttccggcagttcttcactaagattaagacagccgatcgccagtacatggagggcttcaacgacgagctggaagccttcaaggagcgtgtgcggggccgtgccaagctgcgcatcgagaaggccatgaaggagtacgaggaggaggagcgcaagaagcggctcggccccggcggcctggaccccgtcgaggtctacgagtccctccctgaggaactccagaagtgcttcgatgtgaaggacgtgcagatgctgcaggacgccatcagcaagatggaccccaccgacgcaaagtaccacatgcagcgctgcattgactctggcctctgggtccccaactctaaggccagcgaggccaaggagggagaggaggcaggtcctggggacccattactggaagctgttcccaagacgggcgatgagaaggatgtcagtgtgtgacctgccccagctaccaccgccacctgcttccaggcccctatgtgccccttttcagaaaacagatagatgccatctcgcccgctcctgacttcctctacttgcgctgctcggcccagcctggggggcccgcccagccctccctggcctctccactgtctccactctccagcgcccattcaagtctctgctttgagtcaaggggcttcactgcctgcagccccccatcagcattatgccaaaggcccgggggtccggggaagggcagaggtcaccaggctggtctaccaggtagttggggagggtccccagccaaggggccggctctcgtcactgggctctgttttcactgttcgtctgctgtctgtgtcttctatttggcaaacagcaatgatcttccaataaaagatttcagatgctcaaaaaaaanaaaanaaaaaaaaaacactgcggagagatataagatctctctcttcttgtctctctcttctgggggcctctccgcgcgcagccgcgggaaatgcgtggcgcccaatatcccggggccctcacgccgcgcgcccaattccgccctgtgacgcgggttaagcccccagagaattttcttttaaactgcacaactctctgtgggaatataatactccacgtgtgaagagaaagaggctttctgaaggcactctcaagtgggccaccactgtgtgtgtgtggcccaatttggggggcggcggggatagtggggacgacagcgtgatagagatatggatggcgcacctgattctcgtgggccacagggagcgtcgcgagagcgtgagcgaagtgaaaaacagactgtgggcgaccaacaagaggagtggcgccccaaacaagcgctgcacatataccccgagttattgcgggacaaacatgtggtgtccagaggggggatattcacaccccaaacccgtgggcgacgcgccacatcgtggggacacatctacaaccgccggcgtgtcgttgcgcgcgagaagaagatgtgtgtaaccccacccgcggtgttagtatatggaggcagaattgggtgacggccaaataattctgcgaagtgtgtgaacacacaacaaattctccggcgggaccacgtgggggtgcgcacacgaaggaggtaaaccaaatggggggcggtgacaatcatcatcaaaggcaaagcccgataaaaacacagatgatatgcgcacacgacgacggcgcaaatcgtctggccgaacaagttagagtgaagactcaccgccgagaaaacccccaacgaggtggggaccatgccggggacgagagaaacaagcccccgagcaacacagtcgatggttgatggacacaccacaaggcgacggcaccacgatgggagcgaccacaaaccgaacacgggtgggtcatcgtgtgacgaaacaagcgcgtggttgtagcaccactacctagggggcgccaaaggggggcgggacagacggcgccaacacaataaagaaagggtgtgtcccctcggggggaaaacgacaatacaacattcgagggaggagtacaaaacacacttgtggcgggtagaacgcagcgagaggagacgcacagaaagagggggactgatcgggcgcgagggagagctggtccgacgacaggagagacggggtggcggtggcaagagtggaagaggctgcccgccggagcagacgccccatttagaaaacatgggggcaccatgtacgtccgggggcgccactgcaagtagtgtggagaaaaccaaccaggagagaaagacgatcccctcggagacagtcggaactacacaccacaggccgcgg

SEQ ID NO: 34735 - DNA, 999 bp, Homo sapiens
ctcgtcatctagaggatcccggcacatctgacctagaggtggaggagaaatgtgcactcatggagcaggtggcccaccagacaatcgtcatgcaatttatcctggagctggccaagagcctaaaggtggacccccgggcctgcttccggcagttcttcactaagattaagacagccgatcgccagtacatggagggcttcaacgacgagctggaagccttcaaggagcgtgtgcggggccgtgccaagctgcgcatcgagaaggccatgaaggagtacgaggaggaggagcgcaagaagcggctcggccccggcggcctggaccccgtcgaggtctacgagtccctccctgaggaactccagaagtgcttcgatgtgaaggacgtgcagatgctgcaggacgccatcagcaagatggaccccaccgacgcaaagtaccacatgcagcgctgcattgactctggcctctgggtccccaactctaaggccagcgaggccaaggagggagaggaggcaggtcctggggacccattactggaagctgttcccaagacgggcgatgagaaggatgtcagtgtgtgacctgccccagctaccaccgccacctgcttccaggcccctatgtgccccttttcagaaaacagatagatgccatctcgcccgctcctgacttcctctacttgcgctgctcggcccagcctggggggcccgcccagccctccctggcctctccactgtctccactctccagcgcccattcaagtctctgctttgagtcaaggggcttcactgcctgcagccccccatcagcattatgccaaaggcccgggggtccggggaagggcagaggtcaccaggctggtctaccaggtagttggggagggtccccagccaaggggccggctctcgtcactgggctctgttttcactgttcgtctgctgtctgtgtcttctatttggcaaacagcaatgatcttccaataaaagatttcagatgctc

SEQ ID NO: 34736 - DNA, 1304 bp, Homo sapiens
ggcacgaggccgccacccgagccggagcgggctgggccgccaaggcaagatggtggactacagcgtgtgggaccacattgaggtgtctgatgatgaagacgagacgcaccccaacatcgacacggccagtctcttccgctggcggcatcaggcccgggtggaacgcatggagcagttccagaaggagaaggaggaactggacaggggctgccgcgagtgcaagcgcaaggtggccgagtgccagaggaaactgaaggagctggaggtggccgagggcggcaaggcagagctggagcgcctgcaggccgaggcacagcagctgcgcaaggaggagcggagctgggagcagaagctggaggagatgcgcaagaaggagaagagcatgccctggaacgtggacacgctcagcaaagacggcttcagcaagagcatggtaaataccaagcccgagaagacggaggaggactcagaggagacagccgatcgccagtacatggagggcttcaacgacgagctggaagccttcaaggagcgtgtgcggggccgtgccaagctgcgcatcgagaaggccatgaaggagtacgaggaggaggagcgcaagaagcggctcggccccggcggcctggaccccgtcgaggtctacgagtccctccctgaggaactccagaagtgcttcgatgtgaaggacgtgcagatgctgcaggacgccatcagcaagatggaccccaccgacgcaaagtaccacatgcagcgctgcattgactctggcctctgggtccccaactctaaggccagcgaggccaaggagggagaggaggcaggtcctggggacccattactggaagctgttcccaagacgggcgatgagaaggatgtcagtgtgtgacctgccccagctaccaccgccacctgcttccaggcccctatgtgccccttttcagaaaacagatagatgccatctcgcccgctcctgacttcctctacttgcgctgctcggcccagcctggggggcccgcccagccctccctggcctctccactgtctccactctccagcgcccattcaagtctctgctttgagtcaaggggcttcactgcctgcagccccccatcagcattatgccaaaggcccgggggtccggggaagggcagaggtcaccaggctggtctaccaggtagttggggagggtccccagccaaggggccggctctcgtcactgggctctgttttcactgttcgtctgctgtctgtgtcttctatttggcaaacagcaatgatcttccaataaaagatttcagatgctc

SEQ ID NO: 34737 - DNA, 1644 bp, Homo sapiens
ggcacgaggccgccacccgagccggagcgggctgggccgccaaggcaagatggtggactacagcgtgtgggaccacattgaggtgtctgatgatgaagacgagacgcaccccaacatcgacacggccagtctcttccgctggcggcatcaggcccgggtggaacgcatggagcagttccagaaggagaaggaggaactggacaggggctgccgcgagtgcaagcgcaaggtggccgagtgccagaggaaactgaaggagctggaggtggccgagggcggcaaggcagagctggagcgcctgcaggccgaggcacagcagctgcgcaaggaggagcggagctgggagcagaagctggaggagatgcgcaagaaggagaagagcatgccctggaacgtggacacgctcagcaaagacggcttcagcaagagcatggtaaataccaagcccgagaagacggaggaggactcagaggaggtgagggagcagaaacacaagaccttcgtggaaaaatacgagaaacagatcaagcactttggcatgcttcgccgctgggatgacagccaaaagtacctgtcagacaacgtccacctggtgtgcgaggagacagccaattacctggtcatttggtgcattgacctagaggtggaggagaaatgtgcactcatggagcaggtggcccaccagacaatcgtcatgcaatttatcctggagctggccaagagcctaaaggtggacccccgggcctgcttccggcagttcttcactaagattaagacagccgatcgccagtacatggagggcttcaacgacgagctggaagccttcaaggagcgtgtgcggggccgtgccaagctgcgcatcgagaaggccatgaaggagtacgaggaggaggagcgcaagaagcggctcggccccggcggcctggaccccgtcgaggtctacgagtccctccctgaggaactccagaagtgcttcgatgtgaaggacgtgcagatgctgcaggacgccatcagcaagatggaccccaccgacgcaaagtaccacatgcagcgctgcattgactctggcctctgggtccccaactctaaggccagcgaggccaaggagggagaggaggcaggtcctggggacccattactggaagctgttcccaagacgggcgatgagaaggatgtcagtgtgtgacctgccccagctaccaccgccacctgcttccaggcccctatgtgccccttttcagaaaacagatagatgccatctcgcccgctcctgacttcctctacttgcgctgctcggcccagcctggggggcccgcccagccctccctggcctctccactgtctccactctccagcgcccattcaagtctctgctttgagtcaaggggcttcactgcctgcgagtgcaagcgcaaggtggccgagtgccagaggaaactgaaggagctggaggtggccgagggcggcaaggcagagctggagcgcctgcaggccgaggcacagcagctgcgcaaggaggaagcggagcctgggagcagaaagctggaggagatgcgcaagaaggagaagagcatgccctggaacgtggacacggctcagcaaagacggcttcagcaagagcatggtaaataccaagcccgagaa

SEQ ID NO: 34738 - DNA, 1550 bp, Homo sapiens
ggcacgaggccgccacccgagccggagcgggctgggccgccaaggcaagatggtggactacagcgtgtgggaccacattgaggtgtctgatgatgaagacgagacgcaccccaacatcgacacggccagtctcttccgctggcggcatcaggcccgggtggaacgcatggagcagttccagaaggagaaggaggaactggacaggggctgccgcgagtgcaagcgcaaggtggccgagtgccagaggaaactgaaggagctggaggtggccgagggcggcaaggcagagctggagcgcctgcaggccgaggcacagcagctgcgcaaggaggagcggagctgggagcagaagctggaggagatgcgcaagaaggagaagagcatgccctggaacgtggacacgctcagcaaagacggcttcagcaagagcatggtaaataccaagcccgagaagacggaggaggactcagaggaggtgagggagcagaaacacaagaccttcgtggaaaaatacgagaaacagatcaagcactttggcatgcttcgccgctgggatgacagccaaaagtacctgtcagacaacgtccacctggtgtgcgaggagacagccaattacctggtcatttggtgcattgacctagaggtggaggagaaatgtgcactcatggagcaggtggcccaccagacaatcgtcatgcaatttatcctggagctggccaagagcctaaaggtggacccccgggcctgcttccggcagttcttcactaagattaagacagccgatcgccagtacatggagggcttcaacgacgagctggaagccttcaaggagcgtgtgcggggccgtgccaagctgcgcatcgagaaggccatgaaggagtacgaggaggaggagcgcaagaagcggctcggccccggcggcctggaccccgtcgaggtctacgagtccctccctgaggaactccagaagtgcttcgatgtgaaggacgtgcagatgctgcaggacgccatcagcaagatggaccccaccgacgcaaagtaccacatgcagcgctgcattgactctggcctctgggtccccaactctaaggccagcgaggccaaggagggagaggaggcaggtcctggggacccattactggaagctgttcccaagacgggcgatgagaaggatgtcagtgtgtgacctgccccagctaccaccgccacctgcttccaggcccctatgtgccccttttcagaaaacagatagatgccatctcgcccgctcctgacttcctctacttgcgctgctcggcccagcctggggggcccgcccagccctccctggcctctccactgtctccaagccccccatcagcattatgccaaaggcccgggggtccggggaagggcagaggtcaccaggctggtctaccaggtagttggggagggtccccagccaaggggccggctctcgtcactgggctctgttttcactgttcgtctgctgtctgtgtcttctatttggcaaacagcaatgatcttccaataaaagatttcagatgctc

SEQ ID NO: 34739 - DNA, 1583 bp, Homo sapiens
ggcacgaggccgccacccgagccggagcgggctgggccgccaaggcaagatggtggactacagcgtgtgggaccacattgaggtgtctgatgatgaagacgagacgcaccccaacatcgacacggccagtctcttccgctggcggcatcaggcccgggtggaacgcatggagcagttccagaaggagaaggaggaactggacaggggctgccgcgagtgcaagcgcaaggtggccgagtgccagaggaaactgaaggagctggaggtggccgagggcggcaaggcagagctggagcgcctgcaggccgaggcacagcagctgcgcaaggaggagcggagctgggagcagaagctggaggagatgcgcaagaaggagaagagcatgccctggaacgtggacacgctcagcaaagacggcttcagcaagagcatggtaaataccaagcccgagaagacggaggaggactcagaggaggtgagggagcagaaacacaagaccttcgtggaaaaatacgagaaacagatcaagcactttggcatgcttcgccgctgggatgacagccaaaagtacctgtcagacaacgtccacctggtgtgcgaggagacagccaattacctggtcatttggtgcattgacctagaggtggaggagaaatgtgcactcatggagcaggtggcccaccagacaatcgtcatgcaatttatcctggagctggccaagagcctaaaggtggacccccgggcctgcttccggcagttcttcactaagattaagacagccgatcgccagtacatggagggcttcaacgacgagctggaagccttcaaggagcgtgtgcggggccgtgccaagctgcgcatcgagaaggccatgaaggagtacgaggaggaggagcgcaagaagcggctcggccccggcggcctggaccccgtcgaggaactccagaagtgcttcgatgtgaaggacgtgcagatgctgcaggacgccatcagcaagatggaccccaccgacgcaaagtaccacatgcagcgctgcattgactctggcctctgggtccccaactctaaggccagcgaggccaaggagggagaggaggcaggtcctggggacccattactggaagctgttcccaagacgggcgatgagaaggatgtcagtgtgtgacctgccccagctaccaccgccacctgcttccaggcccctatgtgccccttttcagaaaacagatagatgccatctcgcccgctcctgacttcctctacttgcgctgctcggcccagcctggggggcccgcccagccctccctggcctctccactgtctccactctccagcgcccattcaagtctctgctttgagtcaaggggcttcactgcctgcagccccccatcagcattatgccaaaggcccgggggtccggggaagggcagaggtcaccaggctggtctaccaggtagttggggagggtccccagccaaggggccggctctcgtcactgggctctgttttcactgttcgtctgctgtctgtgtcttctatttggcaaacagcaatgatcttccaataaaagatttcagatgctc

SEQ ID NO: 34740 - DNA, 1466 bp, Homo sapiens
ggcacgaggccgccacccgagccggagcgggctgggccgccaaggcaagatggtggactacagcgtgtgggaccacattgaggtgtctgatgatgaagacgagacgcaccccaacatcgacacggccagtctcttccgctggcggcatcaggcccgggtggaacgcatggagcagttccagaaggagaaggaggaactggacaggggctgccgcgagtgcaagcgcaaggtggccgagtgccagaggaaactgaaggagctggaggtggccgagggcggcaaggcagagctggagcgcctgcaggccgaggcacagcagctgcgcaaggaggagcggagctgggagcagaagctggaggagatgcgcaagaaggagaagagcatgccctggaacgtggacacgctcagcaaagacggcttcagcaagagcatggtaaataccaagcccgagaagacggaggaggactcagaggaggtgagggagcagaaacacaagaccttcgtggaaaaatacgagaaacagatcaagcactttggcatgcttcgccgctgggatgacagccaaaagtacctgtcagacaacgtccacctggtgtgcgaggagacagccaattacctggtcatttggtgcattgacctagaggtggaggagaaatgtgcactcatggagcaggtggcccaccagacaatcgtcatgcaatttatcctggagctggccaagagcctaaaggtggacccccgggcctgcttccggcagttcttcactaagattaagacagccgatcgccagtacatggagggcttcaacgacgagctggaagccttcaaggagcgtgtgcggggccgtgccaagctgcgcatcgagaaggccatgaaggagtacgaggaggaggagcgcaagaagcggctcggccccggcggcctggaccccgtcgaggtctacgagtccctccctgaggaactccagaagtgcttcgatgtgaaggacgtgcagatgctgcaggacgccatcagcaagatggaccccaccgacgcaaagtaccacatgcagcgctgcattgactctggcctctgggtccccaactctaaggccagcgaggccaaggagggagaggaggcaggtcctggggacccattactggaagctgttcccaagacgggcgatgagaaggatgtcagtgtgtgacctgccccagctaccaccgccacctgcttccaggcccctatgtgccccttttcagaaaacagatagatgccatctcgcccgctcctgacttcctctacttgcgctgctcggcccagccgaagggcagaggtcaccaggctggtctaccaggtagttggggagggtccccagccaaggggccggctctcgtcactgggctctgttttcactgttcgtctgctgtctgtgtcttctatttggcaaacagcaatgatcttccaataaaagatttcagatgctc

SEQ ID NO: 34741 - DNA, 1282 bp, Homo sapiens
ggcacgaggccgccacccgagccggagcgggctgggccgccaaggcaagatggtggactacagcgtgtgggaccacattgaggtgtctgatgatgaagacgagacgcaccccaacatcgacacggccagtctcttccgctggcggcatcaggcccgggtggaacgcatggagcagttccagaaggagaaggaggaactggacaggggctgccgcgagtgcaagcgcaaggtggccgagtgccagaggaaactgaaggagctggaggtggccgagggcggcaaggcagagctggagcgcctgcaggccgaggcacagcagctgcgcaaggaggagcggagctgggagcagaagctggaggagatgcgcaagaaggagaagagcatgccctggaacgtggacacgctcagcaaagacggcttcagcaagagcatggtaaataccaagcccgagaagacggaggaggactcagaggaggtgagggagcagaaacacaagaccttcgtggaaaaatacgagaaacagatcaagcactttggcatgcttcgccgctgggatgacagccaaaagtacctgtcagacaacgtccacctggtgtgcgaggagacagccaattacctggtcatttggtgcattgacctagaggtggaggagaaatgtgcactcatggagcaggtggcccaccagacaatcgtcatgcaatttatcctggagctggccaagagcctaaaggtggacccccgggcctgcttccggcagttcttcactaagattaagacagccgatcgccagtacatggagggcttcaacgacgagctggaagccttcaaggagcgtgtgcggggccgtgccaagctgcgcatcgagaaggccatgaaggagtacgaggaggaggagcgcaagaagcggctcggccccggcggcctggaccccgtcgaggtctacgagtccctccctgaggaactccagaagtgcttcgatgtgaaggacgtgcagatgctgcaggacgccatcagcaagatggaccccaccgacgcaaagtaccacatgcagcgctgcattgactctggcctctgggtccccaactctaaggccagcgaggccaaggagggagaggaggcaggtcctggggacccattactggaagctgttcccaagacgggcgatgagaaggatgtcagtgtgtgacctgccccagctaccaccgccacctgcttccaggcccctatgtgctgtccagctgtccacctcctttgtgctgtcacctcctctgtgctgtcacct

SEQ ID NO: 34742 - DNA, 1451 bp, Homo sapiens
ggcacgaggccgccacccgagccggagcgggctgggccgccaaggcaagatggtggactacagcgtgtgggaccacattgaggtgtctgatgatgaagacgagacgcaccccaacatcgacacggccagtctcttccgctggcggcatcaggcccgggtggaacgcatggagcagttccagaaggagaaggaggaactggacaggggctgccgcgagtgcaagcgcaaggtggccgagtgccagaggaaactgaaggagctggaggtggccgagggcggcaaggcagagctggagcgcctgcaggccgaggcacagcagctgcgcaaggaggagcggagctgggagcagaagctggaggagatgcgcaagaaggagaagagcatgccctggaacgtggacacgctcagcaaagacggcttcagcaagagcatggtaaataccaagcccgagaagacggaggaggactcagaggaggtgagggagcagaaacacaagaccttcgtggaaaaatacgagaaacagatcaagcactttggcatgcttcgccgctgggatgacagccaaaagtacctgtcagacaacgtccacctggtgtgcgaggagacagccaattacctggtcatttggtgcattgacctagaggtggaggagaaatgtgcactcatggagcaggtggcccaccagacaatcgtcatgcaatttatcctggagctggccaagagcctaaaggtggacccccgggcctgcttccggcagttcttcactaagattaagacagccgatcgccagtacatggagggcttcaacgacgagctggaagccttcaaggagcgtgtgcggggccgtgccaagctgcgcatcgagaaggccatgaaggagtacgaggaggaggagcgcaagaagcggctcggccccggcggcctggaccccgtcgaggtctacgagtccctccctgaggaactccagaagtgcttcgatgtgaaggacgtgcagatgctgcaggacgccatcagcaagatggaccccaccgacgcaaagtaccacatgcagcgctgcattgactctggcctctgggtccccaactctaaggccagcgaggccaaggagggagaggaggcaggtcctggggacccattactggaagctgttctggggggcccgcccagccctccctggcctctccactgtctccactctccagcgcccattcaagtctctgctttgagtcaaggggcttcactgcctgcagccccccatcagcattatgccaaaggcccgggggtccggggaagggcagaggtcaccaggctggtctaccaggtagttggggagggtccccagccaaggggccggctctcgtcactgggctctgttttcactgttcgtctgctgtctgtgtcttctatttggcaaacagcaatgatcttccaataaaagatttcagatgctc

SEQ ID NO: 34743 - DNA, 1553 bp, Homo sapiens
ggcacgaggccgccacccgagccggagcgggctgggccgccaaggcaagatggtggactacagcgtgtgggaccacattgaggtgtctgatgatgaagacgagacgcaccccaacatcgacacggccagtctcttccgctggcggcatcaggcccgggtggaacgcatggagcagttccagaaggagaaggaggaactggacaggggctgccgcgagtgcaagcgcaaggtggccgagtgccagaggaaactgaaggagctggaggtggccgagggcggcaaggcagagctggagcgcctgcaggccgaggcacagcagctgcgcaaggaggagcggagctgggagcagaagctggaggagatgcgcaagaaggagaagagcatgccctggaacgtggacacgctcagcaaagacggcttcagcaagagcatggtaaataccaagcccgagaagacggaggaggactcagaggaggtgagggagcagaaacacaagaccttcgtggaaaaatacgagaaacagatcaagcactttggcatgcttcgccgctgggatgacagccaaaagtacctgtcagacaacgtccacctggtgtgcgaggagacagccaattacctggtcatttggtgcattgacctagaggtggaggagaaatgtgcactcatggagcaggtggcccaccagacaatcgtcatgcaatttatcctgaagctgttcccaagacgggcgatgagaaggatgtcagtgtgtgacctgccccagctaccaccgccacctgcttccaggcccctatgtgccccttttcagaaaacagatagatgccatctcgcccgctcctgacttcctctacttgcgctgctcggcccagcctggggggcccgcccagccctccctggcctctccactgtctccactctccagcgcccattcaagtctctgctttgagtcaaggggcttcactgcctgcttccggcagttcttcactaagattaagacagccgatcgccagtacatggagggcttcaacgacgagctggaagccttcaaggagcgtgtgcggggccgtgccaagctgcgcatcgagaaggccatgaaggagtacgaggaggaggagcgcaagaagcggctcggccccggcggcctggaccccgtcgaggtctacgagtccctccctgaggaactccagaagtgcttcgatgtgaaggacgtgcagatgctgcaggacgccatcagcaagatggaccccaccgacgcaaagtaccacatgcagcgctgcattgactctggcctctgggtccccaactctaaggccagcgaggccaaggagggagaggaggcaggtcctggggacccattactggaagctgttcccaagacgggcgatgagaaggaagggcagaggtcaccaggctggtctaccaggtagttggggagggtccccagccaaggggccggctctcgtcactgggctctgttttcactgttcgtctgctgtctgtgtcttctatttggcaaacagcaatgatcttccaataaaagatttcagatgctc

SEQ ID NO: 34744 - DNA, 1268 bp, Homo sapiens
ggcacgaggccgccacccgagccggagcgggctgggccgccaaggcaagatggtggactacagcgtgtgggaccacattgaggtgtctgatgatgaagacgagacgcaccccaacatcgacacggccagtctcttccgctggcggcatcaggcccgggtggaacgcatggagcagttccagaaggagaaggaggaactggacaggggctgccgcgagtgcaagcgcaaggtggccgagtgccagaggaaactgaaggagctggaggtggccgagggcggcaaggcagagctggagcgcctgcaggccgaggcacagcagctgcgcaaggaggagcggagctgggagcagaagctggaggagatgcgcaagaaggagaagagcatgccctggaacgtggacacgctcagcaaagacggcttcagcaagagcatggtaaataccaagcccgagaagacggaggaggactcagaggaggtgagggagcagaaacacaagaccttcgtggaaaaatacgagaaacagatcaagcactttggcatgcttcgccgctgggatgacagccaaaagtacctgtcagacaacgtccacctggtgtgcgaggagacagccaattacctggtcatttggtgcattgacctagaggtggaggagaaatgtgcactcatggagcaggtggcccaccagacaatcgtcatgcaatttatcctggagctggccaagagcctaaaggtggacccccgggcctgcttccggcagttcttcactaagattaagacagccgatcgccagtacatggagggcttcaacgacgagctggaagccttcaaggagcgtgtgcggggccgtgccaagctgcgcatcgagaaggccatgaaggagtacgaggaggaggagcgcaagaagcggctcggccccggcggcctggaccccgtcgaggaactccagaagtgcttcgatgtgaaggacgtgcagatgctgcaggacgccatcagcaagatggaccccaccgacgcaaagtaccacatgcagcgctgcattgactctggcctctgggtccccaactctaaggccagcgaggccaaggagggagaggaggcaggtcctggggacccattactggaagctgttcccaagacgggcgatgagaagggtccccagccaaggggccggctctcgtcactgggctctgttttcactgttcgtctgctgtctgtgtcttctatttggcaaacagcaatgatcttccaataaaagatttcagatgctc

SEQ ID NO: 34745 - DNA, 1578 bp, Homo sapiens
ggcacgaggccgccacccgagccggagcgggctgggccgccaaggcaagatggtggactacagcgtgtgggaccacattgaggtgtctgatgatgaagacgagacgcaccccaacatcgacacggccagtctcttccgctggcggcatcaggcccgggtggaacgcatggagcagttccagaaggagaaggaggaactggacaggggctgccgcgagtgcaagcgcaaggtggccgagtgccagaggaaactgaaggagctggaggtggccgagggcggcaaggcagagctggagcgcctgcaggccgaggcacagcagctgcgcaaggaggagcggagctgggagcagaagctggaggagatgcgcaagaaggagaagagcatgccctggaacgtggacacgctcagcaaagacggcttcagcaagagcatggtaaataccaagcccgagaagacggaggaggactcagaggaggtgagggagcagaaacacaagaccttcgtggaaaaatacgagaaacagatcaagcactttggcatgcttcgccgctgggatgacagccaaaagtacctgtcagacaacgtccacctggtgtgcgaggagacagccaattacctggtcatttggtgcattgacctagaggtggaggagaaatgtgcactcatggagcaggtggcccaccagacaatcgtcatgcaatttatcctgaagctgttcccaagacgggcgatgagaaggatgtcagtgtgtgacctgccccagctaccaccgccacctgcttccaggcccctatgtgccccttttcagaaaacagatagatgccatctcgcccgctcctgacttcctctacttgcgctgctcggcccagcctggggggcccgcccagccctccctggcctctccactgtctccactctccagcgcccattcaagtctctgctttgagtcaaggggcttcactgcctgcagccccccctcagcattatgcctgcttccggcagttcttcactaagattaagacagccgatcgccagtacatggagggcttcaacgacgagctggaagccttcaaggagcgtgtgcggggccgtgccaagctgcgcatcgagaaggccatgaaggagtacgaggaggaggagcgcaagaagcggctcggccccggcggcctggaccccgtcgaggtctacgagtccctccctgaggaactccagaagtgcttcgatgtgaaggacgtgcagatgctgcaggacgccatcagcaagatggaccccaccgacgcaaagtaccacatgcagcgctgcattgactctggcctctgggtccccaactctaaggccagcgaggccaaggagggagaggaggcaggtcctggggacccattactggaagctgttcccaagacgggcgatgagaaggaagggcagaggtcaccaggctggtctaccaggtagttggggagggtccccagccaaggggccggctctcgtcactgggctctgttttcactgttcgtctgctgtctgtgtcttctatttggcaaacagcaatgatcttccaataaaagatttcagatgctc

SEQ ID NO: 34746 - DNA, 1340 bp, Homo sapiens
ggcacgaggccgccacccgagccggagcgggctgggccgccaaggcaagatggtggactacagcgtgtgggaccacattgaggtgtctgatgatgaagacgagacgcaccccaacatcgacacggccagtctcttccgctggcggcatcaggcccgggtggaacgcatggagcagttccagaaggagaaggaggaactggacaggggctgccgcgagtgcaagcgcaaggtggccgagtgccagaggaaactgaaggagctggaggtggccgagggcggcaaggcagagctggagcgcctgcaggccgaggcacagcagctgcgcaaggaggagcggagctgggagcagaagctggaggagatgcgcaagaaggagaagagcatgccctggaacgtggacacgctcagcaaagacggcttcagcaagagcatggtaaataccaagcccgagaagacggaggaggactcagaggaggtgagggagcagaaacacaagaccttcgtggaaaaatacgagaaacagatcaagcactttggcatgcttcgccgctgggatgacagccaaaagtacctgtcagacaacgtccacctggtgtgcgaggagacagccaattacctggtcatttggtgcattgacctagaggtggaggagaaatgtgcactcatggagcaggtggcccaccagacaatcgtcatgcaatttatcctggagctggccaagagcctaaaggtggacccccgggcctgcttccggcagttcttcactaagattaagacagccgatcgccagtacatggagggcttcaacgacgagctggaagccttcaaggagcgtgtgcggggccgtgccaagctgcgcatcgagaaggccatgaaggagtacgaggaggaggagcgcaagaagcggctcggccccggcggcctggaccccgtcgaggtctacgagtccctccctgaggaactccagaagtgcttcgatgtgaaggacgtgcagatgctgcaggacgccatcagcaagatggaccccaccgtgagtaacccccgcgccccatgccttcccggcgggccgtgtgtctcccccagccctgtgtcccaagtctctgaagccggctggtgaaagtgcccctccaaggcttctccaaggagtaaggggggtcgtgtcaccttggcacacacccacatatattgagcacctactgtatcccagtatccagcagataaatgctgagctttgagcgcatgtccttcgtgactgtcactgttactgtgactgagtccagcctcagtttccttatccaaaccacattttctctcaatatcagctcacaaaatgcgtggga

SEQ ID NO: 34747 - DNA, 463 bp, Homo sapiens
cccgcctcggcctcccaaagtgctgggattacaggcgtgagccaccgcgcccggcctagcctctaggatttttaacctgcgtacctggaggaacagggctatccttaccgagattagggagaccaaggacaaggcaggctgggaggtggccatgttgagttagaggtgcccatgcagggacactgaggacatgagtgtctcagatctgcagtagagcagggctcccaagcaggtggtctttggcaaatgccagatgaggtccccggcgggggagcccaggccttggggagcccttcatgtaggtcaggaatagacttggggaaccgtggggcgcctctgaggagctgtggctggagggtcctgggccccccagtccctcctgagcgttgggccaggtccagtgagcactgcccaacccccatagacagccgatcgccagtacatggagggcttcaacgacgag

SEQ ID NO: 34748 - DNA, 241 bp, Homo sapiens
catacacaggtacatacatatagatgtgtgtataaatatatataattacgtgtgcctgtatatatataaaatttataatgaagaattggctcgtgtgattatggagcctaagaagtgccaagatctgcagttggtaggctggagacccaggaaagctgatggtatggttccaaaacaaaagctagcagccttgagacccaagaagaacttatattttagttcaaatctggcaaaaaaaaaa

SEQ ID NO: 34749 - DNA, 353 bp, Homo sapiens
ctacgagtttggaaacaaggctttgtttgttttatattgcaaattagatatatgatttgttggaaagaatataaaattaaatatgaaggtatgtcacatacgcaatgccatatataaaccatactcctttacctttaactcttcagtatataatctttcagacttttttatttgcacatatgaagtatatacattcgtaaagtttttaatttaaaaattgggtcttaacagcatttttgaatagtgaatgtcttcaaaaatatgttgtaaacaatgaggaagtttaaaatgtctaatcacagtcacccactgtttaggttggggggggtattgtccaccccatggggggttcc

SEQ ID NO: 34750 - DNA, 457 bp, Homo sapiens
tcactaacagtgggagggaacctttctcatggctcctgtaataaatttgttttgagtatatgaaaggttcttcaatttgaaatgatacaggaataaatgaatgctatttcttaaaaatgggcttgggctgtaaaaatatgtttaggagttttcagtggtacagggaaatactcaaatgctaattgaagaaaaactaaatgcacaactgtatattaagaaaggaataaaaggaaagatgttcaaaagactaaaagactaacaactgttcatttcagtgatgggatttcagacagtttttcttgtttctttaactttcataagtttgcccactaaaaatatattagcttttagcaagcaacaacaacaacaacaaaaccatcttctggttatatatacttaaagaatttaaaaaaggaaaaacaaaatcaagaaatagggggagaaatgaagatttaaa

SEQ ID NO: 34751 - DNA, 309 bp, Homo sapiens
gtcataagcttcaggtctgacaagactcaaggccaacccgggaggattatattgttcaatctgcatagtaaccttgggaagtcaagggcactttatcccccctaccttacagacaaggacacttagagcacaaaaaagccttccttagatttcttgaaaattctgggccagggccaggcatggtggctcacgcctgtgtaatcccaacactttggcaggccagggcaggtggatcactggaggtaatgagtttgagaccagcctggccaacatggtaaaaccccatctctactaaaaatacaaaaaaaa

SEQ ID NO: 34752 - DNA, 670 bp, Homo sapiens
attttagtagcgtcgacatgggctcagaaatatgagcatttgtttggtttttgcattaccacattgtttacccagaaacaactcctgcttccatgtcagcttacgtataaactattgcatcttgctactgcaggctgtataacaagacagctaagatttgccttcctggcatttatgactgatgtgaacctcctcccggatgtgtctggacatatgcatgggaaatgtcttctttcaggcaacccttattgaaaaccacttcagaagtcccttggggacagagaggaagtggtgggacagagcaatctctgtatgttacttgacacaaaggtccttttagactcctggtccctgttgccaagcagttctatgccctcagcctcagaactaaggactgtgagaacccattccccactctccttgaacccagaatagctatttcaatcttcctgtagttgcctcaatcgtattatggctgaaagaagccaggattcataattttgagccagtaactttacctggtctctcatgctttgtatcattaaacattcactgacactaactttgtgttaaatttaactaatttagaatttcgaaagcataggataaaactttccttctgaattaaagcaaatcttgagattgtaaggcagatgggaaaaaaaaattg

SEQ ID NO: 34753 - DNA, 471 bp, Homo sapiens
gtctgtccttagaatcatcagagcttctattatgtaattctttggagtaaaccctagttaatcagagcatgcatttcactggaggggcagctcagtgagtgatgtgaaggtgtttcctctgagaaacggaaacagttatgaagtgttttgtggtcctttgggagttgaggtgctatagaaatgtaaggcttttattacaactcctgacctactatacagaaccatgctaacatcattgatgattcttttgcataatcaaagaattaaacataaaagtcatattaattttcagcttcattagagatgcaagaatcaaaagagatgtttgccaaatgggaaggcactaaattggtaggagaaagaattttaatttcaagcttcaagtgaatgttataaataacctagcataaaaaagacactaccaaaagcgcctgacaatgtcctttttaaagatcagcaacattaaaaagg

SEQ ID NO: 34754 - DNA, 221 bp, Homo sapiens
tttgttatggcacacaccacttctaggtatcgatttctgtattgtttattgtcacaataatgcagctaaccacaaacacaaagactcaatggcattatggcaataaacatttatttttgctcctaagtctgtggatcatctcaacggttctactgatctagggtggcttggctcatctttgctgggctcacttcatgaatgcacagtcagatggcagattg

SEQ ID NO: 34755 - DNA, 234 bp, Homo sapiens
gcagcccttgagtctgggagaagattctggaaggccccttggaggaggtggcatctgagtggggcagggaaaggaaaggtggtggttagggcagcgctttggagtccctgctttacccctcagccaaggccgtccaacagtctcgggcaagtccacacttttctctatgtttcagtttgatgtggctccttaaatgaaacaatttctctgacagattaaatcagataactcata

SEQ ID NO: 34756 - DNA, 235 bp, Homo sapiens
tttgggtctcatgcagacttgattctggaaactgtaatctcaagggtgacactctcctccctcacttcccttctccaggcatttctgttcttcccatttcttttgcttttgtataaaagacagcacctctgtttggagactttagcttctctgccatgccatgtttgagggctggattgttgctggtggagctcacttgtttttttggtggtggtggtggttttgttgttgttgt

SEQ ID NO: 34757 - DNA, 377 bp, Homo sapiens
ttataattggcaacaaccaaatagagcttttaatagtgttaaaaggctgctgggttctgtcccaggttaaagcaacatacgatatgaaatacccgtaaatgaactggaaaatggcatccagttccctttctcctgtaagtggaactgtcaggtctgtattagcattcaaaaactttacgataagaacatcctaaagtaaaaatatatttgatgctagttactgatgaggaataattgtggaggatgatcttctttacaaaattccctttctcctataagtgaaattgtcaggtctgtatgagcattcaaaaactttaggataagaatatcctactgtgaaaatttttttgatgatagttactgataaagagtaatta

SEQ ID NO: 34758 - DNA, 103 bp, Homo sapiens
acccagccaaaccagcaagcacatttaaaacctctgctcacctcacattcacttacattctgttggccaaaagaagccaagcattccatcactgtacaaagca

SEQ ID NO: 34759 - DNA, 393 bp, Homo sapiens
aagtttgaagcagaatctatgattgatgtcagataccagatagataacaaaaagatgataagatgataacaaaaatggtatttaaattagtgcttaccaagtactttagatcatttactcttcccaaaaattctatgagctagttactattttatatgcactttttaggtgagatagctaaagtagaggagattaggtaactgtcagtctgattccagaacctaaagttctattaattacaaaatgctgcttctcaagttcaaaactacaaacattccctttgtcttaaatagatgttttctaaccttttgaaggccttgtcatacatgtgacctctaactaggaacatcttcattctagccatctataccttttttccatgtttctctcctc

SEQ ID NO: 34760 - DNA, 652 bp, Homo sapiens
aaccaaaacatctaaaaatctttagctcattttataatgattaatcccttgaagaggaagagaatagatctttatataaaggcctagagacagataatcattcagtcatagatcatttctttttcaggttaaaggccttggatttttttaatttaaaaaaagagattgcactttcagccataattttttttatgtgtgcttgtgttgtcccatttctcagtactttttccccaaatttactggcacaacactcagataaggaactgactaatgtggcttattgatgccatccttctgtttttcaatcaggatcacattacttttatgtaatcccatacaatgtacttcttaaactaggtggacaagagcagggttgttccccccaccaccccccaacccacccctcacctgccgccattctatgattccagggctggctggcagggaaaataccagaaatgacacatagatttgtcctttttatattttatttgcaggattggtttatattttatcgatcttaaatacaacatttggaccacaatttaaaatgggctatgcaaatattatatcttgttttttttgtttgtttgttttgttttgctttgctttaattcccaatgcacagattgggccttctcataaaaaaaaa

SEQ ID NO: 34761 - DNA, 403 bp, Homo sapiens
tgtttttgtgtatttgtttgtggggaagggtaagtgtttttgaagaaaagtgggaaaaaatgccaatatctaagagaggtttgctactgagaaactgttaaggagtggtgagagattaaattcttaatagtcttgtggcttgtgcaagagctactattactcttttcataagtttataaacaggcaagctgcatagtactttttaaattttatttatgtattttttttttgagatggagtatcgctctgtcacccaggctaaagtgcagtggcgccatctcagcttactgcagcctctgtccccacaggagaattgcttgaacctgggaggcagaggttgcagtcagccaaagtggtgccactgtactccagcctgggcaacagagcgagactcagtctctcc

SEQ ID NO: 34762 - DNA, 365 bp, Homo sapiens
tggaaacggagcctcactctgtctcacccaggctggagtgcaattgtgcaatctcggctcactgcaacctccgcctctcaggttcaagcgattctcctgtctcagcctcccaactagctggtactacaggctgcactgccatatctggctaattttgtgtttttaatagagatggggttttttaccatgttggccaggctggtctcaaattcctgacctcaggccttggcctcccaaagtgctggaattacagacatgagcctctgcgcccggcccctaatgcattttctaaccccgtcttctccattcctaggaagggatttcattggtccaggccttaagaaggggaagcatgactggagttt

SEQ ID NO: 34763 - DNA, 881 bp, Homo sapiens
ggcaatcagaagcccaaactgcctttgagtctaagatgtgatgactttgatgaaacacaactgaaaacatgagggactatatccagtcacttgtagccagtttcacaggccagctacagaattgtccaaacaaacattatttctgactgcaatttttttcccccaaatttaaagcaatccctggctttaaatgacaaggcacctaccaatgttcttgggtcactgaagaagctactaccatgagcctgggcatagaattttaggagataaaaggatgaatttctgtgactgccagtcagatcttaacaggtttctgttgagccagaatctgtttcagatccaagatggagaggaacactatggaaacttcccaggtgactttcagagcagttgtttcaaacacatcattgtccttttaggggaaccagtttttagaaggttgtgaattggctttttcacaaagcatgattatcttcctggctgatccaggagaaaattagaacagaaaaataatggttgtggattttgaaacaaagcaaggtaaagcctttttttttttcaccttgcattggcaaaactacctcttcagtgtttttaacttttgattcaaaagcatcttaccaataaggataaatatcatatacatcgttatgaaaatattgctatgagataataagccacatatgaatgttgtatacaactttagggtttacatttaatcctgaagtgttacctcctttcatgtctatttacactattttcccatttactaagtggggagggggtctccttatatagtgcttcatcgttaataagtcaatacctgttgttcctgggatgttcttttttgtgcattaaaaacttcaaaattattttttgtg

SEQ ID NO: 34764 - DNA, 378 bp, Homo sapiens
tttttttgagacaaggttatgctctgttgcccaggctggagtgcaatgacccaatcatagttcactgcagcctcctgggctcaaggaatcctcccacttcagcctcccaagtagctgggactacagtcatgtgccaccacacccagccagattttttttaaagagatgggggtctcactatgttgcccaggctggtatcaaactcctcagctcaagagatcctcccaccacagcctcccaaagtgccagaattataggcatgagccaccatgcgcaggccacgtcctatctcatacattgtcttcaacaaaacttaaggtgttttaataactttatgcatttattcaggctgttacgtctcctactccaccagtaaac

SEQ ID NO: 34765 - DNA, 194 bp, Homo sapiens
taaaaatatcttaattacagattggttaaataaatcaaagcatagccatatattggaatattctgcagttatttaaaaatcgtgcattaaaagaattttcacttatgttggaaatttttaattagcatacaaaatcacatgtgtaacagaatttcaggttcattaaaatatagatatatgtatatcaagaaagt

SEQ ID NO: 34766 - DNA, 330 bp, Homo sapiens
taatgagcagcattcttggctttaatcagttttcccattagtatttcaagtgacctttggtctttacacatccgcagagtaagatggaattgtgctaagcacatattatcatttttattggcatcatttctagattctagaaggcccactgccagcaaacactggtgacctctgtttgcctttacaagtacaacctgatcgagagcaggttcgctgggccctttttaaaaaataaaacttatctattaaattcaagatatcattgcatattgaacaatgtgacttatataaaatagcaagtctcaaggtcagagaattgtttctaataga

SEQ ID NO: 34767 - DNA, 792 bp, Homo sapiens
tagagagggagaggaggaaggaagggaggaacacagagagagcttgtgtgtcaggggcaccatttcaacccgagttcccagtgctggaacagcatcacactgggaaacgttccattttctctctggagctggtgtgcttgacctctctggagcaaacgcctttccggatactccctgtgacacgcactgtctatgctggccagagagcaggctttcactcctgtgggctgctgaggccaggtctccaaggcctgtgtgggcgaggggtgcacagccccgtctggcttgaatgctcaggcagcaccttgtctggagaagcaatgtcttcccaatagtgacagaggctctacctgcctcttattaggtattgatgtgtcaatgtcatggcaggcaggtgactagggcagggttggggccgtgctggctcctggttctggctcatggggacctcaggagccctctctccagctgactgaggcctcgcctgcacgcctggccgtcccagcccattggtaccggatttctctacagctggggattgggtaggtcctggagctgcccagaaactccagggaactgtcattctccttccttggaactggacaaccttggagaggggctctgggaggcccagaacctctggcaggagctgggtagtgcctggggttgagggtgggtcttcccattcactgagtgccttgatgtccttgctccttagcttcccaaattccctccggaacttactgagctccttctaagctttgccttggcctgaactggttctggggaaaa

SEQ ID NO: 34768 - DNA, 402 bp, Homo sapiens
gcactatatagctcccatgttccaacctctgcattttacagaggatgaaatcagggcccagagaagcaaaaggacttggccaaggtcacaccactaggaggtgacaaggccagctccagtttccttcctttccagggctatgctcctcccactctgccacactgacatttctgacatttttctttcccttgtttcagatgtcctggtacgtgtttcaatttaacgggtaatcaggcatcgctctctaccgaggatcccctgaggaccccagcttcatccagccgcctgtcagagaaacccaggaagctttgccaggcagcagagtgggaggatttcccagagggagcatcagacttaatggcccctccagccagggtcaagtcctcctgaaagccattaaca

SEQ ID NO: 34769 - DNA, 391 bp, Homo sapiens
ttttgagacgagtctcactctgtcgccccaggctggaagtgcaagtggtgcgacctcctgcctcacctgcaacctctgctgccccaggttcaagtgatcctcctgcctcagccccctagtagctgggattacaggtgcgtgctacctcacccagctaatttttgtagttttagtagagatggggtttcatcatcttggcccagggtagtcttgaactcctgacctcgtgatccacctgcctcagccacccaaagtgctgggattacaggcgtgagccaccacacgtggccagttttgttaatttttaaagaaatcttacacttagaaaaaatgcttaatttgtagttattacaaagggtgatgcatgtccattttgaaaatgtgtgaaact

SEQ ID NO: 34770 - DNA, 493 bp, Homo sapiens
agcttcatatctctccacctcaccccaaacccgtgttaattagcccttcttgcttaaatcaaatcaccttgttgaaatttaatgctgtgactagcaatgtattctttgaccatatccttgtttccagcaacaaatactgccacgttaaggggagaaggaagtgatggatagagggaccagttggcagattgggacacacgtacaaacactattcctttaacttgctttctttagatccgtagttcctacctgtgagtctcatttctgtattgatctgcattggctaagcatacgactaaagtgggattctttgtcttttcttcagtgagctagccaggaatctcagaaaaagggcaaagaagtccagaatgatgtaatgctgcaaaaaatgttactgctgtttctaaggggagtggaagaaacccaagccagttttgagttgagtgtgcttcctgttggaagggggtgagaattcagagatgtatacctatta

SEQ ID NO: 34771 - DNA, 146 bp, Homo sapiens
catactgtgctgagtttctaccatccctctagaggctgcagtgctgtccattaaacaacgggcctccttcaagatcaaggatgccaaatgccgtttgcacctgcgaaacaaaggcaaaacagaggaggctggcagaatcacagggc

SEQ ID NO: 34772 - DNA, 460 bp, Homo sapiens
tattaacaaattttgtagcagatggaagtttaaacaggataacgtatatactttttccttacttgtgtgtaagaagtgtcagatggcttatttaaaattgattacttgataaatttaatcttttgtgaactgcagtggcaaattgctatcaagttattgcattttacatagttgaagttgtgaacaattgttaagaacaacaaatgatgactaggatcattatcttttcttacacacaaaggtcccatcttttagcacttttctgttctagatgtgaatgtaaaatgatgtgagatctaagaatggaactgaaagattgaaaagttctttcttctgcccctttgggcatgaaaacaatgaagcagctgttgagcataactcaggactgccttcccctctctgactttcaacatcctatcttcatgtttttaactatttagtcataaaagagtgcatcaga

SEQ ID NO: 34773 - DNA, 1530 bp, Homo sapiens
cggggcggaagggcccgggtctgctgcggacggggcggggcggagcctcctcctgcacgggggagcccccgggctcgccccagctcagacactcctagccttggggcagctgccgggcgagtcagcggagtagcggccagcgggcgatggagacagagagacacccgacgagaggaggcggggtgggggaggcggggagagtgcgggggcggaggctggcagggggcgctggaagctggagcggtccgtgcgctccccgcgcccgagggtgcaggaggctctgaagcggctgctgcaccgcggggcccaggcggcggctggggggctggggggcgctgccgccgccgccgccgggggcgtcgctggcctcggcccctttgttctcgcgcgctccccctcgccgcccactcccctgctgtcgcgcggcggcggcggtggcggcggcggctcctcccgcccgaggcagtcgggctcggcgccgggggcgggagggggcggggggagcacgccagccgccgagagtggggggcgatggcgaagctccgggtggcttacgagtacacggaagccgaggacaagagcatccggctcggcttgtttctcatcatctccggcgtcgtgtcgctcttcatcttcggcttctgctggctgagtcccgcgctgcaggatctgcaagccacggaggccaattgcacggtgctgtcggtgcagcagatcggcgaggtgttcgagtgcaccttcacctgtggcgccgactgcaggggcacctcgcagtacccctgcgtccaggtctacgtgaacaactctgagtccaactctagggcgctgctgcacagcgacgagcaccagctcctgaccaaccccaagtgctcctatatccctccctgtaagagagaaaatcagaagaatttggaaagtgtcatgaattggcaacagtactggaaagatgagattggttcccagccatttacttgctattttaatcaacatcaaagaccagatgatgtgcttctgcatcgcactcatgatgagattgtcctcctgcattgcttcctctggcccctggtgacatttgtggtgggcgttctcattgtggtcctgaccatctgtgccaagagcttggcggtcaaggcggaagccatgaagaagcgcaagttctcttaaaggggaaggaggcttgtagaaagcaaagtacagaagctgtactcatcggcacgcgtccacctgcggaacctgtgtttcctggcgcaggagatggacagggccacgacagggctctgagaggctcatccctcagtggcaacagaaacaggcacaactggaagacttggaacctcaaagcttgtattccatctgctgtagcaatggctaaagggtcaagatcttagctgtatggagtaactatttcagaaaaccctataagaagttcattttctttcaaaagtaacagtatattatttgtacagtgtagtatacaaaccattatgatttatgctacttaaaaatattaaaatagagtggtctgtgtta

SEQ ID NO: 34774 - DNA, 502 bp, Homo sapiens
ccatttacttgttattttaatcaacatcaaggaccagatgatgtgcttatgcatcgcactcattgtggtcctgaccatctgtgccaagagcttggcggtcaaggcggaagccatgaagaagcgcaagttctcttaaaggggaaggaggcttgtagaaagcaaagtacagaagctgtactcatcggcacgcgtccacctgcggaacctgtgtttcctggcgcaggagatggacagggccacgacagggctctgagaggctcatccctcagtggcaacagaaacaggcacaactggaagacttggaacctcaaagcttgtattccatctgctgtagcaatggctaaagggtcaagatcttagctgtatggagtaactatttcagaaaaccctataagaagttcattttctttcaaaagtaacagtatattatttgtacagtgtagtatacaaaccattatgatttatgctacttaaaaatattaaaatagagtggtctgtgtta

SEQ ID NO: 34775 - DNA, 2473 bp, Homo sapiens
  misc_feature (1918)..(1918): n is a, c, g, or t
  misc_feature (1940)..(1940): n is a, c, g, or t
  misc_feature (1946)..(1951): n is a, c, g, or t
  misc_feature (1962)..(1963): n is a, c, g, or t
  misc_feature (1974)..(1974): n is a, c, g, or t
  misc_feature (1981)..(1982): n is a, c, g, or t
cggggcggaagggcccgggtctgctgcggacggggcggggcggagcctcctcctgcacgggggagcccccgggctcgccccagctcagacactcctagccttggggcagctgccgggcgagtcagcggagtagcggccagcgggcgatggagacagagagacacccgacgagaggaggcggggtgggggaggcggggagagtgcgggggcggaggctggcagggggcgctggaagctggagcggtccgtgcgctccccgcgcccgagggtgcaggaggctctgaagcggctgctgcaccgcggggcccaggcggcggctggggggctggggggcgctgccgccgccgccgccgggggcgtcgctggcctcggcccctttgttctcgcgcgctccccctcgccgcccactcccctgctgtcgcgcggcggcggcggtggcggcggcggctcctcccgcccgaggcagtcgggctcggcgccgggggcgggagggggcggggggagcacgccagccgccgagagtggggggcgatggcgaagctccgggtggcttacgagtacacggaagccgaggacaagagcatccggctcggcttgtttctcatcatctccggcgtcgtgtcgctcttcatcttcggcttctgctggctgagtcccgcgctgcaggatctgcaagccacggaggccaattgcacggtgctgtcggtgcagcagatcggcgaggtgttcgagtgcaccttcacctgtggcgccgactgcaggggcacctcgcagtacccctgcgtccaggtctacgtgaacaactctgagtccaactctagggcgctgctgcacagcgacgagcaccagctcctgaccaaccccaagtgctcctatatccctccctgtaagagagaaaatcagaagaatttggaaagtgtcatgaattggcaacagtactggaaagatgagattggttcccagccatttacttgctattttaatcaacatcaaagaccagatgatgtgcttctgcatcgcactcatgatgagattgtcctcctgcattgcttcctctggcccctggtgacatttgtggtgggcgttctcattgtggtcctgaccatctgtgccaagagcttggcggtcaaggcggaagccatgaagaagcgcaagttctcttaaaggggaaggaggcttgtagaaagcaaagtacagaagctgtactcatcggcacgcgtccacctgcggaacctgtgtttcctggcgcaggagatggacagggccacgacagggctctgagaggctcatccctcagtggcaacagaaacaggcacaactggaagacttggaacctcaaagcttgtattccatctgctgtagcaatggctaaagggtcaagatcttagctgtatggagtaactatttcagaaaaccctataagaagttcattttctttcaaaagtaacagtatattatttgtacagtgtagtatacaaaccattatgatttatgctacttaaaaatattaaaatagagtggtctgtgttattttctatttccttttttatgcttagaacaccagggtttaaaaaaaaaaaaaaggtgaggacatctgggtctcatttgcttctgctaggttaaacttttacttgacaacaaggattcctgctgaagtctgaaccttactgtgtaaccctcagtttccactattaaagagtatcttttgacgtctgcttggaaaatgaatagtatactggtaactcagtctccagtcacctctgtgtctcttaagcaagagattctaaaagattgggaaaacatatcctccaacacctgcctttgcctaaccattatttttcaccagattacttcttaagagagggaggtgattctgaagaaggcttctatctcaaaaagcactgggcccccccacccncccgcccccgccgcccccgacngagccnnnnnngcccgcgcccnnccccacacaancgacgcnncccccccccccccgcccccccccccgctgttttcatttttttttttttttgtaggtcagaaaaaaacaacaaaatcagttcaagcatttttttttctttgtccttgccttgatgttatgagtattaaaaccaggaggattgctgccattgtgcagtttgcttagacaaacctggagatgcaacccagctcacatcattgctactgatgagctttctgtgcctttatcaaaagttgattgagaagaccatatttctttgtatctttttataaactcaaattccaagtatcaaatcgcaggtctcagtgaacatcaaacctatttactacatagaatcaaacctttgtttaggtgagatgtacatcgttagtggaggaaaaactgacaacctaatttcatttgttttcttctgatactcttcagacatgcctctattagaataaaggtaaactggaatttaaagacaagttcccctcagttatttccatggag

SEQ ID NO: 34776 - DNA, 2473 bp, Homo sapiens
cggggcggaagggcccgggtctgctgcggacggggcggggcggagcctcctcctgcacgggggagcccccgggctcgccccagctcagacactcctagccttggggcagctgccgggcgagtcagcggagtagcggccagcgggcgatggagacagagagacacccgacgagaggaggcggggtgggggaggcggggagagtgcgggggcggaggctggcagggggcgctggaagctggagcggtccgtgcgctccccgcgcccgagggtgcaggaggctctgaagcggctgctgcaccgcggggcccaggcggcggctggggggctggggggcgctgccgccgccgccgccgggggcgtcgctggcctcggcccctttgttctcgcgcgctccccctcgccgcccactcccctgctgtcgcgcggcggcggcggtggcggcggcggctcctcccgcccgaggcagtcgggctcggcgccgggggcgggagggggcggggggagcacgccagccgccgagagtggggggcgatggcgaagctccgggtggcttacgagtacacggaagccgaggacaagagcatccggctcggcttgtttctcatcatctccggcgtcgtgtcgctcttcatcttcggcttctgctggctgagtcccgcgctgcaggatctgcaagccacggaggccaattgcacggtgctgtcggtgcagcagatcggcgaggtgttcgagtgcaccttcacctgtggcgccgactgcaggggcacctcgcagtacccctgcgtccaggtctacgtgaacaactctgagtccaactctagggcgctgctgcacagcgacgagcaccagctcctgaccaaccccaagtgctcctatatccctccctgtaagagagaaaatcagaagaatttggaaagtgtcatgaattggcaacagtactggaaagatgagattggttcccagccatttacttgctattttaatcaacatcaaagaccagatgatgtgcttctgcatcgcactcatgatgagattgtcctcctgcattgcttcctctggcccctggtgacatttgtggtgggcgttctcattgtggtcctgaccatctgtgccaagagcttggcggtcaaggcggaagccatgaagaagcgcaagttctcttaaaggggaaggaggcttgtagaaagcaaagtacagaagctgtactcatcggcacgcgtccacctgcggaacctgtgtttcctggcgcaggagatggacagggccacgacagggctctgagaggctcatccctcagtggcaacagaaacaggcacaactggaagacttggaacctcaaagcttgtattccatctgctgtagcaatggctaaagggtcaagatcttagctgtatggagtaactatttcagaaaaccctataagaagttcattttctttcaaaagtaacagtatattatttgtacagtgtagtatacaaaccattatgatttatgctacttaaaaatattaaaatagagtggtctgtgttattttctatttccttttttatgcttagaacaccagggtttaaaaaaaaaaaaaaggtgaggacatctgggtctcatttgcttctgctaggttaaacttttacttgacaacaaggattcctgctgaagtctgaaccttactgtgtaaccctcagtttccactattaaagagtatcttttgacgtctgcttggaaaatgaatagtatactggtaactcagtctccagtcacctctgtgtctcttaagcaagagattctaaaagattgggaaaacatatcctccaacacctgcctttgcctaaccattatttttcaccagattacttcttaagagagggaggtgattctgaagaaggcttctatctcaaaaagcactgggcttccttattcatctgttcttgttgtttttgacggagttaaaaaagtttgtgtgcaatacaatataaatgatgtgaaggacactcttcagcttagtgaaacgctgttttcatttttttttttttttgtaggtcagaaaaaaacaacaaaatcagttcaagcatttttttttctttgtccttgccttgatgttatgagtattaaaaccaggaggattgctgccattgtgcagtttgcttagacaaacctggagatgcaacccagctcacatcattgctactgatgagctttctgtgcctttatcaaaagttgattgagaagaccatatttctttgtatctttttataaactcaaattccaagtatcaaatcgcaggtctcagtgaacatcaaacctatttactacatagaatcaaacctttgtttaggtgagatgtacatcgttagtggaggaaaaactgacaacctaatttcatttgttttcttctgatactcttcagacatgcctctattagaataaaggtaaactggaatttaaagacaagttcccctcagttatttccatggag

SEQ ID NO: 34777 - DNA, 2007 bp, Homo sapiens
cggggcggaagggcccgggtctgctgcggacggggcggggcggagcctcctcctgcacgggggagcccccgggctcgccccagctcagacactcctagccttggggcagctgccgggcgagtcagcggagtagcggccagcgggcgatggagacagagagacacccgacgagaggaggcggggtgggggaggcggggagagtgcgggggcggaggctggcagggggcgctggaagctggagcggtccgtgcgctccccgcgcccgagggtgcaggaggctctgaagcggctgctgcaccgcggggcccaggcggcggctggggggctggggggcgctgccgccgccgccgccgggggcgtcgctggcctcggcccctttgttctcgcgcgctccccctcgccgcccactcccctgctgtcgcgcggcggcggcggtggcggcggcggctcctcccgcccgaggcagtcgggctcggcgccgggggcgggagggggcggggggagcacgccagccgccgagagtggggggcgatggcgaagctccgggtggcttacgagtacacggaagccgaggacaagagcatccggctcggcttgtttctcatcatctccggcgtcgtgtcgctcttcatcttcggcttctgctggctgagtcccgcgctgcaggatctgcaagccacggaggccaattgcacggtgctgtcggtgcagcagatcggcgaggtgttcgagtgcaccttcacctgtggcgccgactgcaggggcacctcgcagtacccctgcgtccaggtctacgtgaacaactctgagtccaactctagggcgctgctgcacagcgacgagcaccagctcctgaccaaccccaagtgctcctatatccctccctgtaagagagaaaatcagaagaatttggaaagtgtcatgaattggcaacagtactggaaagatgagattggttcccagccatttacttgctattttaatcaacatcaaagaccagatgatgtgcttctgcatcgcactcatgatgagattgtcctcctgcattgcttcctctggcccctggtgacatttgtggtgggcgttctcattgtggtcctgaccatctgtgccaagagcttggcggtcaaggcggaagccatgaagaagcgcaagttctcttaaaggggaaggaggcttgtagaaagcaaagtacagaagctgtactcatcggcacgcgtccacctgcggaacctgtgtttcctggcgcaggagatggacagggccacgacagggctctgagaggctcatccctcagtggcaacagaaacaggcacaactggaagacttggaacctcaaagcttgtattccatctgctgtagcaatggctaaagggtcaagatcttagctgtatggagtaactatttcagaaaaccctataagaagttcattttctttcaaaagtaacagtatattatttgtacagtgtagtatacaaaccattatgatttatgctacttaaaaatattaaaatagagtggtctgtgttattttctatttccttttttatgcttagaacaccagggtttaaaaaaaaaaaaaaggtgaggacatctgggtctcatttgcttctgctaggttaaacttttacttgacaacaaggattcctgctgaagtctgaaccttactgtgtaaccctcagtttccactattaaagagtatcttttgacgtctgcttggaaaatgaatagtatactggtaactcagtctccagtcacctctgtgtctcttaagcaagagattctaaaagattgggaaaacatatcctccaacacctgcctttgcctaaccattatttttcaccagattacttcttaagagagggaggtgattctgaagaaggcttctatctcaaaaagcactgggcttccttattcatctgttcttgttgtttttgacggagttaaaaaagtttgtgtgcaatacaatataaatgatgtgaaggacactcttcagcttagtgaaac

SEQ ID NO: 34778 - DNA, 2001 bp, Homo sapiens
  misc_feature (1446)..(1446): n is a, c, g, or t
  misc_feature (1468)..(1468): n is a, c, g, or t
  misc_feature (1474)..(1479): n is a, c, g, or t
  misc_feature (1490)..(1491): n is a, c, g, or t
  misc_feature (1502)..(1502): n is a, c, g, or t
  misc_feature (1509)..(1510): n is a, c, g, or t
tggtagtaagttctatagagcaaaaacaagtttaaagaaggaggttggggtggggggcgatggcgaagctccgggtggcttacgagtacacggaagccgaggacaagagcatccggctcggcttgtttctcatcatctccggcgtcgtgtcgctcttcatcttcggcttctgctggctgagtcccgcgctgcaggatctgcaagccacggaggccaattgcacggtgctgtcggtgcagcagatcggcgaggtgttcgagtgcaccttcacctgtggcgccgactgcaggggcacctcgcagtacccctgcgtccaggtctacgtgaacaactctgagtccaactctagggcgctgctgcacagcgacgagcaccagctcctgaccaaccccaagtgctcctatatccctccctgtaagagagaaaatcagaagaatttggaaagtgtcatgaattggcaacagtactggaaagatgagattggttcccagccatttacttgctattttaatcaacatcaaagaccagatgatgtgcttctgcatcgcactcatgatgagattgtcctcctgcattgcttcctctggcccctggtgacatttgtggtgggcgttctcattgtggtcctgaccatctgtgccaagagcttggcggtcaaggcggaagccatgaagaagcgcaagttctcttaaaggggaaggaggcttgtagaaagcaaagtacagaagctgtactcatcggcacgcgtccacctgcggaacctgtgtttcctggcgcaggagatggacagggccacgacagggctctgagaggctcatccctcagtggcaacagaaacaggcacaactggaagacttggaacctcaaagcttgtattccatctgctgtagcaatggctaaagggtcaagatcttagctgtatggagtaactatttcagaaaaccctataagaagttcattttctttcaaaagtaacagtatattatttgtacagtgtagtatacaaaccattatgatttatgctacttaaaaatattaaaatagagtggtctgtgttattttctatttccttttttatgcttagaacaccagggtttaaaaaaaaaaaaaaggtgaggacatctgggtctcatttgcttctgctaggttaaacttttacttgacaacaaggattcctgctgaagtctgaaccttactgtgtaaccctcagtttccactattaaagagtatcttttgacgtctgcttggaaaatgaatagtatactggtaactcagtctccagtcacctctgtgtctcttaagcaagagattctaaaagattgggaaaacatatcctccaacacctgcctttgcctaaccattatttttcaccagattacttcttaagagagggaggtgattctgaagaaggcttctatctcaaaaagcactgggcccccccacccncccgcccccgccgcccccgacngagccnnnnnngcccgcgcccnnccccacacaancgacgcnncccccccccccccgcccccccccccgctgttttcatttttttttttttttgtaggtcagaaaaaaacaacaaaatcagttcaagcatttttttttctttgtccttgccttgatgttatgagtattaaaaccaggaggattgctgccattgtgcagtttgcttagacaaacctggagatgcaacccagctcacatcattgctactgatgagctttctgtgcctttatcaaaagttgattgagaagaccatatttctttgtatctttttataaactcaaattccaagtatcaaatcgcaggtctcagtgaacatcaaacctatttactacatagaatcaaacctttgtttaggtgagatgtacatcgttagtggaggaaaaactgacaacctaatttcatttgttttcttctgatactcttcagacatgcctctattagaataaaggtaaactggaatttaaagacaagttcccctcagttatttccatggag

SEQ ID NO: 34779 - DNA, 1673 bp, Homo sapiens
cggggcggaagggcccgggtctgctgcggacggggcggggcggagcctcctcctgcacgggggagcccccgggctcgccccagctcagacactcctagccttggggcagctgccgggcgagtcagcggagtagcggccagcgggcgatggagacagagagacacccgacgagaggaggcggggtgggggaggcggggagagtgcgggggcggaggctggcagggggcgctggaagctggagcggtccgtgcgctccccgcgcccgagggtgcaggaggctctgaagcggctgctgcaccgcggggcccaggcggcggctggggggctggggggcgctgccgccgccgccgccgggggcgtcgctggcctcggcccctttgttctcgcgcgctccccctcgccgcccactcccctgctgtcgcgcggcggcggcggtggcggcggcggctcctcccgcccgaggcagtcgggctcggcgccgggggcgggagggggcggggggagcacgccagccgccgagagtggggggcgatggcgaagctccgggtggcttacgagtacacggaagccgaggacaagagcatccggctcggcttgtttctcatcatctccggcgtcgtgtcgctcttcatcttcggcttctgctggctgagtcccgcgctgcaggatctgcaagccacggaggccaattgcacggtgctgtcggtgcagcagatcggcgaggtgttcgagtgcaccttcacctgtggcgccgactgcaggggcacctcgcagtacccctgcgtccaggtctacgtgaacaactctgagtccaactctagggcgctgctgcacagcgacgagcaccagctcctgaccaaccccaagtgctcctatatccctccctgtaagagagaaaatcagaagaatttggaaagtgtcatgaattggcaacagtactggaaagatgagattggttcccagccatttacttgctattttaatcaacatcaaaggtcttgatgattacccctctttatttctgagaactcaggaagcatctccggcaggggttatccttaataggcccccgatctcagggttttaagaatcacattgggaaaaccgacagatggataaaaaataattaccacacagtaccagatgatgtgcttctgcatcgcactcatgatgagattgtcctcctgcattgcttcctctggcccctggtgacatttgtggtgggcgttctcattgtggtcctgaccatctgtgccaagagcttggcggtcaaggcggaagccatgaagaagcgcaagttctcttaaaggggaaggaggcttgtagaaagcaaagtacagaagctgtactcatcggcacgcgtccacctgcggaacctgtgtttcctggcgcaggagatggacagggccacgacagggctctgagaggctcatccctcagtggcaacagaaacaggcacaactggaagacttggaacctcaaagcttgtattccatctgctgtagcaatggctaaagggtcaagatcttagctgtatggagtaactatttcagaaaaccctataagaagttcattttctttcaaaagtaacagtatattatttgtacagtgtagtatacaaaccattatgatttatgctacttaaaaatattaaaatagagtggtctgtgtta

SEQ ID NO: 34780 - DNA, 403 bp, Homo sapiens
  misc_feature (358)..(358): n is a, c, g, or t
atcaggctcctgtttgagaaaatgtgattctccttctggggccaggcaagacacttagggatggctcaggaagaaaagtgggaggtgagacaaacaaaagaagccttgcagattggagcagagaagagaagaaagaggctgaacagagtgaacacaggtcttgtttccagtggagctttttcttctgcatagggacagttttggggactctgcagctgatttcagggaaggtgattcattgaagaccctgttataccctgagcaagttcatcattctatcctcttactccataacattctctgaggcttgcaattccaaaacaagggcaggagttcaaggctgcggtgagctacgatntggccactgcactccagcctgagtgacagagtgaggccctgtctc

SEQ ID NO: 34781 - DNA, 800 bp, Homo sapiens
agaaaattgctcaactcagatttggtatttttcttttgctcagaagtgtgatgtgttcttactctgtaataatttagtagacttctaaatgagtatactaaagtaaagaggtaattaactggtacaaatatcacaatgcctatttgtaaggcatcactagtttatatcagagacctgcatatggcctcagattcctcctgttttaagagccactaagccacctattttccatttctacactatgtgtttcatggttaggtggccaagtcctatgcatgtatctcaggtatctttagtgtgaagtctgcacataccatatatgaaagagatgttttttaaactgaatgtccctagagaagcccttttggcctttgtctgcaagttaatgtcctttcaaataaataaataaacactctttacacctgaactaacataactagcttcagatcactaatcatataaatttcttggggcagttcctctgaagttgtgaagaatgtggtagtataaaatagcctttgtggccgggtgcggtggctcacgcctgtaatcccaacattttgggaggccgaggcaggcggatcacaaggtcaggagatagagaccatcctggctatcacggtgaaaccttgtctctactaaaaatacaaaaattagctgggcatggtggcgctcgcctgtagtcccagctactcgggaggctgagggagaagaatcacttgaacccaaaaggtggggttgcagtgagctgagatcatgccactgcactccagcctgggcaacagagcaagactccatct

SEQ ID NO: 34782 - DNA, 671 bp, Homo sapiens
agaaaattgctcaactcagatttggtatttttcttttgctcagaagtgtgatgtgttcttactctgtaataatttagtagacttctaaatgagtatactaaagtaaagaggtaattaactggtacaaatatcacaatgcctatttgtaaggcatcactagtttatatcagagacctgcatatggcctcagattcctcctgttttaagagccactaagccacctattttccatttctacactatgtgtttcatggttaggtggccaagtcctatgcatgtatctcaggtatctttagtgtgaagtctgcacataccatatatgaaagagatgttttttaaactgaatgtccctagagaagcccttttggcctttgtctgcaagttaatgtcctttcaaataaataaataaacactctttacacctgaactaacataactagcttcagatcactaatcatataaatttcttggggcagttcctctgaagttgtgaagaatgtggtagtataaaatagcctttgtggccgggtgcggtggctcacctgtagtcccagctacttgggaggctgaggcaggagaatggcgtgaacctgggaggcggagcttgcagtgagcggagattgcaccactgcactccagcctggatgacagagcgagactccatctggggg

SEQ ID NO: 34783 - DNA, 313 bp, Homo sapiens
atgatggaccatttggattgtgcaacaaatgaagaaaaccctgtgatatctggtgaacagattgtccagcaataatattatgtggaactgctataatgtgtcattgattttctacaaatagacttcgactttttaaattgacttttgaattgacaatctgaaagagtcttcaatgatatgcttgcaaaaatatatttttatgagctggtactgacagttacatcataaataactaaaacgctttgcttttaatgttaaagttgtgccttcacattaaataaaacatatggtctgtgtagtttccgagatgtac

SEQ ID NO: 34784 - DNA, 782 bp, Homo sapiens
ctgtaattttaaaatgtgtgatttggcatattgcagagaatattaagtgacatcacatatctatgttattgttatacatcagaattattttgtctttcagcagcatgcctgttccaatggatgaccgtacagttgttcctcaatttaaaaagatgtataaatatttaatagaattaagacttactaaatctatttttgaatatgtacattcactaaatagcataaatcttttggaaacagagggtagaagagcaccatctaccattttcctttagccatcctattaattgaggctgccaaaaaccatgtctatcatacagatattgcattattcagctccctagcaagggttaatctttgcccaattctctcctaaatcctcagagcagaccagggctaggagatgggatcagaggccagaggccagaggcttaaatgccatgatccttattgagaggagcaatggaagagaccacagaaaaagtgccaaagttcaatagagtgttcgtgtgctggaaaaattcagatgggccagaggcacataatataggatacagagcaaagaaggaataaggaccaaggaggtgagagcaagtgctattcagagaattggccaggcaggaggaatgagacgagttagggggaatattgagtgattccatagtatcagctagtatttgggttggtatcatacaggagatacactctccgactatttaaggagaagggcagtgccaacaccatgttgatcctcgacaacgtaatgttgattcttatacttt

SEQ ID NO: 34785 - DNA, 369 bp, Homo sapiens
ggttaatctgcagctgtagtgtacctaaagtattctttggcaggttgtggccctagcctaatccccagctggacttagcaccatttaagtgagttacatctcatccccgcaagggattgagtctgtagccaatttggccttgtcaccacttcagccctccctctgatttcacctttgggaaaactacaaagtggccccagacatacatagcaggcttgatcacatgggtggagtctgtcaggacagcatacatcaaataaaatgtccagggaacctgttgtaaataaaccacttcccgcatgctcagtcatcgtggaggtacttgaatgtttagtttcttttagctgatggccaagaaatcaatgttta

SEQ ID NO: 34786 - DNA, 273 bp, Homo sapiens
caaagtacagcatgctcctggttcctttgccacttctcaaaaagcttcttctgatttctgctccgacaccaacttcccgtcctctgacctccgctcttctctctctgtatccttcaccaccacccttcagcattaaccactgaaggaatcactaacctctctcagaggctccagattcacatttgcaagtgtctgctggacatcatcacagaacgtccctttgtagagtatcaatgaaaccagctctgaatgctgcatcttccttccaaatcc

SEQ ID NO: 34787 - DNA, 686 bp, Homo sapiens
ttaggccaatgcttgattaccctgatttcctcttgaaatgatctatatgtgaatgaaaattttggcaaataattattcagccaatttatactttctattgaatgtgtctctaatctctgcccttcgtgtttgaaattgatgtaaacgactggctcaacatatttatgatttagagcttgagactgtggaaggtgtgtctggtagttctttccatttcaggcaagatattaccatgtctgtaaactgcatctccccataatttaccagagtccaggaattactaaacagtttataaagagcctcacacagtctcagtgtcttcttccctgaactataacatattcatacaatgagctcttactgcttatttgcacatttattctcattttaaataataaattaaaacacttgccacatacaaaacatgtgacattacagcttactggacttaaagtagaaattgctttaaaatgaatttttggagtatatttttatatggtttacctcgttttgcagggatgaaggacatcagtgtattcatctgttttttaaaagtatcattgtaggccaggcgcggtggctcacacctgtaatcccagcactttgggaggccgaggcaggcggatcacgaggtcaggagatcgagaccatcctcactaacacggtgaaaccccatctccactaaa

SEQ ID NO: 34788 - DNA, 391 bp, Homo sapiens
tgagacagggtctcactctgtcccccaggttggaatgcagtggtgcgatctcagctcactgcaacctccacctccccaattcaagcaattctcatgcctcagcctcctgagtagctggattacagatgtgcaccactacgcccagctaattattttgtatttttagtagagacagagttttgccacgttggccaggctggtcttgaactcctggcctcatgtgatccaccaaccctggcctcccaaagtgctgggattataggcataagccaccatgcctataatcagccagcaattactttcaaatgctatctatcatttgtgggcattacataataatctaacaataaaaggtattgcttaggatagttatgaataatttaaaaattat

SEQ ID NO: 34789 - DNA, 1186 bp, Homo sapiens
tcttgccttcattaatagatttactaactgtatttatagtaataaaaatcctttattgtctttatatgtacctgtgccaacatacacaaattaatgtaatatcctatattaagggaataaaatataaaaattatatgattatctcaatagatgcagaaaaatacttaacaaagttcaacatgttttcatgatacaaactctcaacaaaatacatatagaagaaaatttcctcaacataactaaagccatttataaaaagccaactgccaacataattttctttgaagttttaaagaccatggatcgatttttctctttatgtagcctaatctgatttttatattcatatctgttaaggcatacacaatagaaattatatgttgacactacctttagagtccaggctccttaacctatacatgcatttgtaactgtatcttacctgttatttgatgctaaaagatggaaaggttttcctctaagatacagtacaaggcaaggtacaaagatgcccaccctctgcacttctattcaacagttctattaaaattgctggaaatactagcaaggacaatcagataagaaaaataaatagaagccatccaaatgcaaaaggaagcaaaattatctttgtttgcagatgatatgatcctctgtgtagaaaatccttaaaatgtcacaaaaattgttagaactaatgatcgaattcagtaaagtagcaggacacaaaatcaacatcaaaaatcagttgcatttatttacatcaataatgatctatctgtaaaagaaatcaagatggtcagacagtttttataagataatctgtggaaaatatgtaaaacttcttctgatattataccattcttgtatttgaatgatatgacctatttgtatattattttttaaatgcattgctagattttgttggttacattttaagtatattgaatctatactcatatataacattgttagatgtattcacagtgaactgcaacttttatcattatgttcttactatttgttatatttttctttttattgaactatcaaagaagttttctacattattttcatttatgtataaaatcatttatatataacatttatacgtaaaatcatttttatataaaaatatacataatttatgaataaatgatcttacattatttctacattcaagttg

SEQ ID NO: 34790 - DNA, 427 bp, Homo sapiens
ctactactactaaattagcggccggtcgactgttaagactccaacacacacagaactttccattcctatcctggaaagcattctcgatcagtatagctagctggtgcttttcagcagttctgcaggcaggtttatttaagcagacctcttttgatagacatttagtatgttctaaggctttgccttttcattcattcactcaaaatatttataaagggcctattccactccaggcactgttttagtcacctagcatacaccagtgattcaccctggtttcccagagttgaattatcataaattactccacctattgtttatgttgttgtgaaaagtgtcaaagatcttgatcttgcttgctgatctctagctcctgactttgcagcccactgatgcgaaatgtcgacgcggccgcaatttagtagta

SEQ ID NO: 34791 - DNA, 683 bp, Homo sapiens
agaggtcgaagatgacgacaagatgtcaatctcaagacctcatccttcaacagctgaatcaaagcctccaacaccaaagtttgacttactagcctcaaattttccacctttacctggaagttcatcaagaatcccagataaactcattttggagaataggatgtctgatgttgttaaaggtgtctacaaagaaaaggataatgaagtgttgagagttagttgcccagtgcctgcagatgagcagacagaatgcacttctgcccagcaactcagtatgagtaccagttctccatgtgcagctgagcctactgcattaagcacaactcagccaaaaaaaaaaaaaaaaaaaggatctaatagaggattcctctgttcagaaggatggtctcaaccagacaactataccagtttctcctccaagtactacaaagccatggagggcaagtactgcctcaccatgtaatcgtaacataaatgtagctacaccgtgactctacaggaaccctgaaagttaagttatgctgaagtgtgccagaagccccctaaagagccatcttcagttcttgtgtagccactatgggaacttcgctccaatgtagtgtctcccacgacaaacaaagacaatgaagctccttagaagtcccttgagaaaccaaatgagaagccagaagcaagggctagta

SEQ ID NO: 34792 - DNA, 318 bp, Homo sapiens
tttttagtagggatggggtttcaccacgttggccaggctgatctcgcactcctgacttcgtgttccacccaccttggcctcccaaaatgctgggattacaggtgtgagccactgcgcccggcctactcctctttaatgtgaataataaccaaggtgttctcagtcttgtaaaaactgtgaataagatcatcttcaacattactatgtttattggtctgctcgaagttgcaatgtaggtaaacagaatatgcatgttacacaaatgcagcttcaaagatcaatcttccagtcccacctaggttactagttttaaggaac

SEQ ID NO: 34793 - DNA, 683 bp, Homo sapiens
tggccgactacgccctgctcatggacttcatccccctggacgacaagagatacaggtatgcctttcacagctcggcctggctggtggcgggcaaggcagacccagccacacctggccgcgtgcacttccaccccgactcaccagccaagggtgcccagtggatgcgccagattgtgtcctttgacaagctcaagctgaccaacaacctgctggatgacaatggccacatcattctcaactctatgcaccgctaccagccccgtttccacgtggtcttcgtggacccacgcaaggacagtgagcgctatgcccaggagaacttcaagtccttcatcttcacagagacccagttcacagcagtgacagcctatcagaaccacaggatcacccagctgaaaatcgccagcaacccttttgccaaaggctttagagagagtgacctggactcctggcctgtggccccacggcccctgctcagtgtcccagcccggagtcacagcagcctcagtccctgtgtgctgaagggtgccacagacagggagaaagaccccaacaaagcttcagcttccacctccaagacccctgcttggctccatcatcaaggaggcctgcctctcccagctgggctggggctcctgtcccccactgtggtgtgcctggggcctggccaggactcccagtga

SEQ ID NO: 34794 - DNA, 549 bp, Homo sapiens
gtaagccatatatgaataaatgttattgactggcaaacaagttatcttcctcttaatggaatggataacagaatgacttcctctgggttcttccttctctactgcctggcttttttatgttactctagatttttggttgagagaacttggttgaaatgtccatccctaaagcaatcatttatgacctgagtggcagtgtacccactgtagaggtatagctggttgtggcagtgtcgaaattcctcaaggagagggcagttctccgtggtattatttttggtctgtataccacttatgcaaaaggatatagatagttttccaactcaaattaccaaaaaacacagtaaagtggttaagaacactagctctagagttagatggatttaaatttgaatcctggaaggccgggcatggcggcttgcatctgtagacctagctacttgggaggctgaagcaggacaattgcttgagcccgagagtttgaggttatagtgagccatgcttgcactccagcctgggcacagagtgagaacttgtctttgaattaaa

SEQ ID NO: 34795 - DNA, 388 bp, Homo sapiens
tccccttcctacaccagccttccaggtctctcctccaggatgccttccctaactcatccagcctcggtatctgcaccccacccttgaacctccacctctttgggtctggagtctgccagggtgtggaagggagggtgtgtgctccgcaagactcagtgtgtagaatctcatccttcccgagcattggtcctagatagaaaccttcccttcaggtaaggaagggagccagccaagagcctcccctctgctcccttggcctcaggggtggctgtctccagttatgggtgtgtacagtggggaggaacaagttcagatccaggcagagccattcctttggcaactcttgctgtcagccatcttccaaagagctttgcaaaatgttaaagaa

SEQ ID NO: 34796 - DNA, 539 bp, Homo sapiens
cttttttcttttggccttaactgatatgcttagcttctgctatactgtctcaggaattcggtagagattttatgccacaaggaaataggcacataaatgaggcctgcccatgaaggcagtttttaatcactcttttatctgaaggtattttgagaggctgcttattacagtgcttgagctcgagctcctgcatgccagagctcaaccgcttgagttcaataccatttattaactgtgtgacttcaggtgagtgacttactctcccaagcttcagttcactcaactggaaaatgggaatagaccgggtgtggtggctcacgcctgtaatcccagctacttgggaggctgaggcaggacaattgcttgaaccaggaaggtgaaggttgcagtgaggtgagattgtgccactgcactccagagaggctgaggcaggtggatcaccaccacgcctggccaggagctggcatttctaacacatgcccaggcatcaggaatgtcacatggaaaagccacaccaacccctaatggaggtatggacg

SEQ ID NO: 34797 - DNA, 2359 bp, Homo sapiens
  misc_feature (99)..(99): n is a, c, g, or t
  misc_feature (216)..(216): n is a, c, g, or t
cgccctgctggacgagctgcagaaggtgttcaccctggagatggcatacacaatctacgtgcccttctcctgcctgttgggtgacatcatccggaaaantcatccccaagccacgagctggttggggagctggcggcgctgtacttggagagcatcagccccagcagtcgcaaccctgccagcgtggagcccaccatgcccggcaccgggcccgangtgggacccccatggtgggggctgccctcaggatgacggccactcagggacctttgggagcgtcctggtggggaaccgcattcagatccccaatgactctcggcctgagaaccccggaccactgggccccatctcgggggtgggtggcgggggcctgggcagcgggagcgacgacaacgccctgaagcaggagctgccgcggagcgtgcacgggctgagcggaaactggctggcgtactggcagtacgagatcggcgtgagccagcaggatgcccactttcacttccaccagatccgcctgcagagcttcccgggccactcgggggccgtcaagtgcgtggcacccctgagcagcgaggacttcttcctgagcggcagcaaggatcgtaccgtgcgcctctggccgctgtacaactacggcgacgggaccagcgagacggccccacgcctcgtctacacccagcaccgcaagagcgtcttcttcgtgggccagcttgaggccccgcagcacgtggtgagctgtgacggggctgtgcacgtctgggaccccttcacagggaagacccttcgcacagtggagccgctggacagccgggtgcccctgactgcggtggctgtcatgcccgccccccacaccagcatcaccatggccagctctgactctaccctgcgctttgtggactgcaggaagcctggtctgcagcacgagttccgactgggcggtgggctgaaccctgggcttgtccgtgccctggccatcagccccagtggccgtagtgtcgtggccggcttctcctcaggcttcatggtgctcctggacacccgcacgggcctggttctgcgaggctggccagcccacgagggggacattctgcagatcaaggcggtggagggcagcgtcctggtcagctcctcctctgaccattccttgactgtctggaaggagctggagcagaagcccacccatcactacaagtcagcatccgaccccatccacacctttgacctgtacggcagcgaggtggtcactggcaccgtgtccaacaagattggcgtctgctccctgcttgagccaccctcgcaggccaccacgaagctcagctctgagaacttccgcggcacgctcaccagcctggccttgctgcccactaaacgccacctcctgctgggctcagacaacggggttatccgcctcctggcatagactgaggcaggagctggccgggcaagggtgggaagacatctgcgggcgcgtgtccactcaccctgttccctgagcagcagctccctccagggaggccctgggtcccacgccctgggtgcccacatggcctgccaactagggcctgcaaatggagtgggggagtcctggcccctgaatcaccagagccaccaagcctgccagaggggtctcattcatggcttggggacacagggctcctagcaagcaggaagttaagagcaggaggaagcgttgctaccttcacttctccccagctctgccctctgggtccacatgaggacagggaagctcgggaaggggaagggagactggccctgcccagccggtctctagcccctcagcccccgctgggcactctctgtcccatccctctaggacagggaagctggcctggtccagggcactgatggtgcttggattccagcctaaggaaggctggccgtggtccaggagttaagggcttgggtctggggtttaagtggccacccatccaggccctggccagtgtgggaccgggacgggaaggaagaaggaggctaggagcagggggaaaaggtgcacttggccagtggcgcctgccaggagtgagtccatgcgttgtctgcccacccctaccacagtgtttgtgccttcagctgagggggcagcctctgggccctgaacccctgctggggctccacgaccctgagagaaggggtgagaagaatcatctctgcacctcgggtctctgccagaggaagacttaagcatccctgcgacctcacattctagacagagatgaggtccaggggttggcccctgctgccttctcacaatttgcaatagatgtaaataggaccaataaatcctttggaagagcaaaaaaaaagacaagaagacaacaacagcacacacaacggg

SEQ ID NO: 34798 - DNA, 496 bp, Homo sapiens
  misc_feature (77)..(77): n is a, c, g, or t
  misc_feature (188)..(188): n is a, c, g, or t
  misc_feature (219)..(219): n is a, c, g, or t
gtacctctcagacaccacactcatggacatcctgccccggatcagccatgaggtcctgctgcccgtgctcagcttcnctcacctccctcgtcacggggttcccaagtggggcccaggctcggaccatcctgtgtgtgaaaaccatcagcctcatcgccctcatctgcctgcgcattggacaggagatnggtccagcagcacctgagcgagcccgtggcncacctttttccaggtcttctctcagctgcatgagcttcggcaacaggatctgaagctggaccctgcgggccgtggtgagggccagctgccacaggtggtcttctctgccagaggaagacttaagcatccctgcgacctcacattctagacagagatgaggtccaggggttggcccctgctgccttctcacaatttgcaatagatgtaaataggaccaataaatcctttggaagagcaaaaaaaaagacaagaagacaacaacagcacacacaacggg

SEQ ID NO: 34799 - DNA, 223 bp, Homo sapiens
ccgctggctgactctagaggatacacttcctctcctcccacctcgggtctctgccagaggaagacttaagcatccctgcgacctcacattctagacagagatgaggtccaggggttggcccctgctgccttctcacaatttgcaatagatgtaaataggaccaataaatcctttggaagagcaaaaaaaaagacaagaagacaacaacagcacacacaacggg

SEQ ID NO: 34800 - DNA, 333 bp, Homo sapiens
  misc_feature (70)..(70): n is a, c, g, or t
gtactgccccatcacgttccccatcacagtcttcgtggctgtctcctcccttgggaggccccattctctngcccttgccccagagtcagcagtgggttctaagagccagcaggatgggtgagagcaaagggatttggcctcagacccctacccccaaggtgacacacaaacaaggactgagcagtagccagcaagagaggcccagaagctggcctgtagtgtccctggggaaggcaggagagtcagggaggtggactggcggtccgcaggagctcggcgagagggaaggagtggcctcctgtttacgaagcttcccctctgagccctgcacgg

SEQ ID NO: 34801 - DNA, 371 bp, Homo sapiens
catccccaccacctattaagagatgagacttccatgacagatgggctaattacaaaattgattgattggctttgggttgccttgcaatgaaatgaatggtagaagcaatgcactgtcttctcccttactatctccctccttttgggaacccaagatccaatataaaatagcacacttaattttggcgatctgcctttgcttcactgtgcctgcttattaagccctaaagatgcatgctttcctggccctgttcctccaaaggctccaccctgaagccagtaatccaattaagaaactagaaataaaaaatcttacaaacactaaatcttcagactgtctgtctgtctctctctctgtctctctctctctct

SEQ ID NO: 34802 - DNA, 363 bp, Homo sapiens
gattttaaaaattctttagttttgtttttctaagtgtcaggcagcatgatggaaagaacactgaatctggagtatgaagacttgggttcgtgtttcaacttctgagaaactcatatacttcaatcaaaaaaggaggacaataccacctgcctaaaatatcagggatattctaagggtcaaataagataagtggtagtgatttttaaatggtacagaactacgtaaatgaaaagtgttattattcttattacaccggaactatgttttactttttaagtcaaagttctgtttttttttttgagacggagtctcacactgtagcctgggctggagtgcaatggcgcaatcttggctcactgcaac

SEQ ID NO: 34803 - DNA, 605 bp, Homo sapiens
agagcaagacgcgtcgacaaaaaaaaaaaaaaaaggatatcttcttctctcaccatacacaaatggtggcacactacaaacactctcctgcctcattaaacatgatagtatatcttggtggtgattgcatttctccaaataaaactcttcctcgtttcagtaccttgtggggagggaccatccctgattggtacccttgccttgctggcggactaggcttctgctgttaccagcaacgctgtagtgaataccccatgtgcttgtcattttgtcatttcagccacatgtgggggttattgccagcacacatttctagaggaagagttgctggacttgttcatgttaaatttggttggccgtttctgtcgcaggagcctcagtttatccatacccaggctagctctctgtgtgtgttaccaacattttgctctttgcctggtggatgggtgacaaatgatatcatgatatcatggcattggttatggggtttaaaaaaaatcttttatggccgggtgcagtggctcactcctgtaacccctggcctttgggaggccgaggcaggcggatcgcttgaggtcaggagtttgggaccagcctgggcaaca

SEQ ID NO: 34804 - DNA, 439 bp, Homo sapiens
ggtggactgagtgtgtctcccccaaattcatacgttgaaactctaacccccaatgggatgatatcaagaggtggtaattagacttggattaggtcatgagggtggggccctcatgatgggattagtgtccttagaagaagtgaaagagagtcaagttcactctcttggctgtgtgaggacacagtgagaagactgccatttgcaaaccaagaagcaggccctcaccagacactggatctgtttgttgacaccttgattttggatgttccagcctccagaacttgagaagtaaatgtttgttgtttaagccattagtttatgacactttcgttatagcaacccgagcagactgacactgtttcagattttcagattgtaattgttgcaaaaatggaatgcttttaacaaaaatgaaatgttatgcataaaggtttttttg

SEQ ID NO: 34805 - DNA, 387 bp, Homo sapiens
cacgttagttattctccagggtaaaccatatgttaggtcacaaattaagtctcaatagattttaaaagatagatattatacaaagtatattctacgaccacaacagtatgaagttagaaaataataataaaaggaaaactggaaaatttataaatttgtggaaataatttaaataatatacctttaaacaacccataagtaaaagaaaaaaatcacaagggaaattgaaaaatacttagagatgactgaaaacagaaacaaaacatacagaaacttatgggatgcagcaaaagttgtgctaaaggggatatttatagctataggtgcttacctttaaaaagaagaaaaatctcaaatcagttatctaacattacatcttaaggaccc

SEQ ID NO: 34806 - DNA, 440 bp, Homo sapiens
cagcaccaggttaacacttcttcttacatgcaaacagctatctggctggcctaaggcattcttctcccctagtatagctgcttgcatttgtttctcctctttcctcattccaagacttaactgctgacaactgctgcaaatcagaatggataccctaatcttagccaccttaccccataccctagtgatagtcctgagtcatcctgatatgaaggttgaccaggatatcataatggcaatgatagtgcttgtaggacatgccatttgagtgtgtattctgtgccagatactgtgctagaacttcaggtgcatcattgttttaatccttaaaaaatcactttcagaggccaaggcagatcgatcgcttgagaccaggagttcaaggaccagcctgggcaacatgttgaaaccccatctctactaaaaatacaaaaaaaaaa

SEQ ID NO: 34807 - DNA, 321 bp, Homo sapiens
tgagaatgctacaagtaatagtatactgaaaagaacatgtctctaattctggactgctctttatctccaagaaacagagagagagagaatgaaaaaaaatcccagcttagaggaattttggaagttactctttcatgaaccatcacattttctgggcctttgtaatctttaaacactgttactctttagaggttggtttgaatttgttgcacagagaacaataatctatgacaaattaatgaacccttttgctaatatcacatgagtacaagtatcttgtatttctcatcacatttaccgtaataaagaatgcagacaagt

SEQ ID NO: 34808 - DNA, 2249 bp, Homo sapiens
ctcccccaggaaacagtgcctaaggatgatgtcaagttacagccagtttgctctgatcccccaggacctaagaaaactgtgagtgcttcagcatgcaaaggtagagctaccagataaggagaataacttggccatttatagcaaactgcctgactttggagtgagaaaccaagcaccttctaggtcctaggataggtgaattggaggtgcagctgctgaagttcccattttctacatacttcaggagccagggtgtttcatttggttttgtaaaactttgctgtaagtcatcacagttaattctttgaatggacattttagagtgtaactttttttcaaaattagcagaacagatatctctgctcattctctttatacatttagttttttaaagttcccctagtatacctgttaggcactctaaataggacacagttaaagctaaaagaaggaccagttgctccctagagcctacagttcagaactatcttgttgtcatgtcctggtttggtttggtttgtttttaactcaacaagttggaaaccatgagtttaaagcaaactatttccttttcttaagcttaaagagaattttttttttaatctttagctcctcatttaggtagtgaaggcttccctgaaagacagcagtgcccttctctggaagaagaggctgggaccaaaagcctgagtctatgggttgaggattttgagcattcctttgacaagcttctatgtatttttaatataagactcataaatgaacctgatgtggtgttcatgacccatcccttaagcatgcttgctttttttaactttactttttgagtatagtacttgtcttgtttttcctggagccatgctaggatttaattcctatgtgccactacccgcccatgtcctggaagatggccatgcctgcagcaatgctcatgtcttgaggagaagcaatgtgaaaagcatcaggaaagctgaaccttacgttcaagtcagcaaacatttgtgagcattctagtatgcttgcgaccttgacactttttaaaaattatctttttatttgcttcgagtatcaaccgtatagttgactctagtggggcgaagggagcagagatgagagcaaaattcagacttgctgcccctgtgtgtctcagttctcatgtctctctgagaaatgtgttggcccaattccctatctgccactctgagtctcttgagtaaatgtgtgtaaatgagaaaaattatctcaaagatttaacttattatttagatattttcttctttttaaactcaggaataaacctggtttgtagataatataatatggctactagagctataattgagtaggtgactagaagcattttttcaaatatatttcttgtaaagacatctactttgttttaactaggaaaagaaactcctcatattaaaataaacatttccataagcactttctagaagagtgtagcatccatctaccatccatcccagaatgtttgtatcttgctcatagtatttcaaaaatttttatgggtgaaaaaaatgcacttttttatttattggaaaagtgtagagttattgaattaaattctcaagtgggacaatttagtgtaaagggaaacatgggttttggagacaagagcacagggctgtggtccctgttccagcattgactttactatgtgacctcgagcaaatgatttaacttctctgtgcctcagtttctccatatacaaaatggggataatgatactaaccattgcctacctcatagagatgttatggggacaaacgaaataatagagataagcacgaatgctttcaactcttcggaagaaaggtgctatataaattgaagttgtgtttttaatgatccaattattaattatgtttagggtttaaataacaatactgttagtcatgttaagaataagttttgttttgatgcatatttccacttctcttctgtggccagatcttgatcattcaaccagtaatggtacctgaggaactgaaatgggtatttgttttctgtatgtttctgccagtagtatttcaattgaatatccagaaaagactggagtttaacttgtaatatcttatagtttacatgtaataaaacttattcaagctatatataaaagtatgattacatgtaaatagcaggtatgttgtaattaaaggcacttatcaaattgtctttgttcttttttaattgtaataaaagtcagttttacataaaaaaaaaaa

SEQ ID NO: 34809 - DNA, 677 bp, Homo sapiens
tacaccagaagatcacctgtgtgaatgtgaatagactgacactggagaggaccagctcagcacagtcacttgaactgcccctttgcatttcaggcaggtaaaatgcctttgaagagtgaaaataaagttactgctgattaagcagagagtttgacttgctgatcaatttgatcagaagcctctcaatgagataattactgcatttatttatttcaagaaaagtaaaagccaaagcccagaatgtggcaaggcaagagttgaaaagaaaagaacaagtttttctttgcctagcaagctcacttcaaggacagttataagataatgctgtttgagaagttgaaaccaaagaaataggctccagacactcccctccgaagcaagggtgaaggaaacaaagaaaaacaaacgtctgtatttagccagttcttgttttttctttcaatgcagctacaaggccaccagctattaaaggccacaagttatgccaagaattcagttatgctataaattacataaactggtcattatataattaactgcctttgttttgcttctgtaagtttacttattaaaatctcactcagtctttgttcaaggctcagctttttggatgtgaattcactgagccagagcataccttaaaataaatatcctcctttattgactcataaaggtct

SEQ ID NO: 34810 - DNA, 430 bp, Homo sapiens
tacttgtttgttttcatatatcttgaaataaaaatatttagtgtatgtaaggtgctggttacatcagaaaaaaatgtttcaaatatgttataaaggaaagattcaaattatagaaactatttcttgagactatttggaaaagtttcaagtgtccaaaatttactttttttaatatttagggggtacaagtacagatttcttaaaatgcatgtgctgggtggtgaagtatgggcttttagtgtacccatcacctgaatagtgaatattagacccaacaggtattttttcaaccctcactccccctcctcaggatttaattttaaatattatattactcaatggtaaatacagttctcccagttgataaagtacatctagatgtatacaacttacgtttagaaaatcatccattcattcgtatggaataacc

SEQ ID NO: 34811 - DNA, 750 bp, Homo sapiens
gaacttacactaaaactgctcataaatatacaggaagaaaggtgtttttctcaaattaataaaagtctagttagcacattcaatctgtgttttcacatgcattcttttacttcctcagtgtatgtgagaaaaaaggctataaggagaatcttgtagttaaattgtgataaagattctgatgttactaccaattatttcaatttattctgttaatagcttttatttagaactttaataaaggatggcattcctcattcttgcagcactggtacatcaggaaaccaagttacaaaaagccctctttgataagtacttgggttataaacacttatttttcactcagtagcatcctccttatgtttaatattctttcaacaaaggatgaaccatcctgaaattcagtgtcatatttaccacttggtatttactcagtagggtctatgtgtactacaatgtgctaggcactatgggagaaccaaggttagtgtcatatggtccttactctcaaggagtttacaatatagttagattaggcatttacatgagataaggaaggaattatgcagacagaactgtaagtattaaaaataaaaagatcgccgggcacagtggctcacacctataatcccagcactttgggaggctgaggcgggaggatcacctgaggtcaggagatcaagaccatcctggctaacatggtgaaatcccatctctactaaaaatacaaaaaaattagccgggcatggtggt

SEQ ID NO: 34812 - DNA, 663 bp, Homo sapiens
acgttgtatattttcatttttaagtcatgatttcacgatatgtgatattttatttaatgaaataatacataggaattgcctgattgataatgaaaactaaaaaataggtttatcatgcggattacatgcagacccttctcacaataactgctcatgttgcccatgttcttgactgcagtccacagcacatgctagcatagttcttcgttctttctgccagttccaaggcttcccctgtagccttggacttaggtcatcttgagtttgttcacttctgtatagtttgcctatattccaaattaagaagctgcccatcccatagtttatattctaactgtgtaaaatcttattttaaatctttaaatgaaaaaggttaggccaggcatggtgactcacacctgtaatcccagctctttgataggccgaggcaggtggatcacttgaggtcaggagttcaaaaccagcctggtcaacatggtgaaactccatttctactaaaaatacaaaaaattagctgggtgcctggtgggtgcctgtaatcccagctactcggtaggctatggcaggagaattgcttgaacctgagaggtggaggttgcagcgagccaaaatcgtgccactagactccagcccaagcgacagattgaaactccacctcaaaaa

SEQ ID NO: 34813 - DNA, 453 bp, Homo sapiens
actattgatacatgcaacaactggatgaatctgaggctttatgctgagtgaaagaagccagtttcaaatggttgcatactgtatggctccatttatgtgacattcttgaaaagacaaaaaattatagtgaatagagacaaggggttgagtgggagggtgtgacttcagaggaggtagcacaagaggcatctaagagcataacagtgatgggactgctcagtatcctaattgtggcagtggttacacagatctgcacatgtgcttagaacttacagaactgtatacaccccagaatatagccagttttactgtgtagtaatttaaggaataagattttaagaataattaggacttctagttaaacattatggaataaacatgtctgctccctcccaaaaatatcactagaatgacagaaatggaataaaaatagaaatataaaataaaaatacc

SEQ ID NO: 34814 - DNA, 342 bp, Homo sapiens
cacacgggcagctgtccataggctgatgtcagtctgggctggtagctaccccgttttggccaaatgctattcctttgccctctagggcaaatgttgtccgtggtaaagattctgagtcccctcaaagtgggaacgttgaaactgggcatgactagaggtctctgccccagttgttagaagttctttaggtcaactcagaataaggcagggagcatgggttagtttgggcatggttttagaacaggggtttccaatattttgccttccctgggccacactggaaggagaagaattgtcttgggccacacataaaatactaatgatagccgatgaacaaaaaca

SEQ ID NO: 34815 - DNA, 441 bp, Homo sapiens
gttagtattataacgttacgctcttttacctttgggaaggttcgttaaaattcatcttttctctccttgtttagggttagggaaagcatcaagaatgaaagtgtgggtcaggcatggtgacttgtgcctataatcccagcactttgcggggccaaggcaggaggattgcttgagctcaggagttggagacgagcctggacaacatatcaaaactttgtctccaccaaaaaaaaaaattagccaggtgtggcctggcacagtgactcatgcctgtaatcccagcactttggaaggccgaggtggacagatcacgaggtcaggagttcaagaccagcctggccaacgtggtgaaactttgtctctactaaaaatacaaaaattagctgggcgtggtggcacacgcctgtagtcccagctactctggaggcagaggcaggagaa

SEQ ID NO: 34816 - DNA, 290 bp, Homo sapiens
taacaatgtttgtcttcagtattttctgaatctgcctgtggtttccatccctcctacccctacagctgtcctcagtccctgacattaagaccattgtaatgttctcccaaccaggttccttgccttccatttttcccgtctaatagattccatgtacgtttgccagattaatcttctgaaaccacatctcttaaaccattctctgcctcaagaccccttaatgagtgcccattgcccgcttaataaagttaaaactctacagcatggtatttaaaagtcttcctgcttgg

SEQ ID NO: 34817 - DNA, 1174 bp, Homo sapiens
tgtaaaatattgttttaggcactgcaatacaatggcaaagaaatcagacatgatcctagctctcatggagcttacattctaatatgagaaacaaatattaagcaaactacacaattatttcatggcaattatggtaagtgctactgaagtatctgtgctattgaatcacatggagtacacgaagaatgagagtacataactaagggatcaaggggaaagatgtttagctgatttttaagggaaaaagacttaattggcaatgatgggagtgggaggggcatagttccaggatattataatacatgcaacaactgagcaaagtcttgttggtaggaagtaatatagtatagtatgtccaagaactgaaaggtcagcatgatggtacacagtgagcaacagggacagtggccttggttagggctagtgtggtatgcagggggaaaaaacatgcagggccatgtaaattgggttaataattttgctctttatcttaataattgcaagatgccattaaagggtcttaaatacccaccccaatgtaggaagcaggttagtactgcagaaagagtgttggtctggcaaccggacctaagtaaggattacagacccctgaggaaattactaacctcttgctataatttaatctgtgtaatggtggcaaggctgaagtttatcacaaggaaggctggaaagttttctttaaaatggtacgtggggaagaaggtagtagtaaccagatgcaaaatgagtgcaaacaatgtttagaaggaacagaaaagtaggcagaagagagcaagatggggaaagtcagctcactagggatactgaacttaaaggcagctggagctagttatcagtcataaaggaagcttggggtgggaagggatttattagcaagctccatcatcttcatctgtagctccacatctccttcgccccatcatttgtgacacaaataagggactttcctcaagcttatgtaatgttatgcaacacagtttcaagcactccaatcctggagatttgctcaaattaaaccctttctatttaaaaactctggagcagcgagtgaaagcaactcactactctgcaggacaagactctgtgtgtgtgtgtgtgtgtgtgtgtgtgtgtgtgtgtgtgtgtgtgatatctcataaggggggtatcctat

SEQ ID NO: 34818 - DNA, 576 bp, Homo sapiens
atgaatgaagagaaccaggagagtatgaatgtaatgaaaccaagggaacagtgagtttcaaggagagtgtaatcaggaccgttctgcatttctagaaaagatgtggggcaaggaaaggactgaaactggaagacgtgtttcttaggaaacggattagaatctttgcatgtccctttctgagttaatggtagttactactcttaataatatctatttttccaagatttacctctaattcttcctcttccttgaaacttttcctattagctttaatactcctagcacttttatttatatttgtatggctcctataatgtaaaagtttttccccttccctgtttaaagtgttatctgtgtttattgttgaaaaatcagaaaagtgcacagaatgtggtatttctaagacttaagattagagacttaatgctcttgatatttcttgcagagaagttttccagataggtataaatttacattcctttcagtagtgtttaagaatgtctagttagccatatcctcattaaagttgaatattaatattaaaaaccattttttatcagtttgctcaaaaaaaaa

SEQ ID NO: 34819 - DNA, 475 bp, Homo sapiens
cctgtaatgccagctactctggaggctgaggcaggagaatcgcttgaacctgggaggtggaggttgcactgagccgagatggcaccactgcactccagcctgggtgacagagcaagactccatctcaaaacagaaaaagtacacagtcaaactgagaatatgctaatactgtaacggtggtgtgaaaacaaattatgtatttatcataaaagttaagacaaaacttaacttgtagcaacaataatttaaattatacaaattataaaatgatataaattgtgtcatcaggaacacaatgtggggttgaaagtaaaagcatagcatttgagtaattgatctaattttagttgtattaatttaaaatagtctcataagtgtaagagactgtttaaggttcatggtaaccacaacgtttgcaaaaaacccttagtagatatgcaaaatataaaaagaaagtagatatgcaaaatataaa

SEQ ID NO: 34820 - DNA, 209 bp, Homo sapiens
tgttcttgcctttccatgagcgtagtaaaccaggcaaagcaaaacaaaaggatcccagactcacttatcttctgccttgaaaggtcgctctggattcatggacatatttaaaggccctcctgatttgtacatagatactagagccgatcatctccatccacctctgccgccagagcgcctcaaactccagtctctatttgaatttcctg

SEQ ID NO: 34821 - DNA, 452 bp, Homo sapiens
cacaggctgtgctgctcttcagcaggtgagaaaagggagaattttaaaccgccttttgttctcagatgcaatataaacacatgtgacatgggagagaaatgtgggattaatgattttctgtgaagtatatcctggtaacagctcaggcacttgagtcagaaagacctggaatgttggttccaccacttcctagctgtgatcttggatgaatgactgggctttgacaagcctgagattctgcatctttaaatggggatgattgtagctgctcctccagacggccattagaggattaaataaacgaatgcacataaggctgtttgcacggtgcctggcacatagtaagtgttcaacaaagatgaggtgttattatggacttttaggcaaagcctgtccagctaaattcctgggcctggcctcccttggctgttgcattaattaaggagatgacc

SEQ ID NO: 34822 - DNA, 218 bp, Homo sapiens
tcaggaagacaaactcctcagagtacgccgtggcagtcctcaccacagggcccagtgcctcactatagccagcgtcctttacctgtttatccacaccaacagaactatcagccttctcagtattctcccaaacagcagcagatccctcagtctgcttaccattcaccacctccttctcaatgtccttcacccttcagctctccacagcatcaagtgca

SEQ ID NO: 34823 - DNA, 261 bp, Homo sapiens
gcactattcagtctcatttccttttacagtcagtaacttatccctgtgcattgatccctcactccaggaaagtgctgagccacatttctgacagtgttgacctttgtctgaaatgctggacaaaatttcagggagtaaggtgattaactaaaaatggatttggagattatctatgggtttcaatgtcaagatcatctctgacactaaacaactgagaagttgttctgtaaaataccaaggcaattataggctcaatacatc

SEQ ID NO: 34824 - DNA, 417 bp, Homo sapiens
ttttattgggaaacagccatgctcattcatttacatgttatctatggcttaacaacagaactgaggagttgtggcagtctgcatggcccacaaagcctaaaatatctaatctcttgacctttacagaaaaagtttattgattcctgacatagaacatcattgacttctaaggtgggaggaatttcaaaatgaggaatcatagaatcagaaaagtgaggaacccccaaaagattaaggcagagaatttgtgagaaaacactacttcccagggaaaggagcaagggggaatgaagggagaatatagaccttccacagacctggcaatagcagccaggacatattgggaaatggatacatctgcttcttttaattcctctgtctctgtgggggatgcaaagccttttgcagagattgtag

SEQ ID NO: 34825 - DNA, 506 bp, Homo sapiens
tagtccttggaacctgtgaatctgctactttacttggtaaaaggggctctacagatatgattaagttaaggattttgagatgggaaggtcatcctggattatctgagtgggtgcagtgtaatcacaagggtcctttaaagatggaggcagactgtcagaggaattggcacaaaagcagaggtcacacacacacacggggggatagagagagagagagagagagaggaagatgttacactgctggctttaaagatggaggaagtggctattaagtcaagcaaggcatgcaacctcaaaagctccaaaaaacaaggaaatgaccttcagaaggaattcaaccttatattccttgctgacccattttagacttttgactatctgaactttaagttaataaagtgctgttgttttaagccaataaattggtggttatttgttacatcagcaataggaaactggtataatgatttttcaatgaaaatttagacaagattagaaaaaaaaaa

SEQ ID NO: 34826 - DNA, 291 bp, Homo sapiens
gcataacatttaggcatacatttaaccaaggagataaaagacctagacactgaaaactatgaaacattgaacaaattctaagatgatacaaataaatggaaagatatctggtgttcatagatcaatagaataaatattgccgaaatagctatactactcaaagtgatctacagattcaaggcaatgcctatcaaatttccagtgactttttttcacagatatagacaaaaaaaatcctaaaatttgaaagaaactacaaaagaccttaaagatctaaagcatacttgagca

SEQ ID NO: 34827 - DNA, 108 bp, Homo sapiens
aagggaatcagtgaaagaagttaaagggatctagctggatgcatcaagggtaaccaagcacacctgtgccatgcaaatcaagaggaaaagcatcaagattgagcactc

SEQ ID NO: 34828 - DNA, 383 bp, Homo sapiens
ttgtttctctatctatatatcactttggtctcttgacctgggtcactctatgagcactttgcattgtctttttggtgtccactgctgtcttcagctatctgcatgcctcatgtattattctatagaaataaattagtaactacatctttaacagacagcgatttgaatattcagtaaatctctttgcttttagccacaaagagagggagagtgttctcttgaacagctaccctgccattctgcacctccacttcctttatattagccaaccactttcagaagtggattttttgcattctcaaataaatatttcctacctttccaacgtcaatggtcattttctcaggtgaccatcattaacagcttgttttcctaggtactaa

SEQ ID NO: 34829 - DNA, 729 bp, Homo sapiens
tatagttcttatgaaaatactggcttgaaagcttcaacagggataacattttcaggtgaaggccaccattgaaagcctgaagatatttagcttctgggagcaatgcataccatctctttgctgaggacccttgaagaggttaagtgaccaacccaagatcacaagactgatgaaaccagtgcttgaactcaagcttctgattccgagtccaatcttctctttccactgcataaagatactcgagtctcttatcaccaccaacaccaagtgatggcttataaagatcatccttagggtctttccccctcaaacgtgctatcattcagtaactctaggatccttgttaaaaaaaaaaaaaaaacgggggttgcggagaagggattgaaatatctcctctccctgtcttcacctcctctgatgaaatctgattttattctgtgatatgtaagacctgaatgaaggtgactgaagtaattgggtacatggttagtggtggaatccggatgtgaacctgagtcatggtcttgccattgttccttgaagacaggaaatatttgtaaatatatttggaagcaactttaaaattgttgcatgtggttgggtctaacagaatcacttgaatgaagagaaaaacataactttttcctgtgaattttcagggaaatgcaattatttcctttcacttggtataaaagctcttcagaggaataaagcatgcatgagccaaca

SEQ ID NO: 34830 - DNA, 411 bp, Homo sapiens
tatgcaaggtgagatgatctatgttggtgggtgactggatatgttttataagattggagcttgtgggtccaaagaatcactgtgatgcgtttcatgtgacaattgttttatagtttacctgcactatctcactgcctcctcactgcacctacaagaattagctgatactatcctctttcacagctgaggacccttgaagaggttaagtgaccaacccaagatcacaagactgatgaaaccagtgcttgaactcaagcttctgattccgagtccaatcttctctttccactgcataaagatactcgagtctcttatcaccaccaacaccaagtgatggcttataaagatcatccttagggtctttccccctcaaacgtgctatcattcagtaactctaggatccttgttaaa

SEQ ID NO: 34831 - DNA, 1463 bp, Homo sapiens
gggggctggagttggcagagctctgcatgtcccggcatgtctgagcaggaggaattccgggcggccaaagggttttatgtagattgcttttggacactcgcccaggagtcaggagttgatttttatctcacttcctggtaaccttgaacttaccaggcagggatgagatgacgtaaacttcctcagatgatgtaagttcagccacatcttgctgcccattagggagagaggacgacccccacagtgaaagtaattgagtgaaatgcacgttctggaaatcagtttctattttggcctggaggaatgtggctatactgcttccctgagtgtgacacagttggaatctaatcttgttggtttcccaacatctaggtttttgtttgtttgtttgtttttatgatagggtcttgttctgttgaccaggctggagtacagtagtgtgatcatggatcactgcagcctctacctcctgggctcaagtgatcctcccatctcagcctcctgagtagctgggactacaggcatgcaccaccacacctggctaatttttaaattttttatacagacagggtttcaccatgttgcccaggctggtctcgaactcctggactcaaactgatcctcctttctcggcctcccaaagtgctgggattacaggcatgagccactgcacccagcccagttctttcttaaaacagctgagagttttgttttcttcagcgttcaccttccttgtctccagttccgatgctggcagtggttcctacctctgttgggtttctagatagtttgggaacggggttgatgggtttctgtgaaacacattttccaagtcttgggctttctctggaggggaaggtggatgctggcgggtgacttgcagtgggcgcctggcagtgggtgtggactgtaactgacaggtggaaatgagtagggacactattgttccctccatgccagctttttttttgctggaaatgccccctccacacccctggtagctctgtgtcctgagaaatccagagtgtgggagacatcactgcatctgtccccccagcttctgtgaagggaagctgtggcctcttttgaatgtggggaacaactgaagactcaggggtcacccagaggtctggtggaaagcaacttcaggtttcatcttgctctattcctcaaaggtctggtctgtgggcctctgaggagaaaacaggtctagccaagacagggacaaaatggggaagggggtgtgccaggcctgaactgagctaagcacctgccccgggctccacacttccatctttcttttgtcttcatttcacctctgtgtttaaagcactgtgtgacatagctccttagagatataacctattgtctgctcattgtcacgtgtgtgtgtgtcatctttgtattcttgcagtggtttcacatttccttacccagtcaagccagtatcccatccttcctca

SEQ ID NO: 34832 - DNA, 652 bp, Homo sapiens
tgatgtgagacttctgtccgggagctgactcggaatttgccatctaatatgttggaaaaggttctctgggcagaggtatccaaagtcactttgcctgtcaccctttgaggtcccagttgttgcctatatcatgtgaccagtgtgtggcttctcttgaattaagagctgcatgtctggactgcctgggattttacagatgtcatctcgttaactctccctggagcttgtgacacccaggagatggcagtttatagaagccctggcaccttcttgaatgatgcttggtttggtttctatgcactgggaattcctcacaaggaaagatttgtcacatcttaaggaaggaaaaaaaggcaaatttgggagtcccatggataccctattattttagattccaggacaaattgtcgaataagcacgtttcataaaaacaatcctccgcagcatcccgtgacagcagctggtccctcgccacaggataattatgtctccttgtgcacacaaaagtctccgagggcatattgttgtggctggagtttctgataatttccaaattgaacaacctcagtcctaatgagtcagaggcttgtgcaatattttcaaacctcaggaacatctttttcattagttgtgcaataaagatggtaggcct

SEQ ID NO: 34833 - DNA, 612 bp, Homo sapiens
ttcttttttctctctgtggagtgggagacttaagtggcttcttaactggtgtgtcgtctgatcaagtggtccaggtaacaggtggatgccaatgtctggcccaggcatcaccccttactggcactggtcattacagaagacactctaccagagctgaaaggacctcttgtcactaggcagctgtggagtccgctctacttgacctagtaaaatctgcctggagactgttagagtcaccccactacctgaagttacctccaggctgacctcttttttttcccaggtggagtcctggcatcttagatattttaataaggatttgcttgttgacatgttctttattcactaaggtgtcagcatattactgtcttagaactgagggttcttcatcttttttggatcaggacctccctctaagaatctgatgactgctctggtccctctcccaataaaaacttccatactcacctgttaaaaaaaaaaaaaactttaaacaaattaacagagttttattcagcaaagaatgattcataaatcgggaaggctgcaaccagaataggttcagagagactccacggtgtgccacgtggttggagaggatttaggatttat

SEQ ID NO: 34834 - DNA, 333 bp, Homo sapiens
gctcttactacacacattgttccataagctgttttttccccccatcacaatgaactgttgacatctttgcaatatcaacaaacggtgatctacattagcattttaaacacctatagaatcttttattgcatcattgtagtataatttaattagccaatttgctattttggaacattttaattatttgcaaatttcactataggaaaaatttttatgaatattttcactataggaaaaatatttcatgaatatattttatgtataattgttatctgctcctctaattatttttataatgtgaattcctaaaagtaaaattgtaaaatgcatgca

SEQ ID NO: 34835 - DNA, 473 bp, Homo sapiens
aacggcatcttatcattgcaagcttttattagatatttatcaatggtttacatactttagctcattacattctcccatcattcctatgaggtgggcacttattgctcccattttacagatgagcaaactgaagtttaggcaagggcaatagcatgctccaagtaacatagctggtgtgggtgggtccaggatttaaactcagtcatctggatggcagcacccaaacccttacccacgacactcagtggcctcacaaggcacctgggtggtggcatgactcaatgaacctgactctttccggaagctcattcctgcaccagcagtggcactatgggcatttactatcttaccttccataaaccacacaacaactctcagtgtagctcctgctcccattttataaaggagacacttgagacctggattgaagaaagggatttccccaagtcacaggcaggcagctaccagaggct

SEQ ID NO: 34836 - DNA, 393 bp, Homo sapiens
atttaggctggagtacagtggcgtgatcatagttcactgcagcctcaaattcctgggctcaagtaatcctcctacctcagcctaccaagtagctgggactaaagatacatgcccccatgcccggctaatttatttttatttgtttgtagagatggggtctcactgttgcccaggctggtctccaattcctgggctcaagcagtcctcctgcctgactctccaagtgctgagatttgtgtccagccacaaagggacattttcatagggcttcctcaggacatgacaatgggcttcctatagtgagcaattcaagagagcaaggagaaacccacagtgtcttttgtgacctagtcttggaagtcaaccaccagcaattctgattctattcattaa

SEQ ID NO: 34837 - DNA, 424 bp, Homo sapiens
ttagcaaatgcttaagtgtagatttagaaagctaaagctatacagtggctgccatctatggtttggacttgtgattaactacattgaaatgctaactctgtaccctagagtatgaattcctgattagagtccttcaggtgctaactaatttatgtatttcatgtttgataatattattacttgagctttgtgggagagcagtcttttcctcccctgagatatagctagaagttacctcctttgtgaagccttcctagatactccaagcagacacggtccttcctttctcccttgcccagcactctgaggttgactctgtggagcactgatccctctgtgttataattgtctatttacacgtcagctaccacctataacacactgagttcctcaacagcagggacactgtccattctttgatccc

SEQ ID NO: 34838 - DNA, 395 bp, Homo sapiens
agaaaaggctaattatcctggtgctctgtctaaaggttcagagcaattgaggagcctactgcttaaatagctttctgtcccttccttaccaccctagagtttagtcctgcccaaaatcagaagaacaaatagtgtgagaagaaaattccgcttgactggaatagtaggccagtttttttatttgtttgtgggtttcttttttttcttttgttaccttgcagttgatttcctcattttcacagtacttcagctatactaatattaaaggatttgctaagactatttgaagccaggcatggtggctcatgcctgttatcccaacactttgggagggcaaggtgggaggattgcttgaggccaggagtttgaaaccagcctggataacataataagac

SEQ ID NO: 34839 - DNA, 314 bp, Homo sapiens
catagcaattcctgtaatttgtaataatccatcctgttattgttgctttttgaagtctctctctcttcatactagattataaactccatgagggcagagaccatctctgccttttttaccactattagctcagtatccagtagaatgtcttagatgtaattaggcaaataaagtttttatttgtttgtttggcttttattacaaatgttacatatgcctttggttttaatgaaacatcatctagattaatagctttaaacaggcatgaccttgcttttgtccaagctcaaatgtctgtgtgcatgtctagacat

SEQ ID NO: 34840 - DNA, 686 bp, Homo sapiens
ctgtggccccccaggcagaacatgacggagatgcgcaggaatggcaaagtacgaggggaaaacagacagtgggatatggtgaaaccgtgacggttggtgaatgagactttgatccaatgacattaaagcagatgagccacccaaaactaatatacagtgtctactgcagaagacgtgtgctcttcaccagtctgtggaccaggaaacgagccgctggggatctcagtcgcaagggtgctcaggtggccttggtgcagacactcacagctctcagactgcagagtgtgccggtcctcggagaaggggtgtccttcagggcagtgcttctctggctgatgccacagactggctagtggatggccagactcatcacactgacacccctgttcacctaaaccagatacaaccccttcctgatgcatctgttggtgccaaatcttttttttttttttgtagctttttattattaaaacagtcactgcaattatcaggagtcgtctaatgtacagtgactgctattcctattgctggtgagtgagaatattaataccatctgtagtagtgagacagcaaatatttcccgcctcacaggtgccctggtattttagtgcagaaaatattcttacagttccctggaaagcacgctttataaactcttacacattttcaaaataaagattttttaa

SEQ ID NO: 34841 - DNA, 599 bp, Homo sapiens
gtccgggcaggatgaaacagtagaaactggtgagtgaatgaatgtgaaggctgaggagcgactgcaatttgttaatgggattatgaggcagtataaagtggttaattacggtggcggaggtaagcaggagtaaaatgatggcttttaactcctctcaaggacaccgaaaattattttaataaacactggaaggctgggaataaatataattcacaccattcttactttcttggtttagagatagcttatctacatccttaaattaatggctgtagctaccctctgcatggctccaaaaaaaaaacaaaaaacaaaaaacaaaaccaaagccggctgcgagtctgcacgagaaaatcgggttgcaccaggccccagccgcccgccgattcgcttagctgtcggaggctaaataaacagctcccgaagcagcgtttggcacagcgcagggtcggaacgtggacactaatttccgcccacgctccccgcgtcctggcgggatcaccacagacacgacgtccattgctggggtcctcggcgatgcccgtgtgcgcagccccgcgagtctcaggtcagaagaccactaatttcgcggccgcgtt

SEQ ID NO: 34842 - DNA, 798 bp, Homo sapiens
tttttttgagtcgagggtctcactctgttgcccaggctggagtgcagtggcttgatcatggctcaatgcaaccttgaactcctgagcccaagcaatcctcctgcctctgcctctgcctcctgagtagctgggactataggtcaccaggccagggtaatagagatgggggtatcgctgtgttgcccaagctggtctcacctcaagtgatcctcctgccttggcgtcgaagaaacttttaacgtttttatgtagtgaacttagtggctgtgttgaatacttatacctagttgtcatatttattctaaaaattcaaatcattcccttgccagagtctgttttcaatttgcattccctaaggaacactttctttgattcagttatcgaactgttgccgttattacatcagatgggagaatgattgtgggaacactgaaaggttttgaccagaccattaatttgattttggatgaaagccatgaacgagtattcagctcttcacagggggtagaacaagtggtactaggattatacattgtaagaggtgacaacgttgcagtcattggagaaatcgatgaagaaacagattctgcgcttgatttggggaatattcgagcagaacctttaaattctgtagcacactgaggaaaaactacatacttggacatctgtaaatctttgtacagaaactgattattctgaggatgatatatggagtttttatgaatgtgtcactggattttgactccttattgattcattgtaatatgtaaattaaaatatttctacattttattgaaa

SEQ ID NO: 34843 - DNA, 584 bp, Homo sapiens
tatggtttggaagtttgagggttttttactgtgtctatccttgtgtgtctgtttcctttaaagattcatgatacaatcactgtgtacaatgtgtcctttaatattggttcctgtaataatgtgccttcaaattatttcttgagttttgtgacttaaatatgcagttcactgactcacgccaatgttgtttgctttttaccttaattctttttactgtgctctctcagttttattttttggaagaatggtactcagtgctttgatttgattagtaagatttttgaaacacatgtaatttatttcagaaatgtgattgttttaactctgacttttttagtgcagtcattggagaaatcgatgaagaaacagattctgcgcttgatttggggaatattcgagcagaacctttaaattctgtagcacactgaggaaaaactacatacttggacatctgtaaatctttgtacagaaactgattattctgaggatgatatatggagtttttatgaatgtgtcactggattttgactccttattgattcattgtaatatgtaaattaaaatatttctacattttattgaaa

SEQ ID NO: 34844 - DNA, 1337 bp, Homo sapiens
gaaaaattagcctggtgtggtggtgcatgcctgtaatcccagctacttgggaggctgaggcagaagaatttcttgaacctggtagatggaggttgcagtgagccaaggttgcgcctttgcactccagcctgggcaaaaagagtgaaactccatcttgaaaaaaaaaagaaaagtggctgatgtgacagaggaactgaattttaaattttatttaattgtaattaattttaatagttacatgtggccagtattagtatagttatagaggctagaagaatgccaaatcagttttctagtgagtactacactgaatcaaaatatagttggaaagaagcaaaagatacattagcaattttaagctagaacatttaacaaattctaggggactaactgtcccctggaataacttaaaaagtgcaggaataatttactcatttaagttgtttatgttagcatcacctttagatgaataaataatttgatctgtaatcaaaaatcaagagtttataaaatattttagagatgacttttaggtggagttacaaggtgagctgtaagtaatgagagagagacagagcagatagggcccaggtctctggatcagaacaacactgtttatattggagctgtgcatagtaattgattttaaggtttctcctacttaaaacaatttttttttcttgaacttcagtgaaaaaagtcttgtgctagagccagcttctactggcccatgaaagcatattgttatattttaaggaattttacaagctggttaattgatgtcttgttagtagcttgaaattggccgtggtgggagtgtttgcacaatggatattagtaaatgcagcaaatcagtctcccgctttttttccagagagctggtttttaaaaatgtatcagcatttccctgcttaccatagggattttaaatgatactgaatattatcatttaaaatttaagaatatttaagagtggaattgaggcctttagtttgagaaaacttaattcattctgccagagtttcatatttttcatttattagatgatttaagactttatatactttaaagcaaaatttggcaaatcccttattactagtattcgtctttagaattaaggcaggcagatcacttgaggtcaggagtttgagaccacactgaccaacatggtgaaacccatctctactaaaatacaaaaattagcaggcgtggtgggacgtgcctgtattccaacctgctagggttacaggatgggcgccctgctggcagatttatgaactttattatcacttaggttgctaattactatcttcctatggttggacacggtttgtgga

SEQ ID NO: 34845 - DNA, 2733 bp, Homo sapiens
ccttcctgcatcggtcctttctcggtgctgcagcagccttttacttactaatttcaccctgaagaaaggtagaccatcctggcgtggcagaagcgtggacattcgttttctaagggatggtcacacacctttgcctatttgcatttagtttctttaaaaagtaaaaacacctccattttggaacacttttagagacaaaagcagaacatacgaaagtgtatttcactgctgagttcttaagaggcgtacaccgtgtggttataacgtgcgcaactctgtcccgggcaactgaacttatttttagcgttattttcggcttctgctgcagaaaactagggattcaactacccgcacctacgtttcacacaacagcactcgtctctctccttcactcctaataaaaacaccttacttcgtttattcctgcctgctctacctcgtctcaacattttctcttgttaacttccaccacactgccttttactcggattggaaacccactctcccccaattctgtctcatacccccaacttcaggaagcgtcttccttttttccgcctctcgttcgcttttgtcttacgaggcttccggaacacggcccagaattacagagaaaacacactgcgcacgcgcactctctcgtcaccgctgtgcggcttctgtttggttggccagttcgtcccaatttccgactcacagggctgcggagcagcaactctcacgatatttgctgcgacccgcaggcgctatccgctgccgggttctggcgcgccctttcagttctgcttgctgtccgcaccgctgcgttacccggaaccgccgggccgaacagcatgacgtccgctttggagaactacatcaaccgaactgttgccgttattacatcagatgggagaatgattgtgggaacactgaaaggttttgaccagaccattaatttgattttggatgaaagccatgaacgagtattcagctcttcacagggggtagaacaagtggtactaggattatacattgtaagaggtgacaacgttgcagtcattggagaaatcgatgaagaaacagattctgcgcttgatttggggaatattcgagcagaacctttaaattctgtagcacactgaggaaaaactacatacttggacatctgtaaatctttgtacagaaactgattattctgaggatgatatatggagtttttatgaatgtgtcactggattttgactccttattgattcattgtaatatgtaaattaaaatatttctacattttattgaaaaaaaaaccttttttttgcctaaatataagtttggtagcttggtttcttttttttattaaatagtgtgaaaatataatgggcattttgaaaacttttagaaaaaagtagtactttttgatactttagtatttatggaaactagtggaaaagagaaattagtgtgctatataaatcaggcattcaagtaacagtaatacaggatatatgtgttttctttccctgatgtttaggaaaatcacaggagggtaaatctttgctggagttatctgaatcattggcatttatccgattccactggtggtagtttgctagtgcttctaaaagttgctccctagcactgagaggtgtgggtaggtaaaaatgtgtttgcttgagaaaagcaaaaatgctaacaaggttttgatagattggcccaaaattctaacttgaatattaagaatgactaggaatggtagaattgacagagatgattagtaaagtctcttgatgcccaattggttaggtatgaaagtaatatgaacacattaatgttgaattttacagacagtatatttgaaaaaaattgattccatgtagtcttcaatttttaatttttaagaattggagaatttctaatgttaaagttagtttataaatgtgagtaaataaactctaagttgtattgaagtagtgctagctattattgtcagcaattttccatgattcattatccataaacctgatttcagaagacgtcaactcagttttttaaataattgaaagaaacaatgtaagtagtgtttagatattcaggctagtccataaaatttctgatcaactcatgtataggcccaagtgtgtgtctttgtgatgagaagaacatagaaaaatatttacatccttgtaattgaaacaaatttaaatagtttatttgttttgtttttatgaaagtgcttaaaaatagtagttggcaagctttttctatgaagatccagatagtcttttaggctttgaaggccatgtggtctgtcacagctactcacctctgctattgtggcctacaaataaccatagataatacataaatgaatagtggctgtcttccagtaaaacttcatttataaaaatggaggtgggggttggattgggcttgaaggcatagttgctgacccttggcttaatacaagttcaataagaaaaaatgaacaatttgtataaattctggaatagatccttatagagagtttagaggtgggtttcattcatattttaaaatattttaaacttcatacttattaaacataatagctttttgggggaggaaaatatcttcactcaaatcagccttataaggggagaagcactattctctagaattatttggttgatgttaagggctgtctctgggagaattagagaagttagctagtattggctattcataagtacttgacttgtagtataatgttttata

SEQ ID NO: 34846 - DNA, 2759 bp, Homo sapiens
ccttcctgcatcggtcctttctcggtgctgcagcagccttttacttactaatttcaccctgaagaaaggtagaccatcctggcgtggcagaagcgtggacattcgttttctaagggatggtcacacacctttgcctatttgcatttagtttctttaaaaagtaaaaacacctccattttggaacacttttagagacaaaagcagaacatacgaaagtgtatttcactgctgagttcttaagaggcgtacaccgtgtggttataacgtgcgcaactctgtcccgggcaactgaacttatttttagcgttattttcggcttctgctgcagaaaactagggattcaactacccgcacctacgtttcacacaacagcactcgtctctctccttcactcctaataaaaacaccttacttcgtttattcctgcctgctctacctcgtctcaacattttctcttgttaacttccaccacactgccttttactcggattggaaacccactctcccccaattctgtctcatacccccaacttcaggaagcgtcttccttttttccgcctctcgttcgcttttgtcttacgaggcttccggaacacggcccagaattacagagaaaacacactgcgcacgcgcactctctcgtcaccgctgtgcggcttctgtttggttggccagttcgtcccaatttccgactcacagggctgcggagcagcaactctcacgatatttgctgcgacccgcaggcgctatccgctgccgggttctggcgcgccctttcagttctgcttgctgtccgcaccgctgcgttacccggaaccgccgggccgaacagcatgacgtccgctttggagaactacatcaaccgtatcctcaagctggccgccgcgggcgaactgttgccgttattacatcagatgggagaatgattgtgggaacactgaaaggttttgaccagaccattaatttgattttggatgaaagccatgaacgagtattcagctcttcacagggggtagaacaagtggtactaggattatacattgtaagaggtgacaacgttgcagtcattggagaaatcgatgaagaaacagattctgcgcttgatttggggaatattcgagcagaacctttaaattctgtagcacactgaggaaaaactacatacttggacatctgtaaatctttgtacagaaactgattattctgaggatgatatatggagtttttatgaatgtgtcactggattttgactccttattgattcattgtaatatgtaaattaaaatatttctacattttattgaaaaaaaaaccttttttttgcctaaatataagtttggtagcttggtttcttttttttattaaatagtgtgaaaatataatgggcattttgaaaacttttagaaaaaagtagtactttttgatactttagtatttatggaaactagtggaaaagagaaattagtgtgctatataaatcaggcattcaagtaacagtaatacaggatatatgtgttttctttccctgatgtttaggaaaatcacaggagggtaaatctttgctggagttatctgaatcattggcatttatccgattccactggtggtagtttgctagtgcttctaaaagttgctccctagcactgagaggtgtgggtaggtaaaaatgtgtttgcttgagaaaagcaaaaatgctaacaaggttttgatagattggcccaaaattctaacttgaatattaagaatgactaggaatggtagaattgacagagatgattagtaaagtctcttgatgcccaattggttaggtatgaaagtaatatgaacacattaatgttgaattttacagacagtatatttgaaaaaaattgattccatgtagtcttcaatttttaatttttaagaattggagaatttctaatgttaaagttagtttataaatgtgagtaaataaactctaagttgtattgaagtagtgctagctattattgtcagcaattttccatgattcattatccataaacctgatttcagaagacgtcaactcagttttttaaataattgaaagaaacaatgtaagtagtgtttagatattcaggctagtccataaaatttctgatcaactcatgtataggcccaagtgtgtgtctttgtgatgagaagaacatagaaaaatatttacatccttgtaattgaaacaaatttaaatagtttatttgttttgtttttatgaaagtgcttaaaaatagtagttggcaagctttttctatgaagatccagatagtcttttaggctttgaaggccatgtggtctgtcacagctactcacctctgctattgtggcctacaaataaccatagataatacataaatgaatagtggctgtcttccagtaaaacttcatttataaaaatggaggtgggggttggattgggcttgaaggcatagttgctgacccttggcttaatacaagttcaataagaaaaaatgaacaatttgtataaattctggaatagatccttatagagagtttagaggtgggtttcattcatattttaaaatattttaaacttcatacttattaaacataatagctttttgggggaggaaaatatcttcactcaaatcagccttataaggggagaagcactattctctagaattatttggttgatgttaagggctgtctctgggagaattagagaagttagctagtattggctattcataagtacttgacttgtagtataatgttttata

SEQ ID NO: 34847 - DNA, 2251 bp, Homo sapiens
tttttttgagtcgagggtctcactctgttgcccaggctggagtgcagtggcttgatcatggctcaatgcaaccttgaactcctgagcccaagcaatcctcctgcctctgcctctgcctcctgagtagctgggactataggtcaccaggccagggtaatagagatgggggtatcgctgtgttgcccaagctggtctcacctcaagtgatcctcctgccttggcgtcgaagaaacttttaacgtttttatgtagtgaacttagtggctgtgttgaatacttatacctagttgtcatatttattctaaaaattcaaatcattcccttgccagagtctgttttcaatttgcattccctaaggaacactttctttgattcagttatcgaactgttgccgttattacatcagatgggagaatgattgtgggaacactgaaaggttttgaccagaccattaatttgattttggatgaaagccatgaacgagtattcagctcttcacagggggtagaacaagtggtactaggattatacattgtaagaggtgacaacgttgcagtcattggagaaatcgatgaagaaacagattctgcgcttgatttggggaatattcgagcagaacctttaaattctgtagcacactgaggaaaaactacatacttggacatctgtaaatctttgtacagaaactgattattctgaggatgatatatggagtttttatgaatgtgtcactggattttgactccttattgattcattgtaatatgtaaattaaaatatttctacattttattgaaaaaaaaaccttttttttgcctaaatataagtttggtagcttggtttcttttttttattaaatagtgtgaaaatataatgggcattttgaaaacttttagaaaaaagtagtactttttgatactttagtatttatggaaactagtggaaaagagaaattagtgtgctatataaatcaggcattcaagtaacagtaatacaggatatatgtgttttctttccctgatgtttaggaaaatcacaggagggtaaatctttgctggagttatctgaatcattggcatttatccgattccactggtggtagtttgctagtgcttctaaaagttgctccctagcactgagaggtgtgggtaggtaaaaatgtgtttgcttgagaaaagcaaaaatgctaacaaggttttgatagattggcccaaaattctaacttgaatattaagaatgactaggaatggtagaattgacagagatgattagtaaagtctcttgatgcccaattggttaggtatgaaagtaatatgaacacattaatgttgaattttacagacagtatatttgaaaaaaattgattccatgtagtcttcaatttttaatttttaagaattggagaatttctaatgttaaagttagtttataaatgtgagtaaataaactctaagttgtattgaagtagtgctagctattattgtcagcaattttccatgattcattatccataaacctgatttcagaagacgtcaactcagttttttaaataattgaaagaaacaatgtaagtagtgtttagatattcaggctagtccataaaatttctgatcaactcatgtataggcccaagtgtgtgtctttgtgatgagaagaacatagaaaaatatttacatccttgtaattgaaacaaatttaaatagtttatttgttttgtttttatgaaagtgcttaaaaatagtagttggcaagctttttctatgaagatccagatagtcttttaggctttgaaggccatgtggtctgtcacagctactcacctctgctattgtggcctacaaataaccatagataatacataaatgaatagtggctgtcttccagtaaaacttcatttataaaaatggaggtgggggttggattgggcttgaaggcatagttgctgacccttggcttaatacaagttcaataagaaaaaatgaacaatttgtataaattctggaatagatccttatagagagtttagaggtgggtttcattcatattttaaaatattttaaacttcatacttattaaacataatagctttttgggggaggaaaatatcttcactcaaatcagccttataaggggagaagcactattctctagaattatttggttgatgttaagggctgtctctgggagaattagagaagttagctagtattggctattcataagtacttgacttgtagtataatgttttata

SEQ ID NO: 34848 - DNA, 1959 bp, Homo sapiens
gcggccgcctactactactactactgctcgaattcaagcttctaacgatgtacggggacatgacgtccgctttggagaactacatcaaccgaactgttgccgttattacatcagatgggagaatgattgtgggaacactgaaaggttttgaccagaccattaatttgattttggatgaaagccatgaacgagtattcagctcttcacagggggtagaacaagtggtactaggattatacattgtaagaggtgacaacgttgcagtcattggagaaatcgatgaagaaacagattctgcgcttgatttggggaatattcgagcagaacctttaaattctgtagcacactgaggaaaaactacatacttggacatctgtaaatctttgtacagaaactgattattctgaggatgatatatggagtttttatgaatgtgtcactggattttgactccttattgattcattgtaatatgtaaattaaaatatttctacattttattgaaaaaaaaaccttttttttgcctaaatataagtttggtagcttggtttcttttttttattaaatagtgtgaaaatataatgggcattttgaaaacttttagaaaaaagtagtactttttgatactttagtatttatggaaactagtggaaaagagaaattagtgtgctatataaatcaggcattcaagtaacagtaatacaggatatatgtgttttctttccctgatgtttaggaaaatcacaggagggtaaatctttgctggagttatctgaatcattggcatttatccgattccactggtggtagtttgctagtgcttctaaaagttgctccctagcactgagaggtgtgggtaggtaaaaatgtgtttgcttgagaaaagcaaaaatgctaacaaggttttgatagattggcccaaaattctaacttgaatattaagaatgactaggaatggtagaattgacagagatgattagtaaagtctcttgatgcccaattggttaggtatgaaagtaatatgaacacattaatgttgaattttacagacagtatatttgaaaaaaattgattccatgtagtcttcaatttttaatttttaagaattggagaatttctaatgttaaagttagtttataaatgtgagtaaataaactctaagttgtattgaagtagtgctagctattattgtcagcaattttccatgattcattatccataaacctgatttcagaagacgtcaactcagttttttaaataattgaaagaaacaatgtaagtagtgtttagatattcaggctagtccataaaatttctgatcaactcatgtataggcccaagtgtgtgtctttgtgatgagaagaacatagaaaaatatttacatccttgtaattgaaacaaatttaaatagtttatttgttttgtttttatgaaagtgcttaaaaatagtagttggcaagctttttctatgaagatccagatagtcttttaggctttgaaggccatgtggtctgtcacagctactcacctctgctattgtggcctacaaataaccatagataatacataaatgaatagtggctgtcttccagtaaaacttcatttataaaaatggaggtgggggttggattgggcttgaaggcatagttgctgacccttggcttaatacaagttcaataagaaaaaatgaacaatttgtataaattctggaatagatccttatagagagtttagaggtgggtttcattcatattttaaaatattttaaacttcatacttattaaacataatagctttttgggggaggaaaatatcttcactcaaatcagccttataaggggagaagcactattctctagaattatttggttgatgttaagggctgtctctgggagaattagagaagttagctagtattggctattcataagtacttgacttgtagtataatgttttata

SEQ ID NO: 34849 - DNA, 2197 bp, Homo sapiens
tttttttgagtcgagggtctcactctgttgcccaggctggagtgcagtggcttgatcatggctcaatgcaaccttgaactcctgagcccaagcaatcctcctgcctctgcctctgcctcctgagtagctgggactataggtcaccaggccagggtaatagagatgggggtatcgctgtgttgcccaagctggtctcacctcaagtgatcctcctgccttggcgtcgaagaaacttttaacgtttttatgtagtgaacttagtggctgtgttgaatacttatacctagttgtcatatttattctgaacactttctttgattcagttatcgaactgttgccgttattacatcagatgggagaatgattgtgggaacactgaaaggttttgaccagaccattaatttgattttggatgaaagccatgaacgagtattcagctcttcacagggggtagaacaagtggtactaggattatacattgtaagaggtgacaacgttgcagtcattggagaaatcgatgaagaaacagattctgcgcttgatttggggaatattcgagcagaacctttaaattctgtagcacactgaggaaaaactacatacttggacatctgtaaatctttgtacagaaactgattattctgaggatgatatatggagtttttatgaatgtgtcactggattttgactccttattgattcattgtaatatgtaaattaaaatatttctacattttattgaaaaaaaaaccttttttttgcctaaatataagtttggtagcttggtttcttttttttattaaatagtgtgaaaatataatgggcattttgaaaacttttagaaaaaagtagtactttttgatactttagtatttatggaaactagtggaaaagagaaattagtgtgctatataaatcaggcattcaagtaacagtaatacaggatatatgtgttttctttccctgatgtttaggaaaatcacaggagggtaaatctttgctggagttatctgaatcattggcatttatccgattccactggtggtagtttgctagtgcttctaaaagttgctccctagcactgagaggtgtgggtaggtaaaaatgtgtttgcttgagaaaagcaaaaatgctaacaaggttttgatagattggcccaaaattctaacttgaatattaagaatgactaggaatggtagaattgacagagatgattagtaaagtctcttgatgcccaattggttaggtatgaaagtaatatgaacacattaatgttgaattttacagacagtatatttgaaaaaaattgattccatgtagtcttcaatttttaatttttaagaattggagaatttctaatgttaaagttagtttataaatgtgagtaaataaactctaagttgtattgaagtagtgctagctattattgtcagcaattttccatgattcattatccataaacctgatttcagaagacgtcaactcagttttttaaataattgaaagaaacaatgtaagtagtgtttagatattcaggctagtccataaaatttctgatcaactcatgtataggcccaagtgtgtgtctttgtgatgagaagaacatagaaaaatatttacatccttgtaattgaaacaaatttaaatagtttatttgttttgtttttatgaaagtgcttaaaaatagtagttggcaagctttttctatgaagatccagatagtcttttaggctttgaaggccatgtggtctgtcacagctactcacctctgctattgtggcctacaaataaccatagataatacataaatgaatagtggctgtcttccagtaaaacttcatttataaaaatggaggtgggggttggattgggcttgaaggcatagttgctgacccttggcttaatacaagttcaataagaaaaaatgaacaatttgtataaattctggaatagatccttatagagagtttagaggtgggtttcattcatattttaaaatattttaaacttcatacttattaaacataatagctttttgggggaggaaaatatcttcactcaaatcagccttataaggggagaagcactattctctagaattatttggttgatgttaagggctgtctctgggagaattagagaagttagctagtattggctattcataagtacttgacttgtagtataatgttttata

SEQ ID NO: 34850 - DNA, 3025 bp, Homo sapiens
gaaaaattagcctggtgtggtggtgcatgcctgtaatcccagctacttgggaggctgaggcagaagaatttcttgaacctggtagatggaggttgcagtgagccaaggttgcgcctttgcactccagcctgggcaaaaagagtgaaactccatcttgaaaaaaaaaagaaaagtggctgatgtgacagaggaactgaattttaaattttatttaattgtaattaattttaatagttacatgtggccagtattagtatagttatagaggctagaagaatgccaaatcagttttctagtgagtactacactgaatcaaaatatagttggaaagaagcaaaagatacattagcaattttaagctagaacatttaacaaattctaggggactaactgtcccctggaataacttaaaaagtgcaggaataatttactcatttaagttgtttatgttagcatcacctttagatgaataaataatttgatctgtaatcaaaaatcaagagtttataaaatattttagagatgacttttaggtggagttacaaggtgagctgtaagtaatgagagagagacagagcagatagggcccaggtctctggatcagaacaacactgtttatattggagctgtgcatagtaattgattttaaggtttctcctacttaaaacaatttttttttcttgaacttcagtgaaaaaagtcttgtgctagagccagcttctactggcccatgaaagcatattgttatattttaaggaattttacaagctggttaattgatgtcttgttagtagcttgaaattggccgtggtgggagtgtttgcacaatggatattagtaaatgcagcaaatcagtctcccgctttttttccagagagctggtttttaaaaatgtatcagcatttccctgcttaccatagggattttaaatgatactgaatattatcatttaaaatttaagaatatttaagagtggaattgaggcctttagtttgagaaaacttaattcattctgccagagtttcatatttttcatttattagatgatttaagactttatatactttaaagcaaaatttggcaaatcccttattactagtattcgtctttagaatttggccgggcacagtggctcacacctgtagtcccagcactttgggaggctgaggctggcgaattaccagaggtcagaggttcgagacctgcctagccaacgtggtgaaaccctgtctctactaaaaatacaaaaattagccgggtgtggtggcatgcgcctgtaatcccagctactcgggaggctgaagcatgagaatcgcttgaacctgtgcagtcattggagaaatcgatgaagaaacagattctgcgcttgatttggggaatattcgagcagaacctttaaattctgtagcacactgaggaaaaactacatacttggacatctgtaaatctttgtacagaaactgattattctgaggatgatatatggagtttttatgaatgtgtcactggattttgactccttattgattcattgtaatatgtaaattaaaatatttctacattttattgaaaaaaaaaccttttttttgcctaaatataagtttggtagcttggtttcttttttttattaaatagtgtgaaaatataatgggcattttgaaaacttttagaaaaaagtagtactttttgatactttagtatttatggaaactagtggaaaagagaaattagtgtgctatataaatcaggcattcaagtaacagtaatacaggatatatgtgttttctttccctgatgtttaggaaaatcacaggagggtaaatctttgctggagttatctgaatcattggcatttatccgattccactggtggtagtttgctagtgcttctaaaagttgctccctagcactgagaggtgtgggtaggtaaaaatgtgtttgcttgagaaaagcaaaaatgctaacaaggttttgatagattggcccaaaattctaacttgaatattaagaatgactaggaatggtagaattgacagagatgattagtaaagtctcttgatgcccaattggttaggtatgaaagtaatatgaacacattaatgttgaattttacagacagtatatttgaaaaaaattgattccatgtagtcttcaatttttaatttttaagaattggagaatttctaatgttaaagttagtttataaatgtgagtaaataaactctaagttgtattgaagtagtgctagctattattgtcagcaattttccatgattcattatccataaacctgatttcagaagacgtcaactcagttttttaaataattgaaagaaacaatgtaagtagtgtttagatattcaggctagtccataaaatttctgatcaactcatgtataggcccaagtgtgtgtctttgtgatgagaagaacatagaaaaatatttacatccttgtaattgaaacaaatttaaatagtttatttgttttgtttttatgaaagtgcttaaaaatagtagttggcaagctttttctatgaagatccagatagtcttttaggctttgaaggccatgtggtctgtcacagctactcacctctgctattgtggcctacaaataaccatagataatacataaatgaatagtggctgtcttccagtaaaacttcatttataaaaatggaggtgggggttggattgggcttgaaggcatagttgctgacccttggcttaatacaagttcaataagaaaaaatgaacaatttgtataaattctggaatagatccttatagagagtttagaggtgggtttcattcatattttaaaatattttaaacttcatacttattaaacataatagctttttgggggaggaaaatatcttcactcaaatcagccttataaggggagaagcactattctctagaattatttggttgatgttaagggctgtctctgggagaattagagaagttagctagtattggctattcataagtacttgacttgtagtataatgttttata

SEQ ID NO: 34851 - DNA, 2037 bp, Homo sapiens
tatggtttggaagtttgagggttttttactgtgtctatccttgtgtgtctgtttcctttaaagattcatgatacaatcactgtgtacaatgtgtcctttaatattggttcctgtaataatgtgccttcaaattatttcttgagttttgtgacttaaatatgcagttcactgactcacgccaatgttgtttgctttttaccttaattctttttactgtgctctctcagttttattttttggaagaatggtactcagtgctttgatttgattagtaagatttttgaaacacatgtaatttatttcagaaatgtgattgttttaactctgacttttttagtgcagtcattggagaaatcgatgaagaaacagattctgcgcttgatttggggaatattcgagcagaacctttaaattctgtagcacactgaggaaaaactacatacttggacatctgtaaatctttgtacagaaactgattattctgaggatgatatatggagtttttatgaatgtgtcactggattttgactccttattgattcattgtaatatgtaaattaaaatatttctacattttattgaaaaaaaaaccttttttttgcctaaatataagtttggtagcttggtttcttttttttattaaatagtgtgaaaatataatgggcattttgaaaacttttagaaaaaagtagtactttttgatactttagtatttatggaaactagtggaaaagagaaattagtgtgctatataaatcaggcattcaagtaacagtaatacaggatatatgtgttttctttccctgatgtttaggaaaatcacaggagggtaaatctttgctggagttatctgaatcattggcatttatccgattccactggtggtagtttgctagtgcttctaaaagttgctccctagcactgagaggtgtgggtaggtaaaaatgtgtttgcttgagaaaagcaaaaatgctaacaaggttttgatagattggcccaaaattctaacttgaatattaagaatgactaggaatggtagaattgacagagatgattagtaaagtctcttgatgcccaattggttaggtatgaaagtaatatgaacacattaatgttgaattttacagacagtatatttgaaaaaaattgattccatgtagtcttcaatttttaatttttaagaattggagaatttctaatgttaaagttagtttataaatgtgagtaaataaactctaagttgtattgaagtagtgctagctattattgtcagcaattttccatgattcattatccataaacctgatttcagaagacgtcaactcagttttttaaataattgaaagaaacaatgtaagtagtgtttagatattcaggctagtccataaaatttctgatcaactcatgtataggcccaagtgtgtgtctttgtgatgagaagaacatagaaaaatatttacatccttgtaattgaaacaaatttaaatagtttatttgttttgtttttatgaaagtgcttaaaaatagtagttggcaagctttttctatgaagatccagatagtcttttaggctttgaaggccatgtggtctgtcacagctactcacctctgctattgtggcctacaaataaccatagataatacataaatgaatagtggctgtcttccagtaaaacttcatttataaaaatggaggtgggggttggattgggcttgaaggcatagttgctgacccttggcttaatacaagttcaataagaaaaaatgaacaatttgtataaattctggaatagatccttatagagagtttagaggtgggtttcattcatattttaaaatattttaaacttcatacttattaaacataatagctttttgggggaggaaaatatcttcactcaaatcagccttataaggggagaagcactattctctagaattatttggttgatgttaagggctgtctctgggagaattagagaagttagctagtattggctattcataagtacttgacttgtagtataatgttttata

SEQ ID NO: 34852 - DNA, 1836 bp, Homo sapiens
ccttcctgcatcggtcctttctcggtgctgcagcagccttttacttactaatttcaccctgaagaaaggtagaccatcctggcgtggcagaagcgtggacattcgttttctaagggatggtcacacacctttgcctatttgcatttagtttctttaaaaagtaaaaacacctccattttggaacacttttagagacaaaagcagaacatacgaaagtgtatttcactgctgagttcttaagaggcgtacaccgtgtggttataacgtgcgcaactctgtcccgggcaactgaacttatttttagcgttattttcggcttctgctgcagaaaactagggattcaactacccgcacctacgtttcacacaacagcactcgtctctctccttcactcctaataaaaacaccttacttcgtttattcctgcctgctctacctcgtctcaacattttctcttgttaacttccaccacactgccttttactcggattggaaacccactctcccccaattctgtctcatacccccaacttcaggaagcgtcttccttttttccgcctctcgttcgcttttgtcttacgaggcttccggaacacggcccagaattacagagaaaacacactgcgcacgcgcactctctcgtcaccgctgtgcggcttctgtttggttggccagttcgtcccaatttccgactcacagggctgcggagcagcaactctcacgatatttgctgcgacccgcaggcgctatccgctgccgggttctggcgcgccctttcagttctgcttgctgtccgcaccgctgcgttacccggaaccgccgggccgaacagcatgacgtccgctttggagaactacatcaaccgtatcctcaagctggccgccgcgggcgtgagccggggtcgcggagaggccgcggtcggggatcggtgggaggttgggaggcctggcctcggcgggatcctgggggcgggcgaggagatgagggccccggaacgacccagagttcgccggcggcgcctcgagccttcccgctgctgcgggcccaggggtcctttccattttgcctgcaaaacccaaataaaaacccagtgtgattattccgaacttttctgtcttaaaaaaaatgtacgctcttgattcttacttactatttccctatggcataagtgttaaagtttgtgaataagatgaacagtcgtcctggcggcgacaacagttttgcaaatctttgtacttgttttattcacataatttgctcgttcgaggatagcaaaaagtttaacgatggttcacagactgtttctgtccctttaccacttgaagtcccaacttgttggtagaatgacacaaaaatggttgctgttgtaatggattatagtgaggagcaagtaacaaccccatgggaagtcttaaaatagactttacaagtgttaccgttttaaagtcttaggacaaaaacactacgttaagctcaggtacaaactgggtgacaaaaattaaataccgaatgcttttaatgatgcgttattggtaccctgtgacactgcttatatagtttctttacttttgaattacagaagcctgtcctggaagacagttttttaacatgctggaaaatcgtccaacatcgattaatttagtactcatccacttttcattttagaaataaacaggctaagaaacgaaatatcctgcctgaaataatagattggtaaccttcctagtagaaaagtgtcaaaaatccaggatattttgagataagatacaccgatcacatacagaaagaggttttctttttctattttttcccttttttaatcatgtaattatcaca

SEQ ID NO: 34853 - DNA, 1715 bp, Homo sapiens
ccttcctgcatcggtcctttctcggtgctgcagcagccttttacttactaatttcaccctgaagaaaggtagaccatcctggcgtggcagaagcgtggacattcgttttctaagggatggtcacacacctttgcctatttgcatttagtttctttaaaaagtaaaaacacctccattttggaacacttttagagacaaaagcagaacatacgaaagtgtatttcactgctgagttcttaagaggcgtacaccgtgtggttataacgtgcgcaactctgtcccgggcaactgaacttatttttagcgttattttcggcttctgctgcagaaaactagggattcaactacccgcacctacgtttcacacaacagcactcgtctctctccttcactcctaataaaaacaccttacttcgtttattcctgcctgctctacctcgtctcaacattttctcttgttaacttccaccacactgccttttactcggattggaaacccactctcccccaattctgtctcatacccccaacttcaggaagcgtcttccttttttccgcctctcgttcgcttttgtcttacgaggcttccggaacacggcccagaattacagagaaaacacactgcgcacgcgcactctctcgtcaccgctgtgcggcttctgtttggttggccagttcgtcccaatttccgactcacagggctgcggagcagcaactctcacgatatttgctgcgacccgcaggcgctatccgctgccgggttctggcgcgccctttcagttctgcttgctgtccgcaccgctgcgttacccggaaccgccgggccgaacagcatgacgtccgctttggagaactacatcaaccgaactgttgccgttattacatcagatgggagaatgattgtgggaacactgaaaggttttgaccagaccattaatttgattttggatgaaagccatgaacgagtattcagctcttcacagggggtagaacaagtggtactaggattatacattgtaagaggtgacaacgttgcagtcattggagaaatcgatgaagaaacagattctgcgcttgatttggggaatattcgagcagaacctttaaattctgtagcacactgaggaaaaactacatacttggacatctgtaaatctttgtacagaaactgattattctgaggatgatatatggagtttttatgaatgtgtcactggattttgactccttattgattcattgtaatatgtaaattaaaatatttctacattttattgaaaaaaaaaaaaaaaaaaaaaaaaaaaaaaaaaaaaaaaaaaaaaaaaaaaaaaaaaaaaaaagggggggggggaaattattctctcgcgggaggggagacaaattattggaggtggtaagccagagttttgttttgaaaagaggggtggccccataatggggggtgcgttatatatagagagaaggggcggagggggcggtcttataaaacgaggttgttgcgtgggggaaaacaacggtgttatgtcgggggagatgttgtggagagaggaggaacacatacattgggggggggggggacaattgtggggggccccatccctccgagagattatttagggctcccaggggaaatattaacaattggaggtggattatggtgggtcaaccagaagggtaatttgttggtcggactaaaatgtggctagggatgtgta

SEQ ID NO: 34854 - DNA, 1568 bp, Homo sapiens
ccttcctgcatcggtcctttctcggtgctgcagcagccttttacttactaatttcaccctgaagaaaggtagaccatcctggcgtggcagaagcgtggacattcgttttctaagggatggtcacacacctttgcctatttgcatttagtttctttaaaaagtaaaaacacctccattttggaacacttttagagacaaaagcagaacatacgaaagtgtatttcactgctgagttcttaagaggcgtacaccgtgtggttataacgtgcgcaactctgtcccgggcaactgaacttatttttagcgttattttcggcttctgctgcagaaaactagggattcaactacccgcacctacgtttcacacaacagcactcgtctctctccttcactcctaataaaaacaccttacttcgtttattcctgcctgctctacctcgtctcaacattttctcttgttaacttccaccacactgccttttactcggattggaaacccactctcccccaattctgtctcatacccccaacttcaggaagcgtcttccttttttccgcctctcgttcgcttttgtcttacgaggcttccggaacacggcccagaattacagagaaaacacactgcgcacgcgcactctctcgtcaccgctgtgcggcttctgtttggttggccagttcgtcccaatttccgactcacagggctgcggagcagcaactctcacgatatttgctgcgacccgcaggcgctatccgctgccgggttctggcgcgccctttcagttctgcttgctgtccgcaccgctgcgttacccggaaccgccgggccgaacagcatgacgtccgctttggagaactacatcaaccgaactgttgccgttattacatcagatgggagaatgattgtgggaacactgaaaggttttgaccagaccattaatttgattttggatgaaagccatgaacgagtattcagctcttcacagggggtagaacaagtggtactaggattatacattgtaagaggtgacaacgtgtaagtaaaatatatctgttaaaattataaatgatactgccttactttatggagaagaggctttccccaaaataccctactgtattgtccatacatagttaatagaatcttgcattcatttctttcgtaaatataccttttcttatgtttgtgtaaaataaggcatatgtatacattttatgtcagcacttctttaggtttcaaccaaagctgtctctctacaaattaaacttttacctgagatttgcccatttttctactagttaagtagcctgggtagagtccagaaagggctctgccttatattaaatacttcattagagagacttcttaaaacgttctttcaaatacccagaattttagaggaacatatttctagagtccaaggccaaagtttgaaaaatgttttgaaatctctgatttgaacaatattaattcatgctcaataacataggtgtatttataaataagtacttactcgttattcattttcttttaattttttagtatcattgacacacttaagatgtccctg

SEQ ID NO: 34855 - DNA, 1489 bp, Homo sapiens
ccttcctgcatcggtcctttctcggtgctgcagcagccttttacttactaatttcaccctgaagaaaggtagaccatcctggcgtggcagaagcgtggacattcgttttctaagggatggtcacacacctttgcctatttgcatttagtttctttaaaaagtaaaaacacctccattttggaacacttttagagacaaaagcagaacatacgaaagtgtatttcactgctgagttcttaagaggcgtacaccgtgtggttataacgtgcgcaactctgtcccgggcaactgaacttatttttagcgttattttcggcttctgctgcagaaaactagggattcaactacccgcacctacgtttcacacaacagcactcgtctctctccttcactcctaataaaaacaccttacttcgtttattcctgcctgctctacctcgtctcaacattttctcttgttaacttccaccacactgccttttactcggattggaaacccactctcccccaattctgtctcatacccccaacttcaggaagcgtcttccttttttccgcctctcgttcgcttttgtcttacgaggcttccggaacacggcccagaattacagagaaaacacactgcgcacgcgcactctctcgtcaccgctgtgcggcttctgtttggttggccagttcgtcccaatttccgactcacagggctgcggagcagcaactctcacgatatttgctgcgacccgcaggcgctatccgctgccgggttctggcgcgccctttcagttctgcttgctgtccgcaccgctgcgttacccggaaccgccgggccgaacagcatgacgtccgctttggagaactacatcaaccgaactgttgccgttattacatcagatgggagaatgattgtgggaacactgaaaggttttgaccagaccattaatttgattttggatgaaagccatgaacgagtattcagctcttcacagggggtagaacaagtggtactaggattatacattgtaagaggtgacaacgttggccgggcacagtggctcacacctgtagtcccagcactttgggaggctgaggctggcgaattaccagaggtcagaggttcgagacctgcctagccaacgtggtgaaaccctgtctctactaaaaatacaaaaattagccgggtgtggtggcatgcgcctgtaatcccagctactcgggaggctgaagcatgagaatcgcttgaacctgtgcagtcattggagaaatcgatgaagaaacagattctgcgcttgatttggggaatattcgagcagaacctttaaattctgtagcacactgaggaaaaactacatacttggacatctgtaaatctttgtacagaaactgattattctgaggatgatatatggagtttttatgaatgtgtcactggattttgactccttattgattcattgtaatatgtaaattaaaatatttctacattttattgaaa

SEQ ID NO: 34856 - DNA, 515 bp, Homo sapiens
ggggctaattatagtactaaatcaaagggtagagatgagttgagaaaatgtgtacagtgtgtttagcacactgcctagtgctggcatatagcatatagtgatactattacattgctgtagttggtatgtatggttcttccttatttatgtatatttggctatcattttcccttaaatatcctttgtcttagtttatacctttagctgctggtctacataagcttttatgctacttacttggagatagtcacattagtacataggtgtcctttgcaactgctgtcaactctacatatgagtgagatgtgtggtgcaggtccccccaccccagccaaataaccaagaggtaaattgtgtaccctcgaatactgttggttataaaaaaggcattttatttgccgtcgtataggtacttgtattggaatacctggcaactaaaatgactgtgaggttaaatttacactttcaggtaaaccagaatatttctctttttctcctgaatattttctttacag

SEQ ID NO: 34857 - DNA, 1280 bp, Homo sapiens
ccttcctgcatcggtcctttctcggtgctgcagcagccttttacttactaatttcaccctgaagaaaggtagaccatcctggcgtggcagaagcgtggacattcgttttctaagggatggtcacacacctttgcctatttgcatttagtttctttaaaaagtaaaaacacctccattttggaacacttttagagacaaaagcagaacatacgaaagtgtatttcactgctgagttcttaagaggcgtacaccgtgtggttataacgtgcgcaactctgtcccgggcaactgaacttatttttagcgttattttcggcttctgctgcagaaaactagggattcaactacccgcacctacgtttcacacaacagcactcgtctctctccttcactcctaataaaaacaccttacttcgtttattcctgcctgctctacctcgtctcaacattttctcttgttaacttccaccacactgccttttactcggattggaaacccactctcccccaattctgtctcatacccccaacttcaggaagcgtcttccttttttccgcctctcgttcgcttttgtcttacgaggcttccggaacacggcccagaattacagagaaaacacactgcgcacgcgcactctctcgtcaccgctgtgcggcttctgtttggttggccagttcgtcccaatttccgactcacagggctgcggagcagcaactctcacgatatttgctgcgacccgcaggcgctatccgctgccgggttctggcgcgccctttcagttctgcttgctgtccgcaccgctgcgttacccggaaccgccgggccgaacagcatgacgtccgctttggagaactacatcaaccgaactgttgccgttattacatcagatgggagaatgattgtgggaacactgaaaggttttgaccagaccattaatttgattttggatgaaagccatgaacgagtattcagctcttcacagggggtagaacaagtggtactaggattatacattgtaagaggtgacaacgttgcagtcattggagaaatcgatgaagaaacagattctgcgcttgatttggggaatattcgagcagaacctttaaattctgtagcacactgaggaaaaactacatacttggacatctgtaaatctttgtacagaaactgattattctgaggatgatatatggagtttttatgaatgtgtcactggattttgactccttattgattcattgtaatatgtaaattaaaatatttctacattttattgaaa

SEQ ID NO: 34858 - DNA, 886 bp, Homo sapiens
aagcgaatgtaaaaaaatttccttctttataagtctgttggttataataattaatgtgaaaatctacttcattaaatggggtctattgatcatttctttgtctggaataaatgaataaataatacattgctgttatatatgtaattaacatgttgtggcaaacataaatgttatgggtaacatttactacctaaaatgccttctagtggctaattatttgtttttgccttaatagtttctgagttttaatttttttaaacttaggcttttgcacttaaaataggaccatataatatgttcattaactgtgtatatccttttaaagaaggaaataggaaacgtgattgtttatgttgtttgaagatggtagtatattcctatttcctcgggaaatgggaagacataattcacattctataatcatatacttaggattactttgttaactctttataactttgagctagtgttctatacattattgaattaatgaaatgggtatatatgcaaaaggaaaagataatttttttccaggtttctttgagaaatagaaaataaaacgagacactagtggtaaatttggttatctgaagaattatttgtgagatagatcactgtcatggaacaatgttaatgcgtaatctgcttatagtcttctgaattaagttcttctaggtcatattaagtttttccctaactttgaataggtttttcttagtaatcaccatttttagttcagtatttaagtgttctataaggtcattgtgaggtataaaaagataaataggccaggtgtgatgactcatgcctgtaataccagcactttgggagggtgaggcaggaggattgaggctaggagtttgagaccagcctggacaaagtgaga

SEQ ID NO: 34859 - DNA, 678 bp, Homo sapiens
gtgatcttggctcactgcagcctcaacctctcaggctgaagcgatcctcccacctcagcctcccaggtagctgggactacaggttcatgccaccatgcccggtgaatttttgtatttttttgtagaggtggggtttcaccatgtcgcctgggctggtctcagacttctgggctcaagccatcctccctcctcggcctcccaaagtgctggcactatgggtatgagccacagtgtccagccttccttatttcataagaagagtgtgtatacaggcatggctgttgattcacgttgccattgaaagacatctactgctctagccagaggaatccctactgactccaggaggtccacagtcatcatccctgtagaaggacaggtattgtatccaaactagcctagttcctcaaactcccaagttctgaagttttatgaactgattactagaaagaggaggcagagattgttctgctgaaattggcggataaattgcagaaaactcagggatggagaaaactaaaataacgaaaatcaatagtgcatctgatgtgatcttacagtttaatctgagcagttcttagcatatataatttgtgagaaaattcattatgtggggatgcagcaagtacattccatatcaatgcacaaatgctctgttaataaatgctatcaccccaa

SEQ ID NO: 34860 - DNA, 493 bp, Homo sapiens
gaattccagttcttaatgacactggagaatttaagtatgaagcaactatttcatgtgatttattccacatttcataaccaatagtctcagaataacaatactaacattatcaaattgttgtgcttataagtcattggaatattttatgtgtggctaaaaattgagcataaattgcattttcattttttatttttagtgattagtttttattaacatttcattttattttaaaattatataaaatgttttatatagttccaaagtcaaatgtataataagaatatattgaaagtatatacaaagaagtataggtttcatccttactatgtccaccattcaaccctttatgaagtaaccattttggcaacttttttgtggtttattcttttattatttgtttttctttttaatgataacagataaacatgtgtgttcttagctcattttatgctgctataacaatacctgagacttggtaatttataaaaaaaaa

SEQ ID NO: 34861 - DNA, 351 bp, Homo sapiens
cttcaaattatactataatgccacaattaccaaaataggatggtgctgatataaaaataggcatatagaggttgggcatggtggctcatgtctgtaatcccagcactttgggaggccgaggtgggcagatcacgaggtcaggagatcgagaccatcctggataacacggtgaaaccccgtcgctaaaaatacaaaaaaaaattagtcgggcatggtggaaggcgcctgtattcccagctactcaggagactgaggcaggagaatggcgtgaacccgggaggtggagcttgcagtgagccgagattgcaccactgcactccagcctgggccacagagtgagactctgtctca

SEQ ID NO: 34862 - DNA, 344 bp, Homo sapiens
gtttaatctaatacctttcttcccaaaataaaccaacaaaagatgaacaaatccgaaatatagccaaggctgcattctcattgatgtaatgctgtgttttaaaaaacaagtcaattgctgtgaggtcctgggtgaatttaatctctttggcccaatgcctgatgccctgacattaaaaccttaggcaacactgattaaaatcataagcttgctcagattgcgctcttattgatttttttttttaaggtgggcaacaaaagggaagtttgcttgttttttttggcagcgttcgttgagcaccagaaattgtgcagggtatagagctgtagagtcatttgaggtaa

SEQ ID NO: 34863 - DNA, 431 bp, Homo sapiens
aaaagcaaccagcagggagcccaagagccttctagagattggttatattttgtttcttgatctggatatcatttactcagacacgtttatttggtgaaaattctttgcactgtggacttacgacgtgtacttttctgtacgcctgttatacatcagttataagattttaaaataattaaaatataaactctaggacaatcagggttaaaaaaaagtagcctgagactctgatttatcttttcttctatttttctgtctcaattgcctgtttttttattgtttcgattaaaatctttatcaacagacgttatataattctttgaaagggttttgtcctgtagcttttgaatgtgtactttcatcattattgtgcatgtctttcaacattttttcaaaaataatttctgtactcagtaaaaatgttctctttg

SEQ ID NO: 34864 - DNA, 1000 bp, Homo sapiens
ttattttgtgatttgaaaatggacttttatgttttaggaattatgtggatgggatgttttcttgggtgatcgatttgaaattgcagaggggagcaggtgccatgtgctggcaatggccggccttccttccttccttccttccttccttccttccttccttccttccttccttcctccattcctcctaccccccgtttcttccttctttctctctctttctttccttttctctttttctttctttttctttcttttctttctttctttctctctctctctttctctctctctctctttcattttgtttgttttaatgagtgagagtaaagagaaagaaaagaactgtttttattttttgtctacctttattgtaaggagagagtgaggataccatgccacacatgcagggtcctgagcagagggctgcaccctgcttagttctaaagacacctagactttatcctgaaagccactgagaggcccatattttgaaacactcagcctctcagaagaggatagaatgggttgccagtgtaatagggagagaaatcgaacatagctgactccatgttgcttctgactcctcaagctaactgcttttaggcacttctgcacacgggccaagttaatcatggaaagaacttagattacagtttaactggaaagcaaggatgataagcgttcctttccaaaactaacctctgaggagataagaagggcatgcacacaagtaacaatgttatattgaagacttgtaggagcgctgtgacctgagcaaggacaaagttttgcaatctccttgggcccctgctgatgcccaagtgtctgtggtcaccagccacccccctcacctcagtctcctccttgttccccttcagtgtaccccttcaatgtacaaagaagcttgagattcatgcctttaaagatggttcgttaggacatgggtccagtatcttcctgacttgctggctctccaaataaagatgcttttcttgctcta

SEQ ID NO: 34865 - DNA, 1478 bp, Homo sapiens
ttattttgtgatttgaaaatggacttttatgttttaggaattatgtggatgggatgttttcttgggtgatcgatttgaaattgcagaggggagcaggtgccatgtgctggcaatggccggccttccttccttccttccttccttccttccttccttccttccttccttccttcctccattcctcctaccccccgtttcttccttctttctctctctttctttccttttctctttttctttctttttctttcttttctttctttctttctctctctctctttctctctctctctctttcattttgtttgttttaatgagtgagagtaaagagaaagaaaagaactgtttttattttttgtctacctttattgtaaggagagagtgaggataccatgccacacatgcagggtcctgagcagagggctgcaccctgcttagttctaaagacacctagactttatcctgaaagccactgagaggcccatattttgaaacactcagcctctcagaagaggatagaatgggttgccagtgtaatagggagagaaatcgaacatagctgactccatgttgcttctgactcctcaagctaactgcttttaggcacttctgcacacgggccaagttaatcatggaaagaacttagattacagtttaactggaaagcaaggatgataagcgttcctttccaaaactaacctctgaggagataagaagggcatgcacacaagtaacaatgttatattgaagacttgtaggagcgctgtgacctgagcaaggacaaagttttgcaatctccttgggcccctgctgatgcccaagtgtctgtggtcaccagccacccccctcacctcagtctcctccttgttccccttcagtgtaccccttcaatgtacaaagaagcttgagattcatgcctttaaagatggttcgttaggacatgggtccagtatcttcctgacttgctggctctccaaataaagatgcttttcttgctctaactttttgtctcgtgaatcattggctgttatgcagtgagcctcaggaactttggactccacagcaccaggacaactctcaggactcccagtctctattgggtgcaggaatcactggggagtctggctgaagtgcagactctgattgaggaggcctgggacacgaggcctgagattctgcatctccagtaagcaccaaggggatgttgatgctgctgatccagggaccacaccttggagagcaatgctgagaagctggtggaagagcccaggctcatgaagatctgaacatggtccatagcagggaggttggggaaatgagataaaaatgttaaaaatggcagttaccttcctggagaagaaatggcttttccattccttattaggctcatgtctttggaactagcccccactggtctccttcctgttatatacctgcagttaccatgttcttgttaaggaagaatggcaaatgcaaaa

SEQ ID NO: 34866 - DNA, 946 bp, Homo sapiens
ttattttgtgatttgaaaatggacttttatgttttaggaattatgtggatgggatgttttcttgggtgatcgatttgaaattgcagaggggagcaggtgccatgtgctggcaatggccggccttccttccttccttccttccttccttccttccttccttccttccttccttcctccattcctcctaccccccgtttcttccttctttctctctctttctttccttttctctttttctttctttttctttcttttctttctttctttctctctctctctttctctctctctctctttcattttgtttgttttaatgagtgagagtaaagagaaagaaaagaactgtttttattttttgtctacctttattgtaaggagagagtgaggataccatgccacacatgcagggtcctgagcagagggctgcaccctgcttagttctaaagacacctagactttatcctgaaagccactgagaggcccatattttgaaacactcagcctctcagaagaggatagaatgggttgccagtgtaatagggagagaaatcgaacatagctgactccatgttgcttctgactcctcaagctaactgcttttaggcacttctgcacacgggccaagttaatcatggaaagaacttagattacagtttaactggaaagcaaggatgataagcgttcctttccaaaactaacctctgaggagataagaagggcatgcacacaagtaacaatgttatattggggcccctgctgatgcccaagtgtctgtggtcaccagccacccccctcacctcagtctcctccttgttccccttcagtgtaccccttcaatgtacaaagaagcttgagattcatgcctttaaagatggttcgttaggacatgggtccagtatcttcctgacttgctggctctccaaataaagatgcttttcttgctcta

SEQ ID NO: 34867 - DNA, 372 bp, Homo sapiens
gaggtccgaccctaaagcaaacccccgactcatgctggtctcgaactcctgagctcaggcaatccgcctgcctcagcctcccaaagtgctgggattacaggcgtgagccacggtgccagcctccgtcatagtttctaaaacacccacaccacaacagtaatcttgactcaacttcagctcctcatcctgtgtctaagccaagtttagccgaagaaaacatctgccgagaaagtaaaaacaaaaacataaagtggggaaaggacacccttttcaacaaatagtgctgggataactggctagccacatgtaagagaatgaaactggttcctcatctctcaccttatacaaaaatcaactcaagatgcattaaag

SEQ ID NO: 34868 - DNA, 840 bp, Homo sapiens
ctgttgcccaggctggagtgcaatggcatgatttcagctcactgcaacctccacctcctgggttcaagcgattctcctgcctcagcctcccgggtagctgggactacaggcgcatgctgccacgcccggctaattttttgtattttagtagagacagggtttcaccgttgttgcccaggctggtctcgaactcctgagctcaggcaatccgcctgcctcagcctcccaaagtgctgggattacaggcgtgagccacggtgccagcctccgtcatagtttctaaaacacccacaccacaacagtaatcttgactcaacttcagctcctcatcctgtgtctaagccaagtttagccgaagaaaacatctgccgagaaagtaaaaacaaaaacatctgccaaaggcaagaacccggtgggaagccccctgagcccagtggcctgcagagtctgttctagtgacaaagcaggcaactggaagagatcagggctgcgagacagcgtgggtgggtttttatctgctgcttctgtaaattcattgcatgatacgtctgtttttcagaggtcccaaagcaaagaaacaaagccccacagagttcacccagagggaaggccttcactggatcaggctataagagaaggactctcccctgagaaagataaatacttattttggggccgtgtttagagaaaaaggaagaacgatggctttcccatagaaacatttacttattttgtgatttgaaaatggacttttatgttttaggaattatgtggatgggatgttttcttgggtgatcgatttgaaattgcagaggggagcaggtgccatgtgctggcaat

SEQ ID NO: 34869 - DNA, 473 bp, Homo sapiens
gcaggtttgttgcacaggtaaatctgtgccatggtggtttgctgcacctatcaacccatcacctaggtattaatcccagcatgcattagctatttttcctaatgaagagcctgattaaaaatataaaaccttggtacctaaacctcagagtcctccaaatacataatttaatttaagctgcatgcctctgtttttttttgtgtgtgtatgtgtcatctattttgctgtagagtttccaaaccaactgtgtctgtgcactatttggaactctcacaggttttatacagtttccttttttacttgtagcagaacggttattgggctggcatattattaaaaatgccaaaaaaagttatatgtattagtgtcttgtcccaaaatttctgatagaaagggaaatatgtgtatttgtaagcagatttaaaatgactgttgaaacagagatgggactccaagaatttaagtatcagcag

SEQ ID NO: 34870 - DNA, 318 bp, Homo sapiens
tgttgtttagggaacacaacagatttgagaagcctcggattaaggaataatttatgaagctccgttgactaccgtggagagatcataatttggggttcaagattccagtctgtgtttttccagaggtgccctgaggagcagggaagcatggctattgtggatgtaaaagccatgttcaagccaggtatggtggtatgtgcctgcagtcccagctactcgggaggctgagatgggaggatccacttgagcccaggaggtcaagtccagcctggacaactatcaagaccccatctctaaaaataaataaataacatttta

SEQ ID NO: 34871 - DNA, 390 bp, Homo sapiens
ccgtcctttcatcatcagaaaaactcagataatatgacttccgccatcaacacttgaacattaatagaaatagcatcctcgtgtttttacaattcctggcacatcataagcacataataaatggcagttttagtttatcactattgcatgctctttggattcaaaattctcagatctggtacactgattttcttcctttcagaccataatcattttttttaatgtatacttactgtctttgaatgattactaaatccaaattagcaggatcagaattagtgagattagatagcgtttttgcaagttatagtttatataatgcttactctcccaaataaaatgtgactttcgtattcgttctgtatcaaactttaaaattttgagtgtgaa

SEQ ID NO: 34872 - DNA, 165 bp, Homo sapiens
acagagtaatcactcctcagatagatatcttaaaaaataattgggtcttgggagaggactggcctgtagggtctgatttgggagttattgtggtgtgaagcaatgtgatgtctgagtgtgatgagcgctgagagagcatgatttggggaaatcagaactttgaga

SEQ ID NO: 34873 - DNA, 432 bp, Homo sapiens
cctccaggggctttgagaaagccagctttggctagctgtaaagttttcagtaatcatttaagaaaaaaaagttattcatcatctttatggcagatcacagccgccacattctccccaggagttcaatccatcaagctcctcaatgcaagaatggctaacaaggtccctgtcactttgggtgaaatatacaagcctcaccagaggctcctgacttccaccaggatcaaagtttgtaggcactgctccagcccagcgtcctccacccgagaagccagcaagacagccttgccttccttcctatctttatttgtagaatacaggtggaaaagaaggaatccttcaaagttttgttctttcatgaaaatgggttcctgtgggcaagaaatctgccattatgcacctaaccttttatatctgagattttcaagagaa

SEQ ID NO: 34874 - DNA, 1414 bp, Homo sapiens
gaacacgagtcttttggctattagtctaatgcattttcctccacattatattgcactgctctgaggcttgcttatatttttcatacctggatttccagggtggtgacgtgggggagggaagtattcaattcagaaccaccgtgaaccaagatctctggaaacaaactctgtactatttctccttcatctcctattttcataactagtgccaagctcaggactaactgcatagactccctttcaaaagaccaatagatattctcagtgacagttgaacacattagtttacaatcacacagaatttgaacagaacttaaagttgacagttaatgccgatctataattaacaaaaatgtcaacttgtggatatgctgatgattttatccagttttcaaaatatgattcctacagttcaggatatcacttattagattgtagacaaggaaaatgtacattgggacattatgtacttaagagtttttccttaagttttgcagaggaagtggttgaaaattgagctaacactagatttcgaggttactaaagaattccagttttccagtctcccacttcaattaccaggtaactataaggcaaaaatatcccaatgctgtgaacttaaggcaatattcatttcctttctacactacttggcatggtaaccatgacaaacttttattttctctttctgatttcctaatgaaatctcattatttgcaaagctttaaaatgactagatgaaggaaaaacattgttatgacccatgaccctcggagcccaaacagcaccatgaagagcatcattaaaactaagagaaagtggctatcagaaaatgaaacagctttaaaggggttccttttaagtcttgttttctattcagaatgttctgtgttttttctcaagtgtgggaatgacatttatcttagcaggttactcaactacactggatgatgtcactctaaccagtgtacggcactgacccaagtcctggggggctccttggaccaatggactattttacaaacctgggaggtgggagggatggtatatttttgataatcagacattccaatgtaatgttttccttagaggtcacacccttccccccattaatgtcatcgtgagatacatcaagtgtgttcttttctattttcgtataataaatgggctttgcttatcaacatcacaatggcaaagaagaaatatactgtacaaaactgcaggaagataaaacatgaaaactttctatgaaaaaaaaaaaacacccttgagtttcctgtcgtcttcttttgaaactgtagtgcatatgttaaaacatgtatatcatttacagtattgagtcgtgtgccactgctgtacctgatgtatccaatctggattaaacaaattatgtgccacaaaccctaaaaaaact

SEQ ID NO: 34875 - DNA, 1915 bp, Homo sapiens
gaacacgagtcttttggctattagtctaatgcattttctaccacacccactgcctctgagagcagtgatgctttggagaagatccatcaaagaatccatactgtaattggagacatagtcttatatgtcaatacgtatatgtcaatactacttggacacagcccttggaaatcacctgactgtaccaatacaaaccatactttggaaaccaccattctctgggtagaaacatctatggactatcaattttgtcagaaatcagtgaacaagtgaagagtcaattttttttagtcaaatattttctcttctcaatgaagagaagactaggacagtgacattttgaagcataccttttatactccttgtggttcttatgacagtctgtgatggtagtagggtaaagtaggctaaatccttgattcagagaggggaaaacatgtggaaagaaactgaacgacttatccaagttcacatgacaagttagtggcagaaccattattgcaatccaggacttaagacatcttgtcctaggatttttcctccacattatattgcactgctctgaggcttgcttatatttttcatacctggatttccagggtggtgacgtgggggagggaagtattcaattcagaaccaccgtgaaccaagatctctggaaacaaactctgtactatttctccttcatctcctattttcataactagtgccaagctcaggactaactgcatagactccctttcaaaagaccaatagatattctcagtgacagttgaacacattagtttacaatcacacagaatttgaacagaacttaaagttgacagttaatgccgatctataattaacaaaaatgtcaacttgtggatatgctgatgattttatccagttttcaaaatatgattcctacagttcaggatatcacttattagattgtagacaaggaaaatgtacattgggacattatgtacttaagagtttttccttaagttttgcagaggaagtggttgaaaattgagctaacactagatttcgaggttactaaagaattccagttttccagtctcccacttcaattaccaggtaactataaggcaaaaatatcccaatgctgtgaacttaaggcaatattcatttcctttctacactacttggcatggtaaccatgacaaacttttattttctctttctgatttcctaatgaaatctcattatttgcaaagctttaaaatgactagatgaaggaaaaacattgttatgacccatgaccctcggagcccaaacagcaccatgaagagcatcattaaaactaagagaaagtggctatcagaaaatgaaacagctttaaaggggttccttttaagtcttgttttctattcagaatgttctgtgttttttctcaagtgtgggaatgacatttatcttagcaggttactcaactacactggatgatgtcactctaaccagtgtacggcactgacccaagtcctggggggctccttggaccaatggactattttacaaacctgggaggtgggagggatggtatatttttgataatcagacattccaatgtaatgttttccttagaggtcacacccttccccccattaatgtcatcgtgagatacatcaagtgtgttcttttctattttcgtataataaatgggctttgcttatcaacatcacaatggcaaagaagaaatatactgtacaaaactgcaggaagataaaacatgaaaactttctatgaaaaaaaaaaaacacccttgagtttcctgtcgtcttcttttgaaactgtagtgcatatgttaaaacatgtatatcatttacagtattgagtcgtgtgccactgctgtacctgatgtatccaatctggattaaacaaattatgtgccacaaaccctaaaaaaact

SEQ ID NO: 34876 - DNA, 700 bp, Homo sapiens
  misc_feature (438)..(438): n is a, c, g, or t
agatctagaggcgcagagtcaagttagattttgcaggtgtatctgtatgccttttggaaggacatgatgtctggcactttttagtgatagtggaaccctctcttcacctttaatgatcagaaatgattttccagctccctggcccctcaggtgcttgaatgcttctcctgcctccaccctccccaccagtttggggcacttagcacataagctcagtgagccttcctgaccttgtctctgtgctcccatgcccctagcccatcttctttcttcccacctccctcccaatgggaactccagctccagaggggaccccagcaagcctccagtccattgatccaccttttcatgttcttcactgcctctcatggcctctttctctgctcttcctgattcagagtctgtggtcacttgcagtcatttccttaacccccatcnccacttcgctttgtcaaaaccagacttaaatccaactttctgcttcatttacgctggcacatgtacagcaaattgcagcagggaaagccactttgccaactggtcttgcttagcctcgcagacgcactaaggtcttaaagcagcccatcaaagtatactctcttgcaccactccagataactattttacgtttccttctctcaaaactcccaggcttcttccgtcttcactgttagtcgacaaattgctccttttttgagaa

SEQ ID NO: 34877 - DNA, 367 bp, Homo sapiens
aaatctttttttttttttttaaacatagcacaaattaatgctggacattagaatcataacgtgttcatactagaaaaaatctcaagagataatttagagataattctcaaaccgtagcatcagaattacctggaaggcttattagaacacaaatggctgggcccactttggagattctgatttagtgggtctgggagggcccaagaattgaaccagggactacattttgagaaccactgcacaatctacttgatttattgatgaggaatctcagctccttaggtttttatatgctaatgctaagcatttttaaaataaatggaaattatccagtgtatcaatatgaatacttttctatacttagttg

SEQ ID NO: 34878 - DNA, 445 bp, Homo sapiens
gaaccagtccttaggaaataatttaaaatgggaaaatgctttttgcactaagattatgatggcagagacttagaaacaacatacatttccactgaaaggaagttatggaatatttccataattagcaaaaattagtaaattatggaatattacacagccaaaaagaaaaatcatgcattataatggctatgtaagaatagagaaacatcttatagcatatcatggtaaattaagaataaaagcaaattcaaagttggtatacaatataattcctttatttaaaaaccaacaacaggacaggtgcaggacaggacaggattgcaaattcatgtctgtaatcccaaaactttggaaagccaatgtgggtgggccacttgagcccaggagttcaagaccagcctgggcaacatagtgagacaggtttaaaaaattaaaaaaaaaaaaa

SEQ ID NO: 34879 - DNA, 472 bp, Homo sapiens
tgttcctagaggtccaactctatgtaatggtcttaggggtgatgaagcactgtagtcctgcttctcactcatacctgccctccagaaaggataaaattataaatgtccaattagagtctttattagtctcttcctatgtagaatttatcaatagtttgacagttctgcagctcatgcattttcagaaaaatccttcttcagtttaaaacattccaccattgttttttgttgttgttttttcaaattgcattgggaagaaggtaaggagtatgtatagaatacaattctgtgaacaaagtgagtgagttacttgctccttgagggcagaaactctggccatttgtcctcaagtcctcagtgcctgacacatatccatgtattaattgagctgcttctatgtgccaggtgctggagtacagcagtaaagcagacaggtatagttcctccttggacagaggtaatagtcaaggca

SEQ ID NO: 34880 - DNA, 549 bp, Homo sapiens
tgagatggagtttcactcttgatgcccaggatggaatgcaatagcacgatccagtctgggtgacagagcaaaactccatctccaaaaaaaaaaaaaaaaagagccaagattaggtagaccggctcagaactcacactcttaaactacatattataatagctcctcaacaaaagtaattccatagcatgagtgggctactggcaccagagctggaacagccaaaagtgaagcttgctcttcgaggttcgaaagattctgggaaacagctgaggtgaagcccaagattagaagcagtgaactaaaatggaccttgaagtgcctgaggaaaaaaccgagattatctgtcagcgtctgctctccctaggcgagaccagggtctgagccccggcttctctatttcccacctcagaagacattctctacatctttattttctcctttatgtttgcccttaagtttccaataagtgcaattataattctctcagagctagtaactactcaaaaaataacctaatcgagccctgtaccttatatctaatccctgtaa

SEQ ID NO: 34881 - DNA, 205 bp, Homo sapiens
gtcagatttacaaaatccccaagaatcactttagtgccaaatactaagccatctatatacactctgcaaaaaagtaataagctggctgggcgcggtggctcagcctgtaatcccagcactttgggaggccgagacgggcggatcacaaggtcaggggatcgagaccatcctgtggatggtgaaacccgtctctagtaaaaataca

SEQ ID NO: 34882 - DNA, 402 bp, Homo sapiens
tcaaatcctcctggccagcaggaagctttcccagtttcccaacagtgcaccttttatttgtgatgtttttcccttctatcccattgctattttcccaacttatcatcctcccttgtatttttccccttgggatctttcccaacctgattccagcccaaagattttccagtgtatttactggaccctactcccatccctgaccaagcatcactagctttgcttagttttttgtttttttgagacagggtcttactctgtcacccaggctgaagtgtaggtggcacagtcacagctcactgtagccttgacctcccgggctcaagcgacctccctccctggcccctgagtagctgagaccacaggcatatgccaccacatccagctaatatttttattttttgt

SEQ ID NO: 34883 - DNA, 102 bp, Homo sapiens
aatgaggaaacagaaataagaggttgaaagtgaccaggataattctactataggtagtggcttatcaggaaaaagtagtttgccatattataagaaaaggaa

SEQ ID NO: 34884 - DNA, 520 bp, Homo sapiens
ggaaatattatagttggccctccatatccacgggttccttatccaggattcaacaaactgcgaatggaaaacattaggggaaaaaaaaaacccaatcctagcactttgggagggtgaggcaggcagatcacatgaggtcaggagttcgagaccagcctggccaacattgtgaaaccctgtctctactgaaaatagaaaaaaaattagctgggcgtggtggcagacacctgtagtcccagctacttaggacgctgaggcaggagagtcgcttgaacctgggaggtggaggttgcagtgagccaagatcatgccattgcactccagcctgggcaacagagtgagatcctgtctcaaaaaaacaaaaagaacaacaaaaaacaacaacaataaaccctggctagccatgctggctcatgcctatagtcccaacaatttgggaggctgaggtgggagggttgttggagcccaggagttggagagcagcctgggcaaagtagcaagacccccatctctacaaaaa

SEQ ID NO: 34885 - DNA, 293 bp, Homo sapiens
caagggctcgacttcccctgtaagtagaatactacctaccagaggaacgccaaaggcttaactcagcccctccttgcccgcctttgtctacaggtcccaatctcagatgaccaaaaagcatctgctccaagcagagagttggaaagttacattatcagttactttgtcaatattaaaccagatcccttggggaactggtttccaggagacacgtggttattcagagagcctgattcctcacgattagctgtaggcgtttggggtcgacgcggccgcgaatttagtagtagtag

SEQ ID NO: 34886 - DNA, 505 bp, Homo sapiens
caagggctcgacttcccctgtaagtagaatactacctaccagaggaacgccaaaggcttaactcagcccctccttgcccgcctttgtctacaggtcccaatctcagatgaccaaaaagcatctgctccaagcagagagttggaaagttacattatcagttactttgtcaatattaaaccagatcccttggggaactggtttccaggagacacgtggttattcagagagcctgattcctcacgattagctgtaggcgtttggggacagtaggaagacaatggatcaaggcccttatgctcaattgtggactaagtaattgtgctcaaaaataatatattcagtcacaggcttttcttctgggtatttcgccagagattagacacttactgagtgtgccacatccacgtaagcatgaatcctttcaaccatcatgaggaaaatgttactcccagttttcccaggggaaactgaggtgtagaggctgaactccttcagagtctcagga

SEQ ID NO: 34887 - DNA, 434 bp, Homo sapiens
ggtcgactgatattttaaaaatgatataactcattagacttttctgataaatgaaacactatggacgttataaattcctcattagtttgcccaggtatattggagattgagtcaaaatcatgaatttaagtaggacaaagttttttgttcttgtttaacttttagaatacttttgtgttaactagattttttttcttaagctatcaatttttttcccttaaaactttttagggaagaaagttttgaaagtttaagttaggccacatacagtggttcacacctatagtcccaacaatttgggaggccaaggtgggaagatcacttgcgctctagagttcaagacagcctggccaacatagtgagacctcatctcttctaaaaataaaaattagccaggcacggtggctcgtgcctatggtcccagccacttggga

SEQ ID NO: 34888 - DNA, 569 bp, Homo sapiens
ctctcaacacaagaaacacagtgttatgatgaaagggggcatatctcagcagaattttcttaagatttttctcccatatctgctgctctctcatctgctggccattggattgaggatctacactggaacacatcaggcaaccttcaccagcactttttgataaagaattggaatttgactctgtttacatagtagaactatatctgagattgcaacatatctaactgaagactattatgattcatgatttttgggtagtcacgtcacttgcattgatttgttctgtaagagtggcattcctaatttagtaaaacataagaatagactgtgagccaccatgcccagctgacctattattatatctatgggatgaattaataagcatgtcagattaatatctactgtaacaattagtaattttctttggatattagatataaatatctaagtataaataatcttaatatactagtaatgacatacattttaaaaattatctgtaaccttcactcagttataatactttatatttcaaaagaataaataacgatattaaaattactatttaa

SEQ ID NO: 34889 - DNA, 1657 bp, Homo sapiens
gttctattttttctgtagagacggggttttgccatgttgcccaggctggtctcagactcctgggctcaagcgatcatttcgcctcagcctcccaaagtgctgagattataggtgtgagccacagcatctggcccagagtgaggagaattaatgagattttttgtgtgtgttagataatattgatttaagcctttttttaaaaagtactctcaaccaaatacaaaattgaaaatgtgaggtttaatagaaatgtgttggctatttgcaatggattttcttcttgcccaagtgtttggagttctactttatgctctgtatttaaaaattagtgacctcaaagcagagttgatgacacaggctttggggccctcatgttcttgtctttagaacatatcactactaagtatcagcttatcttcagaacattacaacattcaccgtgttcatatgctttctgagaagtcaccacttgtaatttcagatcacatacacctgaaggcattttatagttcctaaagttaacatgttagatcttttttttccaccccatgagggtctcactctcacccaggctggaatgcagtggtgtgattgtagcacactttggccaccaactcctgggctcaagtgatcctcctgctttggcctcctctgagaagctgggattactggtgcacaccaccacacctggctaattttttatttttttttatttttggaaatagggtatggctatgttgccttgggcccgtcatgaactcctagcctcaggtgaccctcccacctcaggcctcccaaagggttgggattacaggagtgagctactgcactgggccaacatgttaattttttttttttttttttttgagatggagtctcccaggcgggaatgcaatggtgcgatctcgacttcactgcaatcttcacctcccgggttcgagcgattctcccacctcagcctcctgagtagctgggattacaggcacctgccatcacgctcggctaatttttgtattttgagcagagatggagtttcaccatgttggccaggtgatctgcactcccactccccccacacttcccaaagtgctgggattacaggcataagccacaagccacctcacccagccaacatgttacatcttaattcttggattttcttcactgcagggctttgggtggagaaataaaactcttcaaatgcataatcttggagatccctgtgaatcaataattctttagacaactgcggctcaaaatccctcctttcccttttccgagttattccatccatcttattagaaaggaagtgaattaggtgtaggtggtctgtaacacctgcacatctttttatacgtgtagagggtatgcctgggatatataggttgtcttcaagcagtagctgctactacagctagagagaggaggagtgccaggaaactgatgacctgagaccaagagtcttgttgatgttctgacgtgtcgagataaaggttttgatcattttcatgaaataatgcagggaagtcatttctgctgtttctttactactccattcttggaggattagaacaagtcacactgtaattgactaaaacgactttttattttaaaatattgatggtgggaggagaggaaggggatctctagagcggcc

SEQ ID NO: 34890 - DNA, 1345 bp, Homo sapiens
gttctattttttctgtagagacggggttttgccatgttgcccaggctggtctcagactcctgggctcaagcgatcatttcgcctcagcctcccaaagtgctgagattataggtgtgagccacagcatctggcccagagtgaggagaattaatgagattttttgtgtgtgttagataatattgatttaagcctttttttaaaaagtactctcaaccaaatacaaaattgaaaatgtgaggtttaatagaaatgtgttggctatttgcaatggattttcttcttgcccaagtgtttggagttctactttatgctctgtatttaaaaattagtgacctcaaagcagagttgatgacacaggctttggggccctcatgttcttgtctttagaacatatcactactaagtatcagcttatcttcagaacattacaacattcaccgtgttcatatgctttctgagaagtcaccacttgtaatttcagatcacatacacctgaaggcattttatagttcctaaagttaacatgttagatcttttttttccaccccatgagggtctcactctcacccaggctggaatgcagtggtgtgattgtagcacactttggccaccaactcctgggctcaagtgatcctcctgctttggcctcctctgagaagctgggattaaggcacctgccatcacgctcggctaatttttgtattttgagcagagatggagtttcaccatgttggccaggtgatctgcactcccactccccccacacttcccaaagtgctgggattacaggcataagccacaagccacctcacccagccaacatgttacatcttaattcttggattttcttcactgcagggctttgggtggagaaataaaactcttcaaatgcataatcttggagatccctgtgaatcaataattctttagacaactgcggctcaaaatccctcctttcccttttccgagttattccatccatcttattagaaaggaagtgaattaggtgtaggtggtctgtaacacctgcacatctttttatacgtgtagagggtatgcctgggatatataggttgtcttcaagcagtagctgctactacagctagagagaggaggagtgccaggaaactgatgacctgagaccaagagtcttgttgatgttctgacgtgtcgagataaaggttttgatcattttcatgaaataatgcagggaagtcatttctgctgtttctttactactccattcttggaggattagaacaagtcacactgtaattgactaaaacgactttttattttaaaatattgatggtgggaggagaggaaggggatctctagagcggcc

SEQ ID NO: 34891 - DNA, 511 bp, Homo sapiens
gctgactccaggacttatctcgacacgtcagggtggagaaataaaactcttcaaatgcataatcttggagatccctgtgaatcaataattctttagacaactgcggctcaaaatccctcctttcccttttccgagttattccatccatcttattagaaaggaagtgaattaggtgtaggtggtctgtaacacctgcacatctttttatacgtgtagagggtatgcctgggatatataggttgtcttcaagcagtagctgctactacagctagagagaggaggagtgccaggaaactgatgacctgagaccaagagtcttgttgatgttctgacgtgtcgagataaaggttttgatcattttcatgaaataatgcagggaagtcatttctgctgtttctttactactccattcttggaggattagaacaagtcacactgtaattgactaaaacgactttttattttaaaatattgatggtgggaggagaggaaggggatctctagagcggcc

SEQ ID NO: 34892 - DNA, 3546 bp, Homo sapiens
cccgcccgcccgcgctcctcccggccgctcctcccgccccgcccggcccggcgccgactctgcggccgcccgacgagcccctcgcggcactgccccggccccggccccggccccggccccctcccgccgcaccgcccccggcccggccctccgccctccgcactcccgcctccctccctccgcccgctcccgcgccctcctccctccctcctccccagctgtcccgttcgcgtcatgccgagcctcccggccccgccggccccgctgctgctcctcgggctgctgctgctcggctcccggccggcccgcggcgccggcccagagccccccgtgctgcccatccgttctgagaaggagccgctgcccgttcggggagcggcaggctgcaccttcggcgggaaggtctatgccttggacgagacgtggcacccggacctaggggagccattcggggtgatgcgctgcgtgctgtgcgcctgcgaggcgacagggaccttgaggcccagagagatgaagtagcttgtctagggtcacgcagcttcctcagtggggtcgccgtaccaggggccctggcagggtcagctgcaagaacatcaaaccagagtgcccaaccccggcctgtgggcagccgcgccagctgccgggacactgctgccagacctgcccccaggagcgcagcagttcggagcggcagccgagcggcctgtccttcgagtatccgcgggacccggagcatcgcagttatagcgaccgcggggagccaggcgctgaggagcgggcccgtggtgacggccacacggacttcgtggcgctgctgacagggccgaggtcgcaggcggtggcacgagcccgagtctcgctgctgcgctctagcctccgcttctctatctcctacaggcggctggaccgccctaccaggatccgcttctcagactccaatggcagtgtcctgtttgagcaccctgcagcccccacccaagatggcctggtctgtggggtgtggcgggcagtgcctcggttgtctctgcggctccttagggcagaacagctgcatgtggcacttgtgacactcactcacccttcaggggaggtctgggggcctctcatccggcaccgggccctggctgcagagaccttcagtgccatcctgactctagaaggccccccacagcagggcgtagggggcatcaccctgctcactctcagtgacacagaggactccttgcattttttgctgctcttccgagggctgctggaacccaggagtggggattctacaccaggggcagctactgcgagaacttcaggccaatgtctcagcccaggaaccaggctttgctgaggtgctgcccaacctgacagtccaggagatggactggctggtgctgggggagctgcagatggccctggagtgggcaggcaggccagggctgcgcatcagtggacacattgctgccaggaagagctgcgacgtcctgcaaagtgtcctttgtggggctgatgccctgatcccagtccagacgggtgctgccggctcagccagcctcacgctgctaggaaatggctccctgatctatcaggtgcaagtggtagggacaagcagtgaggtggtggccatgacactggagaccaagcctcagcggagggatcagcgcactgtcctgtgccacatggctggactccagccaggaggacacacggccgtgggtatctgccctgggctgggtgcccgaggggctcatatgctgctgcagaatgagctcttcctgaacgtgggcaccaaggacttcccagacggagagcttcgggggcacgtggctgccctgccctactgtgggcatagcgcccgccatgacacgctgcccgtgcccctagcaggagccctggtgctaccccctgtgaagagccaagcagcagggcacgcctggctttccttggatacccactgtcacctgcactatgaagtgctgctggctgggcttggtggctcagaacaaggcactgtcactgcccacctccttgggcctcctggaacgccagggcctcggcggctgctgaagggattctatggctcagaggcccagggtgtggtgaaggacctggagccggaactgctgcggcacctggcaaaaggcatggcctccctgatgatcaccaccaagggtagccccagaggggagctccgagggcaggtgcacatagccaaccaatgtgaggttggcggactgcgcctggaggcggccggggccgagggggtgcgggcgctgggggctccggatacagcctctgctgcgccgcctgtggtgcctggtctcccggccctagcgcccgccaaacctggtggtcctgggcggccccgagaccccaacacatgcttcttcgaggggcagcagcgcccccacggggctcgctgggcgcccaactacgacccgctctgctcactctgcacctgccagagacgaacggtgatctgtgacccggtggtgtgcccaccgcccagctgcccacacccggtgcaggctcccgaccagtgctgccctgtttgccctgagaaacaagatgtcagagacttgccagggctgccaaggagccgggacccaggagagggctgctattttgatggtgaccggagctggcgggcagcgggtacgcggtggcaccccgttgtgcccccctttggcttaattaagtgtgctgtctgcacctgcaaggggggcactggagaggtgcactgtgagaaggtgcagtgtccccggctggcctgtgcccagcctgtgcgtgtcaaccccaccgactgctgcaaacagtgtccagtggggtcgggggcccacccccagctgggggaccccatgcaggctgatgggccccggggctgccgttttgctgggcagtggttcccagagagtcagagctggcacccctcagtgcccccttttggagagatgagctgtatcacctgcagatgtggggcaggggtgcctcactgtgagcgggatgactgttcactgccactgtcctgtggctcggggaaggagagtcgatgctgttcccgctgcacggcccaccggcggccagccccagagaccagaactgatccagagctggagaaagaagccgaaggctcttagggagcagccagagggccaagtgaccaagaggatggggcctgagctggggaaggggtggcatcgaggaccttcttgcattctcctgtgggaagcccagtgcctttgctcctctgtcctgcctctactcccacccccactacctctgggaaccacagctccacaagggggagaggcagctgggccagaccgaggtcacagccactccaagtcctgccctgccaccctcggcctctgtcctggaagccccacccctttcctcctgtacataatgtcactggcttgttgggatttttaatttatcttcactcagcaccaagggcccccgacactccactcctgctgcccctgagctgagcagagtcattattggagagttttgtatttattaaaacatttctttttcagtcaaaaaacatga

SEQ ID NO: 34893 - DNA, 3520 bp, Homo sapiens
cccgcccgcccgcgctcctcccggccgctcctcccgccccgcccggcccggcgccgactctgcggccgcccgacgagcccctcgcggcactgccccggccccggccccggccccggccccctcccgccgcaccgcccccggcccggccctccgccctccgcactcccgcctccctccctccgcccgctcccgcgccctcctccctccctcctccccagctgtcccgttcgcgtcatgccgagcctcccggccccgccggccccgctgctgctcctcgggctgctgctgctcggctcccggccggcccgcggcgccggcccagagccccccgtgctgcccatccgttctgagaaggagccgctgcccgttcggggagcggcaggctgcaccttcggcgggaaggtctatgccttggacgagacgtggcacccggacctaggggagccattcggggtgatgcgctgcgtgctgtgcgcctgcgaggcgcctcagtggggtcgccgtaccaggggccctggcagggtcagctgcaagaacatcaaaccagagtgcccaaccccggcctgtgggcagccgcgccagctgccgggacactgctgccagacctgcccccaggagcgcagcagttcggagcggcagccgagcggcctgtccttcgagtatccgcgggacccggagcatcgcagttatagcgaccgcggggagccaggcgctgaggagcgggcccgtggtgacggccacacggacttcgtggcgctgctgacagggccgaggtcgcaggcggtggcacgagcccgagtctcgctgctgcgctctagcctccgcttctctatctcctacaggcggctggaccgccctaccaggatccgcttctcagactccaatggcagtgtcctgtttgagcaccctgcagcccccacccaagatggcctggtctgtggggtgtggcgggcagtgcctcggttgtctctgcggctccttagggcagaacagctgcatgtggcacttgtgacactcactcacccttcaggggaggtctgggggcctctcatccggcaccgggccctggctgcagagaccttcagtgccatcctgactctagaaggccccccacagcagggcgtagggggcatcaccctgctcactctcagtgacacagaggactccttgcattttttgctgctcttccgagggctgctggaacccaggagtgggggactaacccaggttcccttgaggctccagattctacaccaggggcagctactgcgagaacttcaggccaatgtctcagcccaggaaccaggctttgctgaggtgctgcccaacctgacagtccaggagatggactggctggtgctgggggagctgcagatggccctggagtgggcaggcaggccagggctgcgcatcagtggacacattgctgccaggaagagctgcgacgtcctgcaaagtgtcctttgtggggctgatgccctgatcccagtccagacgggtgctgccggctcagccagcctcacgctgctaggaaatggctccctgatctatcaggtgcaagtggtagggacaagcagtgaggtggtggccatgacactggagaccaagcctcagcggagggatcagcgcactgtcctgtgccacatggctggactccagccaggaggacacacggccgtgggtatctgccctgggctgggtgcccgaggggctcatatgctgctgcagaatgagctcttcctgaacgtgggcaccaaggacttcccagacggagagcttcgggggcacgtggctgccctgccctactgtgggcatagcgcccgccatgacacgctgcccgtgcccctagcaggagccctggtgctaccccctgtgaagagccaagcagcagggcacgcctggctttccttggatacccactgtcacctgcactatgaagtgctgctggctgggcttggtggctcagaacaaggcactgtcactgcccacctccttgggcctcctggaacgccagggcctcggcggctgctgaagggattctatggctcagaggcccagggtgtggtgaaggacctggagccggaactgctgcggcacctggcaaaaggcatggcctccctgatgatcaccaccaagggtagccccagaggggagctccgagggcaggtgcacatagccaaccaatgtgaggttggcggactgcgcctggaggcggccggggccgagggggtgcgggcgctgggggctccggatacagcctctgctgcgccgcctgtggtgcctggtctcccggccctagcgcccgccaaacctggtggtcctgggcggccccgagaccccaacacatgcttcttcgaggggcagcagcgcccccacggggctcgctgggcgcccaactacgacccgctctgctcactctgcacctgccagagacgaacggtgatctgtgacccggtggtgtgcccaccgcccagctgcccacacccggtgcaggctcccgaccagtgctgccctgtttgccctgagaaacaagatgtcagagacttgccagggctgccaaggagccgggacccaggagagggctgctattttgatggtgaccggagctggcgggcagcgggtacgcggtggcaccccgttgtgcccccctttggcttaattaagtgtgctgtctgcacctgcaaggggggcactggagaggtgcactgtgagaaggtgcagtgtccccggctggcctgtgcccagcctgtgcgtgtcaaccccaccgactgctgcaaacagtgtccagtggggtcgggggcccacccccagctgggggaccccatgcaggctgatgggccccggggctgccgttttgctgggcagtggttcccagagagtcagagctggcacccctcagtgcccccttttggagagatgagctgtatcacctgcagatgtggggcaggggtgcctcactgtgagcgggatgactgttcactgccactgtcctgtggctcggggaaggagagtcgatgctgttcccgctgcacggcccaccggcggccagccccagagaccagaactgatccagagctggagaaagaagccgaaggctcttagggagcagccagagggccaagtgaccaagaggatggggcctgagctggggaaggggtggcatcgaggaccttcttgcattctcctgtgggaagcccagtgcctttgctcctctgtcctgcctctactcccacccccactacctctgggaaccacagctccacaagggggagaggcagctgggccagaccgaggtcacagccactccaagtcctgccctgccaccctcggcctctgtcctggaagccccacccctttcctcctgtacataatgtcactggcttgttgggatttttaatttatcttcactcagcaccaagggcccccgacactccactcctgctgcccctgagctgagcagagtcattattggagagttttgtatttattaaaacatttctttttcagtcaaaaaacatga

SEQ ID NO: 34894 - DNA, 3491 bp, Homo sapiens
cccgcccgcccgcgctcctcccggccgctcctcccgccccgcccggcccggcgccgactctgcggccgcccgacgagcccctcgcggcactgccccggccccggccccggccccggccccctcccgccgcaccgcccccggcccggccctccgccctccgcactcccgcctccctccctccgcccgctcccgcgccctcctccctccctcctccccagctgtcccgttcgcgtcatgccgagcctcccggccccgccggccccgctgctgctcctcgggctgctgctgctcggctcccggccggcccgcggcgccggcccagagccccccgtgctgcccatccgttctgagaaggagccgctgcccgttcggggagcggcaggctgcaccttcggcgggaaggtctatgccttggacgagacgtggcacccggacctaggggagccattcggggtgatgcgctgcgtgctgtgcgcctgcgaggcgcctcagtggggtcgccgtaccaggggccctggcagggtcagctgcaagaacatcaaaccagagtgcccaaccccggcctgtgggcagccgcgccagctgccgggacactgctgccagacctgcccccaggagcgcagcagttcggagcggcagccgagcggcctgtccttcgagtatccgcgggacccggagcatcgcagttatagcgaccgcggggagccaggcgctgaggagcgggcccgtggtgacggccacacggacttcgtggcgctgctgacagggccgaggtcgcaggcggtggcacgagcccgagtctcgctgctgcgctctagcctccgcttctctatctcctacaggcggctggaccgccctaccaggatccgcttctcagactccaatggcagtgtcctgtttgagcaccctgcagcccccacccaagatggcctggtctgtggggtgtggcgggcagtgcctcggttgtctctgcggctccttagggcagaacagctgcatgtggcacttgtgacactcactcacccttcaggggaggtctgggggcctctcatccggcaccgggccctggctgcagagaccttcagtgccatcctgactctagaaggccccccacagcagggcgtagggggcatcaccctgctcactctcagtgacacagaggactccttgcattttttgctgctcttccgagggctgctggaacccaggagtggggattctacaccaggggcagctactgcgagaacttcaggccaatgtctcagcccaggaaccaggctttgctgaggtgctgcccaacctgacagtccaggagatggactggctggtgctgggggagctgcagatggccctggagtgggcaggcaggccagggctgcgcatcagtggacacattgctgccaggaagagctgcgacgtcctgcaaagtgtcctttgtggggctgatgccctgatcccagtccagacgggtgctgccggctcagccagcctcacgctgctaggaaatggctccctgatctatcaggtgcaagtggtagggacaagcagtgaggtggtggccatgacactggagaccaagcctcagcggagggatcagcgcactgtcctgtgccacatggctggactccagccaggaggacacacggccgtgggtatctgccctgggctgggtgcccgaggggctcatatgctgctgcagaatgagctcttcctgaacgtgggcaccaaggacttcccagacggagagcttcgggggcacgtggctgccctgccctactgtgggcatagcgcccgccatgacacgctgcccgtgcccctagcaggagccctggtgctaccccctgtgaagagccaagcagcagggcacgcctggctttccttggatacccactgtcacctgcactatgaagtgctgctggctgggcttggtggctcagaacaaggcactgtcactgcccacctccttgggcctcctggaacgccagggcctcggcggctgctgaagggattctatggctcagaggcccagggtgtggtgaaggacctggagccggaactgctgcggcacctggcaaaaggcatggcctccctgatgatcaccaccaagggtagccccagaggggagctccgagggcaggtgcacatagccaaccaatgtgaggttggcggactgcgcctggaggcggccggggccgagggggtgcgggcgctgggggctccggatacagcctctgctgcgccgcctgtggtgcctggtctcccggccctagcgcccgccaaacctggtggtcctgggcggccccgagaccccaacacatgcttcttcgaggggcagcagcgcccccacggggctcgctgggcgcccaactacgacccgctctgctcactctgcacctgccagagacgaacggtgatctgtgacccggtggtgtgcccaccgcccagctgcccacacccggtgcaggctcccgaccagtgctgccctgtttgccctgagaaacaagatgtcagagacttgccagggctgccaaggagccgggacccaggagagggctgctattttgatggtgaccggagctggcgggcagcgggtacgcggtggcaccccgttgtgcccccctttggcttaattaagtgtgctgtctgcacctgcaaggggggcactggagaggtgcactgtgagaaggtgcagtgtccccggctggcctgtgcccagcctgtgcgtgtcaaccccaccgactgctgcaaacagtgtccagtggggtcgggggcccacccccagctgggggaccccatgcaggctgatgggccccggggctgccgttttgctgggcagtggttcccagagagtcagagctggcacccctcagtgcccccttttggagagatgagctgtatcacctgcagatgtggggcaggggtgcctcactgtgagcgggatgactgttcactgccactgtcctgtggctcggggaaggagagtcgatgctgttcccgctgcacggcccaccggcggccagccccagagaccagaactgatccagagctggagaaagaagccgaaggctcttagggagcagccagagggccaagtgaccaagaggatggggcctgagctggggaaggggtggcatcgaggaccttcttgcattctcctgtgggaagcccagtgcctttgctcctctgtcctgcctctactcccacccccactacctctgggaaccacagctccacaagggggagaggcagctgggccagaccgaggtcacagccactccaagtcctgccctgccaccctcggcctctgtcctggaagccccacccctttcctcctgtacataatgtcactggcttgttgggatttttaatttatcttcactcagcaccaagggcccccgacactccactcctgctgcccctgagctgagcagagtcattattggagagttttgtatttattaaaacatttctttttcagtcaaaaaacatga

SEQ ID NO: 34895 - DNA, 3455 bp, Homo sapiens
cccgcccgcccgcgctcctcccggccgctcctcccgccccgcccggcccggcgccgactctgcggccgcccgacgagcccctcgcggcactgccccggccccggccccggccccggccccctcccgccgcaccgcccccggcccggccctccgccctccgcactcccgcctccctccctccgcccgctcccgcgccctcctccctccctcctccccagctgtcccgttcgcgtcatgccgagcctcccggccccgccggccccgctgctgctcctcgggctgctgctgctcggctcccggccggcccgcggcgccggcccagagccccccgtgctgcccatccgttctgagaaggagccgctgcccgttcggggagcggcaggctgcaccttcggcgggaaggtctatgccttggacgagacgtggcacccggacctaggggagccattcggggtgatgcgctgcgtgctgtgcgcctgcgaggcgacagggaccttgaggcccagagagatgaagtagcttgtctagggtcacgcagcttcctcagtggggtcgccgtaccaggggccctggcagggtcagctgcaagaacatcaaaccagagtgcccaaccccggcctgtgggcagccgcgccagctgccgggacactgctgccagacctgcccccaggagcgcagcagttcggagcggcagccgagcggcctgtccttcgagtatccgcgggacccggagcatcgcagttatagcgaccgcggggagccaggcgctgaggagcgggcccgtggtgacggccacacggacttcgtggcgctgctgacagggccgaggtcgcaggcggtggcacgagcccgagtctcgctgctgcgctctagcctccgcttctctatctcctacaggcggctggaccgccctaccaggatccgcttctcagactccaatggcagtgtcctgtttgagcaccctgcagcccccacccaagatggcctggtctgtggggtgtggcgggcagtgcctcggttgtctctgcggctccttagggcagaacagctgcatgtggcacttgtgacactcactcacccttcaggggaggtctgggggcctctcatccggcaccgggccctggctgcagagaccttcagtgccatcctgactctagaaggccccccacagcagggcgtagggggcatcaccctgctcactctcagtgacacagaggactccttgcattttttgctgctcttccgagggctgctggaacccaggagtgggggactaacccaggttcccttgaggctccagattctacaccaggggcagctactgcgagaacttcaggccaatgtctcagcccaggaaccaggctttgctgaggtgctgcccaacctgacagtccaggagatggactggctggtgctgggggagctgcagatggccctggagtgggcaggcaggccagggctgcgcatcagtggacacattgctgccaggaagagctgcgacgtcctgcaaagtgtcctttgtggggctgatgccctgatcccagtccagacgggtgctgccggctcagccagcctcacgctgctaggaaatggctccctgatctatcaggccgtgggtatctgccctgggctgggtgcccgaggggctcatatgctgctgcagaatgagctcttcctgaacgtgggcaccaaggacttcccagacggagagcttcgggggcacgtggctgccctgccctactgtgggcatagcgcccgccatgacacgctgcccgtgcccctagcaggagccctggtgctaccccctgtgaagagccaagcagcagggcacgcctggctttccttggatacccactgtcacctgcactatgaagtgctgctggctgggcttggtggctcagaacaaggcactgtcactgcccacctccttgggcctcctggaacgccagggcctcggcggctgctgaagggattctatggctcagaggcccagggtgtggtgaaggacctggagccggaactgctgcggcacctggcaaaaggcatggcctccctgatgatcaccaccaagggtagccccagaggggagctccgagggcaggtgcacatagccaaccaatgtgaggttggcggactgcgcctggaggcggccggggccgagggggtgcgggcgctgggggctccggatacagcctctgctgcgccgcctgtggtgcctggtctcccggccctagcgcccgccaaacctggtggtcctgggcggccccgagaccccaacacatgcttcttcgaggggcagcagcgcccccacggggctcgctgggcgcccaactacgacccgctctgctcactctgcacctgccagagacgaacggtgatctgtgacccggtggtgtgcccaccgcccagctgcccacacccggtgcaggctcccgaccagtgctgccctgtttgccctgagaaacaagatgtcagagacttgccagggctgccaaggagccgggacccaggagagggctgctattttgatggtgaccggagctggcgggcagcgggtacgcggtggcaccccgttgtgcccccctttggcttaattaagtgtgctgtctgcacctgcaaggggggcactggagaggtgcactgtgagaaggtgcagtgtccccggctggcctgtgcccagcctgtgcgtgtcaaccccaccgactgctgcaaacagtgtccagtggggtcgggggcccacccccagctgggggaccccatgcaggctgatgggccccggggctgccgttttgctgggcagtggttcccagagagtcagagctggcacccctcagtgcccccttttggagagatgagctgtatcacctgcagatgtggggcaggggtgcctcactgtgagcgggatgactgttcactgccactgtcctgtggctcggggaaggagagtcgatgctgttcccgctgcacggcccaccggcggccagccccagagaccagaactgatccagagctggagaaagaagccgaaggctcttagggagcagccagagggccaagtgaccaagaggatggggcctgagctggggaaggggtggcatcgaggaccttcttgcattctcctgtgggaagcccagtgcctttgctcctctgtcctgcctctactcccacccccactacctctgggaaccacagctccacaagggggagaggcagctgggccagaccgaggtcacagccactccaagtcctgccctgccaccctcggcctctgtcctggaagccccacccctttcctcctgtacataatgtcactggcttgttgggatttttaatttatcttcactcagcaccaagggcccccgacactccactcctgctgcccctgagctgagcagagtcattattggagagttttgtatttattaaaacatttctttttcagtcaaaaaacatga

SEQ ID NO: 34896 - DNA, 3471 bp, Homo sapiens
cccgcccgcccgcgctcctcccggccgctcctcccgccccgcccggcccggcgccgactctgcggccgcccgacgagcccctcgcggcactgccccggccccggccccggccccggccccctcccgccgcaccgcccccggcccggccctccgccctccgcactcccgcctccctccctccgcccgctcccgcgccctcctccctccctcctccccagctgtcccgttcgcgtcatgccgagcctcccggccccgccggccccgctgctgctcctcgggctgctgctgctcggctcccggccggcccgcggcgccggcccagagccccccgtgctgcccatccgttctgagaaggagccgctgcccgttcggggagcggcaggctgcaccttcggcgggaaggtctatgccttggacgagacgtggcacccggacctaggggagccattcggggtgatgcgctgcgtgctgtgcgcctgcgaggcgacagggaccttgaggcccagagagatgaagtagcttgtctagggtcacgcagcttcctcagtggggtcgccgtaccaggggccctggcagggtcagctgcaagaacatcaaaccagagtgcccaaccccggcctgtgggcagccgcgccagctgccgggacactgctgccagacctgcccccaggagcgcagcagttcggagcggcagccgagcggcctgtccttcgagtatccgcgggacccggagcatcgcagttatagcgaccgcggggagccaggcgctgaggagcgggcccgtggtgacggccacacggacttcgtggcgctgctgacagggccgaggtcgcaggcggtggcacgagcccgagtctcgctgctgcgctctagcctccgcttctctatctcctacaggcggctggaccgccctaccaggatccgcttctcagactccaatggcagtgtcctgtttgagcaccctgcagcccccacccaagatggcctggtctgtggggtgtggcgggcagtgcctcggttgtctctgcggctccttagggcagaacagctgcatgtggcacttgtgacactcactcacccttcaggggaggtctgggggcctctcatccggcaccgggccctggctgcagagaccttcagtgccatcctgactctagaaggccccccacagcagggcgtagggggcatcaccctgctcactctcagtgacacagaggactccttgcattttttgctgctcttccgagggctgctggaacccaggagtgggggactaacccaggttcccttgaggctccagattctacaccaggggcagctactgcgagaacttcaggccaatgtctcagcccaggaaccaggctttgctgaggtgctgcccaacctgacagtccaggagatggactggctggtgctgggggagctgcagatggccctggagtgggcaggcaggccagggctgcgcatcagtggacacattgctgccaggaagagctgcgacgtcctgcaaagtgtcctttgtggggctgatgccctgatcccagtccagacgggtgctgccggctcagccagcctcacgctgctaggaaatggctccctgatctatcaggtgcaagtggtagggacaagcagtgaggtggtggccatgacactggagaccaagcctcagcggagggatcagcgcactgtcctgtgccacatggctggactccagccaggaggacacacggccgtgggtatctgccctgggctgggtgcccgaggggctcatatgctgctgcagaatgagctcttcctgaacgtgggcaccaaggacttcccagacggagagcttcgggggcacgtggctgccctgccctactgtgggcatagcgcccgccatgacacgctgcccgtgcccctagcaggagccctggtgctaccccctgtgaagagccaagcagcagggcacgcctggctttccttggatacccactgtcacctgcactatgaagtgctgctggctgggcttggtggctcagaacaaggcactgtcactgcccacctccttgggcctcctggaacgccagggcctcggcggctgctgaagggattctatggctcagaggcccagggtgtggtgaaggacctggagccggaactgctgcggcacctggcaaaaggcatggcctccctgatgatcaccaccaagggtagccccagaggggagctccgagggcaggtgcacatagccaaccaatgtgaggttggcggactgcgcctggaggcggccggggccgagggggtgcgggcgctgggggctccggatacagcctctgctgcgccgcctgtggtgcctggtctcccggccctagcgcccgccaaacctggtggtcctgggcggccccgagaccccaacacatgcttcttcgaggggcagcagcgcccccacggggctcgctgggcgcccaactacgacccgctctgctcactctgcacctgccagagacgaacggtgatctgtgacccggtggtgtgcccaccgcccagctgcccacacccggtgcaggctcccgaccagtgctgccctgtttgccctgagaaacaagatgtcagagacttgccagggctgccaaggagccgggacccaggagagggggggcactggagaggtgcactgtgagaaggtgcagtgtccccggctggcctgtgcccagcctgtgcgtgtcaaccccaccgactgctgcaaacagtgtccagtggggtcgggggcccacccccagctgggggaccccatgcaggctgatgggccccggggctgccgttttgctgggcagtggttcccagagagtcagagctggcacccctcagtgcccccttttggagagatgagctgtatcacctgcagatgtggggcaggggtgcctcactgtgagcgggatgactgttcactgccactgtcctgtggctcggggaaggagagtcgatgctgttcccgctgcacggcccaccggcggccagccccagagaccagaactgatccagagctggagaaagaagccgaaggctcttagggagcagccagagggccaagtgaccaagaggatggggcctgagctggggaaggggtggcatcgaggaccttcttgcattctcctgtgggaagcccagtgcctttgctcctctgtcctgcctctactcccacccccactacctctgggaaccacagctccacaagggggagaggcagctgggccagaccgaggtcacagccactccaagtcctgccctgccaccctcggcctctgtcctggaagccccacccctttcctcctgtacataatgtcactggcttgttgggatttttaatttatcttcactcagcaccaagggcccccgacactccactcctgctgcccctgagctgagcagagtcattattggagagttttgtatttattaaaacatttctttttcagtcaaaaaacatga

SEQ ID NO: 34897 - DNA, 349 bp, Homo sapiens
aaaacacgtgagaaggttagggagagcacctgtctcagaaaggcccacatgtgcggccttgcaggactaacccaggttcccttgaggctccagattctacaccaggggcagctactgcgagaacttcaggccaatgtctcagcccaggtgagtggggatctggctctcgctgccacctgtcttggcctcttgctattgcccatcacaccctgctctgtccccaggaaccaggctttgctgaggtgctgcccaacctgacagtccaggagatggactggctggtgctgggggagctgcagatggccctggagtgggcaggcaggccagggctgcgcatcagtggacacat

SEQ ID NO: 34898 - DNA, 333 bp, Homo sapiens
atgtgacatttagatacattgcaatcatgacaaatatttggatttcaaaatgacgtgtgagccatttatatttttgttgtgctttgttatcttatgggctcccataagataacaaggcttcaacactatggcttgaaaatgttttgatctgaaaggtatattagggaacacacagcataatcctaccactttgcttctgtctggtgaaatgtcaattgtttcctctctctgagcaccagctgtccaaatggcatgggaaggggcagtggaggggaagagaatgaaaatgagggaggttctaagaaggtggcaaggaattgggatgcaaaatcc

SEQ ID NO: 34899 - DNA, 413 bp, Homo sapiens
tagggaattggccttaaggggagccctttcttcctaagagattcttaggtgattctcacttcctcttgccccagtattatttttgtttttggtatggctcactcagatccttttttcctcctatccctaagtaatccgggtttctttttcccatatttagaacaaaatgtatttatgcagagtgtgtccaaacctcaacccaaggcctgtatacaaaataaatcaaattaaacacatctttactgtcttctacctctttcctgacctcaatatatcccaacttgcctcactctgagaaccaaggctgtcccagcacctgagtcgcagatattctactgatttgacagaactgtgtgactatctggaacagcattttgatccacaatttgcccagttacaaagcttaaatgagc

SEQ ID NO: 34900 - DNA, 401 bp, Homo sapiens
gaaggtggatcgtttgagctcaggagttcaagaccagcttgggcaacatgacaaaactctgtctttatataaaaatatgtatataaattttattaaatgtaagaaagtgtggaccgggcacggtggcttacgcctgtaatcctagcactttggggggctgagacgggtggatcacctgaggtcagaagttcaagaccagcctggtcaacatggtgaaaccccgtctctactaaatatacaaaaattagccaggcatggtggtaggcacctgtaatcccagctactcgggaggctgaggcagaagaattgcttgaacccaggaggcagaggttgcagtgagctgagatcacaccattgtgctccagcctgggcaataagagtgagacttcatctcaaaaaaa

SEQ ID NO: 34901 - DNA, 317 bp, Homo sapiens
ggtcgactgaagactcaaccacagtgtcatcctttgtacagaataggattctaatcaggagaccagtgctcatgtgcacagctttgagtcttcatgacaattctcccaaaactgaagataaacattgtagtcattttcatgtttgttcagccaacactggtttgcttcccttttccagttaatttgctcttgtttgtaacccctcaagatgtgggtatttcctaagaagaatctctggatcacagtacaattataaaaatcagaaagtgacagccttacggtactgtgatctaacggacagacacaattccagtttc

SEQ ID NO: 34902 - DNA, 733 bp, Homo sapiens
gaggaatcttctctgaaatatttctgaaaagtggtcatctagcctctgaacacttttaataataggatttctttacaagacagcccaccccattatcaacaagttgtgcttatttgaaagggacagaaaaattaggggtcttgctatagtcacacaatgaggtaatgagaagctggaaataaccctcagtctccttgaatctcagccctgttgctccttttccagttcagggattcccagattttatcttcgaagctacgtgcaacctctgcgtgtgttttactggccacagagggctgggaaccccaggcaactgcatttctgtttctcttgaagaagatgattgctgatggtggtggagtgggtcttctttcacaggatggttgaagtgagaggggatgggatgttcctttcttggaatgcattctttaacacagagacgtgtagtaacttaagaatggtaaaggctgggcgtggtggctcacgcctgttatcccagcactttgtgaggccaaggcgggtggatcacctgaggtcaggagttcgagaccagcctggccaacatggtgaaaccctgtctctaccaaaaatacaaaaattagccgagcatggtggcatgtgcctgtagtactggctactctggaggctgagacaagcaaattgcttgaacctggcaagcagaggttgcggtgagctgagatcgcgccactgcactccagcctgtgtgacagag

SEQ ID NO: 34903 - DNA, 439 bp, Homo sapiens
gagactgagtgtcactctattgcccaggctggagtgcagtgctgtgatctctgcctctcaggttcaagggattctcctgcctcagcctctccagtagctgggattacaggcacaccaccacacccggctaatttttgtatttttaatagagatggggttttccatgttggctaggctggtcttaaactcctgacctcaaatgatttgtccacctcggcctcccaaagggctgggattacaggcatgagccattactcccggcctgtaaatggattttaaaccaaaaacaaaacaaaaaagtcaaggaagtaaaggttcaagcatgtaagagttttctaaatatagcttcttggtattttattttatttacttttttagacagtttcgctcttgttgcccaggctggagtgcaatggcgagatctcggctcaccacaacc

SEQ ID NO: 34904 - DNA, 842 bp, Homo sapiens
ttgggggggggcggtggggtggccagggggcgcagtggtccttgatcttataggtccagagcctgttaatttgttcataaggtgagaactgaccctcaagagctggaaggattgggacatggcagccagtttacaaccatatggtgtcctgatgagcctgcactcagagtggagtgttggctggaacatgcacacctgcaactgagggttctaaagtcataggttaggcccttctcccgggtagggtctggacatgcacaccaggagtgacgttcccaactctagataactatgtgctaggctctgggctaagtgctttacataatgttgctcaggacaacaggacaaccctatgatttaggtgcacccattctacttggagggattgaggcttagatgttaacgtaacttgcctaaggttagagccattaagtttcaggagtctgatctgaactccgtctacacctgcactgtccagtgtggtagtcactagtgacatgtgaccatttgaagttgaattaaaataagaacttcagttccttagttgtgccagcttcatttcaattgctcagcagctgtctgtggctagtttggttggatactgcagatttatggatatttccactgctgcaaaaagttctattgaatagcacttgtctacactaaattgtctctcttccttttgttcttcaaataaatcagcctcaggtagcacaggagctgttctttgtaagcaggttgtatggatctgttctcaggtgtggatttttatttttttccctgcagatatggagtatattttctttaagaaattaaaaactaagaagaaaatgccaaaaaca

SEQ ID NO: 34905 - DNA, 430 bp, Homo sapiens
cctggggaaaaatttagctttagctgcagagataagggagcaaggcctaacaaagaagcctttgttctttggataatcagcgggctcccaggaaaaagtttcctccccttttcagacatgtacatgatgggctccatgggaacttgcacagggagaggggcttacctaaaacatacccacagtttcataaacaagagaagctgtactttgtgcttacctaagacatacctgcagctgcacaggtaaggagagttacacagacagctactacacagttaagggaagttacacaaacagctacagagatgaaaggagttttttcttataaaagcttttggattcaactgtaaaagtggcaaccctctttcagcctcctctttgctgcggagagctttcttctttcaattattaaacttttactccaacctca

SEQ ID NO: 34906 - DNA, 444 bp, Homo sapiens
tactactactaaattcgcggccgctcgatgataaaattcattaaggttgatacaaagttctgtctgtggtccttattggagacacaagcaccaaagtagtttctaaatagaagctctccactgtttttgatttgtggaatttgaggagtgaatgccagtcatggctaagtcagaaatttaacttagcatgcttactgtaccaatgtagaaagtatacatgttatcattatgtccatgcttactcaaaccacatcctcaatcagagcgtcctctctcttatacaaagctctatcacacaccaaccctgaactattcactagagagagttgtacccagtgttacatattatttagtgtctctcctccccacaaacatacaccacttctggatgaggaaggtcataagtcctggttctaaatactgaagtgtaacattgccaagtgt

SEQ ID NO: 34907 - DNA, 601 bp, Homo sapiens
gtttgccttgcttctactgccacaaccggtaagtttcacaatactttacccttctgagagggcataatgctaataacctcaccaaacataaaaagaaatacagaatttaaaagtgctttgatacttgcgttaaacaagctcctgtttataaagacttggtggccatgtaatgagattgttctaattacctaattaaatagctgctactaaaggaagaggagttctttaatttagagcaaaaggtttcttgaggaaatactctttccttctacaatattttaaatctatacagaatttatgccaagaaaaagaaatggaaccagttatactacatcaagaaccagtagaagacacaataggatagaaactctgcagtctgagggtacgttatgtctcaataaagtagagtagacaaaacactgacccatcacttatgtctcttgaaggctgcttaacactatgtttctttaaataaacaacaacagagcaatatacagcttatttgccaaaattaaggataccgggtatggtcacttcatcaaaatactttctaagataaagagctaggaaagcaatatactggttttcataaagagaaaaa

SEQ ID NO: 34908 - DNA, 116 bp, Homo sapiens
gaacattttcttctatgtttatgagccacttgtatttctttttctgtgagctgtttatttatgcccttgttcattttcccagtggcaagcttgtatttttcttatctgtgtgagtt

SEQ ID NO: 34909 - DNA, 1328 bp, Homo sapiens
agtagggtctgaatctgtggcagcaatcttgcagacatgaaatgaaaagtacaaacatgaaaaaccagcatattaaagatgccaggtcagaaaaatagaaagaacctgcttctgtgagccactgaatggtgccattaaccatctgcatttgagcattttgagaaaataaacctctatttcttaaagttctgtatcagtcagggtttcccagagaggcagaacaatagggatagagagatacatagagagagatatgagagggatagagagagacacagagagagatatgagaggggattaagggagttggctcatgtgattgtggaggctgagaaaccccaccacaggccattcataacctggagaccttgggatgctggtggtctggctcagtacaagtccaaaagccttggaaccagggaaactgatggtgtaattctcagtccaaggctgaattttcaagtctgagaacctgggggtgggatgggggagtgatagttttaagtcctggagtcccaaggttagaggatctggggtcctaatgtccatgggcagttggagaagagtgtatccctgctgcaggggagagagagaagccaattctcctttcttctgtttttattctacccaggcctccagtggattggaggtgcctgcccatattgagggcagatcttctctgcctagtccacgctaactcacatgccaatctcctctggaaacaccctcacagacacaccccaaaataatgccttaccagttctctagatattccttaatccagtcaagttgatgcctaaaattaaccatcacaggctttatggctctattacccaagaattctgttactttcagctgaaaacatttctaatggacatattccaattctgtatagatcagatctcagtttcatttcccattatatccttctctctcttgatttagaattctctttttctccactcttctgtgtatgctaaaatactgtcaatctcgtctttgaaggttttgctcatctttaaaaaatcttagttgattatgttttatgtgtcatttaattaaggaatgaatttgcttatttttatttcagtagcttttggggtacaagtggtttttggttgcatggatgaattgtatagtggtgaagtctgaaattttagtgcacctgtcaccagaatagtgtgcattgtacccaatatatagctttttattccttccccttctgagtctccatagtccattatatcactctgtatacccttgtgtatccatagcttagctcccacttacagttgagaacatacagaatttgatttctattccggagt

SEQ ID NO: 34910 - DNA, 1274 bp, Homo sapiens
agtagggtctgaatctgtggcagcaatcttgcagacatgaaatgaaaagtacaaacatgaaaaaccagcatattaaagatgccaggtcagaaaaatagaaagaacctgcttctgtgagccactgaatggtgccattaaccatctgcatttgagcattttgagaaaataaacctctatttcttaaagttctgtatcagtcagggtttcccagagaggcagaacaatagggatagagagatacatagagagagatatgagagggatagagagagacacagagagagatatgagaggggattaagggagttggctcatgtgattgtggaggctgagaaaccccaccacaggccattcataacctggagaccttgggatgctggtggtctggctcagtacaagtccaaaagccttggaaccagggaaactgatggtgtaattctcagtccaaggctgaattttcaagtctgagaacctgggggtgggatgggggagtgatagttttaagtcctggagtcccaaggttagaggatctggggtcctaatgtccatgggcagttggagaagagtgtatccctgctgcaggggagagagagaagccaattctcctttcttctgtttttattctacccaggcctccagtggattggaggtgcctgcccatattgagggcagatcttctctgcctagtccacgctaactcacatgccaatctcctctggaaacaccctcacagacacaccccaaaataatgccttaccagttctctagatattccttaatccagtcaagttgatgcctaaaattaaccatcacaggctttatggctctattacccaagaattctgttactttcagctgaaaacatttctaatggacatattccaattctgtatagatcagatctcagtttcatttcccattatatccttctctctcttgatttagaattctctttttctccactcttctgtgtatgctaaaatactgtcaatctcgtctttgaaggttttgctcatctttaatatttttatttcagtagcttttggggtacaagtggtttttggttgcatggatgaattgtatagtggtgaagtctgaaattttagtgcacctgtcaccagaatagtgtgcattgtacccaatatatagctttttattccttccccttctgagtctccatagtccattatatcactctgtatacccttgtgtatccatagcttagctcccacttacagttgagaacatacagaatttgatttctattccggagt

SEQ ID NO: 34911 - DNA, 106 bp, Homo sapiens
acaaagctctttcaatattggcaaatagacttaaaaatcactttttaccatttttaaaatttttaaatgattatagagtcacaggaagctgcaaaacacgtggcag

SEQ ID NO: 34912 - DNA, 399 bp, Homo sapiens
atagagtacacacactgtaataagactaaaggatgaaaaaagaaattaatcccatgtatactggatttcttcctttttataatttttgtctttatgccatagggtaagattttctcctagccctgagcacttagttctgagcccacaaagatgtgactgttcaaagctgaatcatcaatgctaattcagtctccacagttaactcatctgatcaacaacatggcttctctgttcactctctgaaagttgaagccactaactttgaccaaggttacctccctttggatctaccttacatctccgttcttattaaaaaccctttgtgttacctttcaggttgtagtctccacgttttgctgtgtgtcacaatttgaataaaaagttgaccagaataactaa

SEQ ID NO: 34913 - DNA, 1291 bp, Homo sapiens
ggtgcggagtttggctgctccggggttagcaggtgagcctgcgatgcgcgggaagacgttccgctttgaaatgcagcgggatttggtgagtttcccgctgtctccagcggtgcgggtgaagctggtgtctgcggggttccagactgctgaggaactcctagaggtgaaaccctccgagcttagcaaagaagttgggatatctaaagcagaagccttagaaactctgcaaattatcagaagagaatgtctcacaaataaaccaagatatgctggtacatctgagtcacacaagaagtgtacagcactggaacttcttgagcaggagcatacccagggcttcataatcaccttctgttcagcactagatgatattcttgggggtggagtgcccttaatgaaaacaacagaaatttgtggtgcaccaggtgttggaaaaacacaattatgtatgcagttggcagtagatgtgcagataccagaatgttttggaggagtggcaggtgaagcagtttttattgatacagagggaagttttatggttgatagagtggtagaccttgctactgcctgcattcagcaccttcagcttatagcagaaaaacacaagggagaggaacaccgaaaagctttggaggatttcactcttgataatattctttctcatatttattattttcgctgtcgtgactacacagagttactggcacaagtttatcttcttccagatttcctttcagaacactcaaaggttcgactagtgatagtggatggtattgcttttccatttcgtcatgacctagatgacctgtctcttcgtactcggttattaaatggcctagcccagcaaatgatcagccttgcaaataatcacagattagctgtaattttaaccaatcagatgacaacaaagattgatagaaatcaggccttgcttgttcctgcattaggggaaagttggggacatgctgctacaatacggctaatctttcattgggaccgaaagcaaaggttggcaacattgtacaagtcacccagccagaaggaatgcacagtactgtttcaaatcaaacctcagggatttagagatactgttgttacttctgcatgttcattgcaaacagaaggttccttgagcacccggaaacggtcacgagacccagaggaagaattataacccagaaacaaatctcaaagtgtacaaatttattgatgttgtgaaatcaatgtgtacaagtggacttgttaccttaaagtataaataaacacactatggcatgaatgaatccaaaaa

SEQ ID NO: 34914 - DNA, 1124 bp, Homo sapiens
ggtgcggagtttggctgctccggggttagcaggtgagcctgcgatgcgcgggaagacgttccgctttgaaatgcagcgggatttggtgagtttcccgctgtctccagcggtgcgggtgaagctggtgtctgcggggttccagactgctgaggaactcctagaggtgaaaccctccgagcttagcaaagaagttgggatatctaaagcagaagccttagaaactctgcaaattatcagaagagaatgtctcacaaataaaccaagatatgctggtacatctgagtcacacaagaagtgtacagcactggaacttcttgagcaggagcatacccagggcttcataatcaccttctgttcagcactagatgatattcttgggggtggagtgcccttaatgaaaacaacagaaatttgtggtgcaccaggtgttggaaaaacacaattatgaacaccgaaaagctttggaggatttcactcttgataatattctttctcatatttattattttcgctgtcgtgactacacagagttactggcacaagtttatcttcttccagatttcctttcagaacactcaaaggttcgactagtgatagtggatggtattgcttttccatttcgtcatgacctagatgacctgtctcttcgtactcggttattaaatggcctagcccagcaaatgatcagccttgcaaataatcacagattagctgtaattttaaccaatcagatgacaacaaagattgatagaaatcaggccttgcttgttcctgcattaggggaaagttggggacatgctgctacaatacggctaatctttcattgggaccgaaagcaaaggttggcaacattgtacaagtcacccagccagaaggaatgcacagtactgtttcaaatcaaacctcagggatttagagatactgttgttacttctgcatgttcattgcaaacagaaggttccttgagcacccggaaacggtcacgagacccagaggaagaattataacccagaaacaaatctcaaagtgtacaaatttattgatgttgtgaaatcaatgtgtacaagtggacttgttaccttaaagtataaataaacacactatggcatgaatgaatccaaaaa

SEQ ID NO: 34915 - DNA, 592 bp, Homo sapiens
ggtgcggagtttggctgctccggggttagcaggtgagcctgcgatgcgcgggaagacgttccgctttgaaatgcagcgggatttggtgagtttcccgctgtctccagcggtgcgggtgaagctggtgtctgcggggttccagactgctgaggaactcctagaggtgaaaccctccgagcttagcaaagaagttgggatatctaaagcagaagccttagaaactctgcaaattatcagaagagaatgtctcacaaataaaccaagatatgctggtacatctgagtcacacaagaagtgtacagcactggaacttcttgagcaggagcatacccagggcttcataatcaccttctgttcagcactagatgatattcttgggggtggagtgcccttaatgaaaacaacagaaatttgtggtgcaccaggtgttggaaaaacacaattatggtaaaataaagtgttctccttttaagggtgggtttaataacatattatgaaagtagtattttgtactatcgtcaggaaaccaaataagatatatatgtgctcttaattttaagtgtgtatgtgcattaaacaaaaattagcttac

SEQ ID NO: 34916 - DNA, 489 bp, Homo sapiens
ggtgcggagtttggctgctccggggttagcaggtgagcctgcgatgcgcgggaagacgttccgctttgaaatgcagcgggatttgaagttgggatatctaaagcagaagccttagaaactctgcaaattatcagaagagaatgtctcacaaataaaccaagatatgctggtacatctgagtcacacaagaagtgtacagcactggaacttcttgagcaggagcatacccagggcttcataatcaccttctgttcagcactagatgatattcttgggggtggagtgcccttaatgaaaacaacagaaatttgtggtgcaccaggtgttggaaaaacacaattatggtaaaataaagtgttctccttttaagggtgggtttaataacatattatgaaagtagtattttgtactatcgtcaggaaaccaaataagatatatatgtgctcttaattttaagtgtgtatgtgcattaaacaaaaattagcttac

SEQ ID NO: 34917 - DNA, 635 bp, Homo sapiens
ggtgcggagtttggctgctccggggttagcaggtgagcctgcgatgcgcgggaagacgttccgctttgaaatgcagcgggatttggtgagtttcccgctgtctccagcggtgcgggtgaagctggtgtctgcggggttccagactgctgaggaactcctagaggtgaaaccctccgagcttagcaaagaagttgggatatctaaagcagaagccttagaaactctgcaaattatcagaagagaatgtctcacaaataaaccaagatatgctggtacatctgagtcacacaagaagtgtacagcactggaacttcttgagcaggagcatacccagggcttcataatcaccttctgttcagcactagatgatattcttgggggtggagtgcccttaatgaaaacaacagaaatttgtggtgcaccaggtgttggaaaaacacaattatggtaaaataaagtgttctccttttaagggtgggtttaataacatattatgaaagtagtattttgtactatcgtcaggaaaccaaataagatatatatgtgctcttaattttaagtgtgtatgtgcattaaacaaaaattagcttactatttgtgttacttcattatcccttcttgataaatgtatgcaa

SEQ ID NO: 34918 - DNA, 434 bp, Homo sapiens
ataggggtcaccatgttggccaggctggtcttgaactcctgacctcatgatctgcccacctcagcctcccaaagtgctgggattacaggtgtgagccactgcgcctggccctagaataaagtagctttcttattagttacttaaaaatatttctaagatcagtcttcaaatgttcttaaagcatatttgtatatatattttttatctttcagcctcagggatttagagatactgttgttacttctgcatgttcattgcaaacagaaggttccttgagcacccggaaacggtcacgagacccagaggaagaattataacccagaaacaaatctcaaagtgtacaaatttattgatgttgtgaaatcaatgtgtacaagtggacttgttaccttaaagtataaataaacacactatggcatgaatgaatccaaaaa

SEQ ID NO: 34919 - DNA, 436 bp, Homo sapiens
atttttaatatttctctcctttttgtgttcttagagaaaaaatagaattattaatataataaacctatacatttaaataatgagtttggtcatctgaacttttaattaattaagttcatgtgtttgtatgtatttattctttttctttaagcagttggcaacattgtacaagtcacccagccagaaggaatgcacagtactgtttcaaatcaaacctcagggatttagagatactgttgttacttctgcatgttcattgcaaacagaaggttccttgagcacccggaaacggtcacgagacccagaggaagaattataacccagaaacaaatctcaaagtgtacaaatttattgatgttgtgaaatcaatgtgtacaagtggacttgttaccttaaagtataaataaacacactatggcatgaatgaatccaaaaa

SEQ ID NO: 34920 - DNA, 363 bp, Homo sapiens
cccccgggggcggcgaaccccccccccccccccccccccaccccccccattttccccccctccccccccccccccgggggcccttttttttccccaaatcccccccccccccggaagtccccccgctgatttttgaccccccccctggccccccaccccccctttttttttttccccccaaaaaaaaaaagtaaggggaaaaaacccctatatttttggcccgagcccccagaggaagaattataacccagaaacaaatctcaaagtgtacaaatttattgatgttgtgaaatcaatgtgtacaagtggacttgttaccttaaagtataaataaacacactatggcatgaatgaatccaaaaa

SEQ ID NO: 34921 - DNA, 307 bp, Homo sapiens
atttttaatatttctctcctttttgtgttcttagagaaaaaatagaattattaatataataaacctatacatttaaataatgagtttggtcatctgaacttttaattaattaagttcatgtgtttgtatgtatttattctttttctttaagcagttggcaacattgtacaagtcacccagccagaaggaatgcacagtactgtttcaaatcaaagtcagtattatttgattagagtgggattttgatattgatgggcggtaattatctaaagagagaatttacaacttgcttctgtcaacttctgta

SEQ ID NO: 34922 - DNA, 2314 bp, Homo sapiens
ggtgcggagtttggctgctccggggttagcaggtgagcctgcgatgcgcgggaagacgttccgctttgaaatgcagcgggatttggtgagtttcccgctgtctccagcggtgcgggtgaagctggtgtctgcggggttccagactgctgaggaactcctagaggtgaaaccctccgagcttagcaaaggtaacgactcctgatggcaagctgaggcacaccggccgccgtcagcgccgcctcagtcttcgttctctcgcctcggccttcagcccagtctccgttagattctgcttcctcccacgtccatgtttacagcgtgaaagagctcctcgactccacttacaagttgtctgaatggttaggagaactgtggtcgtgaaaacatttactaattgcttttcctctggcaatgcctgctgaatgctttgaggattgtctcatttaaccctcaacccgcttacgtagattattatattcagtatatggatgagagaactgatatcttggggagcttaggtaacttttcatgctaactgggttaggaaatactggagtcagaattggttgtctaatttttgctgttccaagatccaaggggtaagggttaaatttcagaaatgcaggattttgtgtaggactagagacactaagaatgagaaagagagtagaatccccggaatcttgaggaagcatagaaagaatattctcttacgtaattaactgaaacacccaaaacctcatattccagagcattgcagatgggaaccactgcatcctgagacatacaaatatgaggctggcggtggtcacttgttgtgcacatctctctatgacatgtctggacctgtgctattcactgaagaagatggaacagaattttaagttactgcccttactgatggaaaatacagaggtttcaattcgcctctaaagaataagtctcgtggacccagccttaactgtttaagtcataccgcgcgcagactgtgtcccccaagatttgatgggctcttttttcttcaacaagttggcttttcaaagaagaaatgtgagaccctgaataataatgatcactaacaactattgactactttagatggtcttgatattctaccaagctttttacatgtatcgtctcattcccattttatagacgaaaaaaatctgagcaaaaaagaaaaagtgaagtaacttgcccaaagtcatgcaaagttgggatatctaaagcagaagccttagaaactctgcaaattatcagaagagaatgtctcacaaataaaccaagatatgctggtacatctgagtcacacaagaagtgtacagcactggaacttcttgagcaggagcatacccagggcttcataatcaccttctgttcagcactagatgatattcttgggggtggagtgcccttaatgaaaacaacagaaatttgtggtgcaccaggtgttggaaaaacacaattatgtatgcagttggcagtagatgtgcagataccagaatgttttggaggagtggcaggtgaagcagtttttattgatacagagggaagttttatggttgatagagtggtagaccttgctactgcctgcattcagcaccttcagcttatagcagaaaaacacaagggagaggaacaccgaaaagctttggaggatttcactcttgataatattctttctcatatttattattttcgctgtcgtgactacacagagttactggcacaagtttatcttcttccagatttcctttcagaacactcaaaggttcgactagtgatagtggatggtattgcttttccatttcgtcatgacctagatgacctgtctcttcgtactcggttattaaatggcctagcccagcaaatgatcagccttgcaaataatcacagattagctgtaattttaaccaatcagatgacaacaaagattgatagaaatcaggccttgcttgttcctgcattaggggaaagttggggacatgctgctacaatacggctaatctttcattgggaccgaaagcaaaggttggcaacattgtacaagtcacccagccagaaggaatgcacagtactgtttcaaatcaaacctcagggatttagagatactgttgttacttctgcatgttcattgcaaacagaaggttccttgagcacccggaaacggtcacgagacccagaggaagaattataacccagaaacaaatctcaaagtgtacaaatttattgatgttgtgaaatcaatgtgtacaagtggacttgttaccttaaagtataaataaacacactatggcatgaatgaatccaaaaa

SEQ ID NO: 34923 - DNA, 1411 bp, Homo sapiens
ggtgcggagtttggctgctccggggttagcaggtgagcctgcgatgcgcgggaagacgttccgctttgaaatgcagcgggatttggtgagtttcccgctgtctccagcggtgcgggtgaagctggtgtctgcggggttccagactgctgaggaactcctagaggtgaaaccctccgagcttagcaaagaagttgggatatctaaagcagaagccttagaaactctgcaaattatcagaagagaatgtctcacaaataaaccaagatatgctggtacatctgagtcacacaagaagtgtacagcactggaacttcttgagcaggagcatacccagggcttcataatcaccttctgttcagcactagatgatattcttgggggtggagtgcccttaatgaaaacaacagaaatttgtggtgcaccaggtgttggaaaaacacaattatgtatgcagttggcagtagatgtgcagataccagaatgttttggaggagtggcaggtgaagcagtttttattgatacagagggaagttttatggttgatagagtggtagaccttgctactgcctgcattcagcaccttcagcttatagcagaaaaacacaagggagaggaacaccgaaaagctttggaggatttcactcttgataatattctttctcatatttattattttcgctgtcgtgactacacagagttactggcacaagtttatcttcttccagatttcctttcagaacactcaaaggcccactgcagtagcagaatcaccctactgctctgtggggtggccctgccccttcctctctctgcaagggccccaccctctgaaaccaaggacgacatagcattgccccctgggcttatggttcgactagtgatagtggatggtattgcttttccatttcgtcatgacctagatgacctgtctcttcgtactcggttattaaatggcctagcccagcaaatgatcagccttgcaaataatcacagattagctgtaattttaaccaatcagatgacaacaaagattgatagaaatcaggccttgcttgttcctgcattaggggaaagttggggacatgctgctacaatacggctaatctttcattgggaccgaaagcaaaggttggcaacattgtacaagtcacccagccagaaggaatgcacagtactgtttcaaatcaaacctcagggatttagagatactgttgttacttctgcatgttcattgcaaacagaaggttccttgagcacccggaaacggtcacgagacccagaggaagaattataacccagaaacaaatctcaaagtgtacaaatttattgatgttgtgaaatcaatgtgtacaagtggacttgttaccttaaagtataaataaacacactatggcatgaatgaatccaaaaa

SEQ ID NO: 34924 - DNA, 1436 bp, Homo sapiens
ggtgcggagtttggctgctccggggttagcaggtgagcctgcgatgcgcgggaagacgttccgctttgaaatgcagcgggatttggtgagtttcccgctgtctccagcggtgcgggtgaagctggtgtctgcggggttccagactgctgaggaactcctagaggtgaaaccctccgagcttagcaaagaagttgggatatctaaagcagaagccttagaaactctgcaaattatcagaagagaatgtctcacaaataaaccaagatatgctggtacatctgagtcacacaagaagtgtacagcactggaacttcttgagcaggagcatacccagggcttcataatcaccttctgttcagcactagatgatattcttgggggtggagtgcccttaatgaaaacaacagaaatttgtggtgcaccaggtgttggaaaaacacaattatgtatgcagttggcagtagatgtgcagataccagaatgttttggaggagtggcaggtgaagcagtttttattgatacagagggaagttttatggttgatagagtggtagaccttgctactgcctgcattcagcaccttcagcttatagcagaaaaacacaagggagaggaacaccgaaaagctttggaggatttcactcttgataatattctttctcatatttattattttcgctgtcgtgactacacagagttactggcacaagtttatcttcttccagatttcctttcagaacactcaaagccccaaacgtcttaaccggttccatcatcaactctaaaagtcccaggcttcatctaaatattatctaaatcagagattggtgagactctagttataattcatcctgaagtgaaattcccttccagctgtgaacgtttgaaatcaggttcgactagtgatagtggatggtattgcttttccatttcgtcatgacctagatgacctgtctcttcgtactcggttattaaatggcctagcccagcaaatgatcagccttgcaaataatcacagattagctgtaattttaaccaatcagatgacaacaaagattgatagaaatcaggccttgcttgttcctgcattaggggaaagttggggacatgctgctacaatacggctaatctttcattgggaccgaaagcaaaggttggcaacattgtacaagtcacccagccagaaggaatgcacagtactgtttcaaatcaaacctcagggatttagagatactgttgttacttctgcatgttcattgcaaacagaaggttccttgagcacccggaaacggtcacgagacccagaggaagaattataacccagaaacaaatctcaaagtgtacaaatttattgatgttgtgaaatcaatgtgtacaagtggacttgttaccttaaagtataaataaacacactatggcatgaatgaatccaaaaa

SEQ ID NO: 34925 - DNA, 2531 bp, Homo sapiens
ggtgcggagtttggctgctccggggttagcaggtgagcctgcgatgcgcgggaagacgttccgctttgaaatgcagcgggatttggtgagtttcccgctgtctccagcggtgcgggtgaagctggtgtctgcggggttccagactgctgaggaactcctagaggtgaaaccctccgagcttagcaaaggtaacgactcctgatggcaagctgaggcacaccggccgccgtcagcgccgcctcagtcttcgttctctcgcctcggccttcagcccagtctccgttagattctgcttcctcccacgtccatgtttacagcgtgaaagagctcctcgactccacttacaagttgtctgaatggttaggagaactgtggtcgtgaaaacatttactaattgcttttcctctggcaatgcctgctgaatgctttgaggattgtctcatttaaccctcaacccgcttacgtagattattatattcagtatatggatgagagaactgatatcttggggagcttaggtaacttttcatgctaactgggttaggaaatactggagtcagaattggttgtctaatttttgctgttccaagatccaaggggtaagggttaaatttcagaaatgcaggattttgtgtaggactagagacactaagaatgagaaagagagtagaatccccggaatcttgaggaagcatagaaagaatattctcttacgtaattaactgaaacacccaaaacctcatattccagagcattgcagatgggaaccactgcatcctgagacatacaaatatgaggctggcggtggtcacttgttgtgcacatctctctatgacatgtctggacctgtgctattcactgaagaagatggaacagaattttaagttactgcccttactgatggaaaatacagaggtttcaattcgcctctaaagaataagtctcgtggacccagccttaactgtttaagtcataccgcgcgcagactgtgtcccccaagatttgatgggctcttttttcttcaacaagttggcttttcaaagaagaaatgtgagaccctgaataataatgatcactaacaactattgactactttagatggtcttgatattctaccaagctttttacatgtatcgtctcattcccattttatagacgaaaaaaatctgagcaaaaaagaaaaagtgaagtaacttgcccaaagtcatgcaaagttgggatatctaaagcagaagccttagaaactctgcaaattatcagaagagaatgtctcacaaataaaccaagatatgctggtacatctgagtcacacaagaagtgtacagcactggaacttcttgagcaggagcatacccagggcttcataatcaccttctgttcagcactagatgatattcttgggggtggagtgcccttaatgaaaacaacagaaatttgtggtgcaccaggtgttggaaaaacacaattatgtatgcagttggcagtagatgtgcagataccagaatgttttggaggagtggcaggtgaagcagtttttattgatacagagggaagttttatggttgatagagtggtagaccttgctactgcctgcattcagcaccttcagcttatagcagaaaaacacaagggagaggaatctggctctaccgcccgggctggagtgcagtggcgcaatcttggcttactgcgaccttcacctcccaggttcaagcgattctcctgactcagcctcctgagtagctgggagctgcgaatacagaacaccgaaaagctttggaggatttcactcttgataatattctttctcatatttattattttcgctgtcgtgactacacagagttactggcacaagtttatcttcttccagatttcctttcagaacactcaaagccccaaacgtcttaaccggttccatcatcaaactctagttataattcatcctgaagtgaaattcccttccagctgtgaacgtttgaaatcaggttcgactagtgatagtggatggtattgcttttccatttcgtcatgacctagatgacctgtctcttcgtactcggttattaaatggcctagcccagcaaatgatcagccttgcaaataatcacagattagctgtaattttaaccaatcagatgacaacaaagattgatagaaatcaggccttgcttgttcctgcattaggggaaagttggggacatgctgctacaatacggctaatctttcattgggaccgaaagcaaaggttggcaacattgtacaagtcacccagccagaaggaatgcacagtactgtttcaaatcaaacctcagggatttagagatactgttgttacttctgcatgttcattgcaaacagaaggttccttgagcacccggaaacggtcacgagacccagaggaagaattataacccagaaacaaatctcaaagtgtacaaatttattgatgttgtgaaatcaatgtgtacaagtggacttgttaccttaaagtataaataaacacactatggcatgaatgaatccaaaaa

SEQ ID NO: 34926 - DNA, 1169 bp, Homo sapiens
ggtgcggagtttggctgctccggggttagcaggtgagcctgcgatgcgcgggaagacgttccgctttgaaatgcagcgggatttggtgagtttcccgctgtctccagcggtgcgggtgaagctggtgtctgcggggttccagactgctgaggaactcctagaggtgaaaccctccgagcttagcaaagaagttgggatatctaaagcagaagccttagaaactctgcaaattatcagaagagaatgtctcacaaataaaccaagatatgctggtacatctgagtcacacaagaagtgtacagcactggaacttcttgagcaggagcatacccagggcttcataatcaccttctgttcagcactagatgatattcttgggggtggagtgcccttaatgaaaacaacagaaatttgtggtgcaccaggtgttggaaaaacacaattatgtatgcagttggcagtagatgtgcagataccagaatgttttggaggagtggcaggtgaagcagtttttattgatacagagggaagttttatggttgatagagtggtagaccttgctactgcctgcattcagcaccttcagcttatagcagaaaaacacaagggagaggaacaccgaaaagctttggaggatttcactcttgataatattctttctcatatttattattttcgctgtcgtgactacacagagttactggcacaagtttatcttcttccagatttcctttcagaacactcaaaggttcgactagtgatagtggatggtattgcttttccatttcgtcatgacctagatgacctgtctcttcgtactcggttattaaatggcctagcccagcaaatgatcagccttgcaaataatcacagattagctgtaattttaaccaatcagatgacaacaaagattgatagaaatcaggccttgcttgttcctgcattagcctcagggatttagagatactgttgttacttctgcatgttcattgcaaacagaaggttccttgagcacccggaaacggtcacgagacccagaggaagaattataacccagaaacaaatctcaaagtgtacaaatttattgatgttgtgaaatcaatgtgtacaagtggacttgttaccttaaagtataaataaacacactatggcatgaatgaatccaaaaa

SEQ ID NO: 34927 - DNA, 2292 bp, Homo sapiens
ggtgcggagtttggctgctccggggttagcaggtgagcctgcgatgcgcgggaagacgttccgctttgaaatgcagcgggatttggtgagtttcccgctgtctccagcggtgcgggtgaagctggtgtctgcggggttccagactgctgaggaactcctagaggtgaaaccctccgagcttagcaaaggtaacgactcctgatggcaagctgaggcacaccggccgccgtcagcgccgcctcagtcttcgttctctcgcctcggccttcagcccagtctccgttagattctgcttcctcccacgtccatgtttacagcgtgaaagagctcctcgactccacttacaagttgtctgaatggttaggagaactgtggtcgtgaaaacatttactaattgcttttcctctggcaatgcctgctgaatgctttgaggattgtctcatttaaccctcaacccgcttacgtagattattatattcagtatatggatgagagaactgatatcttggggagcttaggtaacttttcatgctaactgggttaggaaatactggagtcagaattggttgtctaatttttgctgttccaagatccaaggggtaagggttaaatttcagaaatgcaggattttgtgtaggactagagacactaagaatgagaaagagagtagaatccccggaatcttgaggaagcatagaaagaatattctcttacgtaattaactgaaacacccaaaacctcatattccagagcattgcagatgggaaccactgcatcctgagacatacaaatatgaggctggcggtggtcacttgttgtgcacatctctctatgacatgtctggacctgtgctattcactgaagaagatggaacagaattttaagttactgcccttactgatggaaaatacagaggtttcaattcgcctctaaagaataagtctcgtggacccagccttaactgtttaagtcataccgcgcgcagactgtgtcccccaagatttgatgggctcttttttcttcaacaagttggcttttcaaagaagaaatgtgagaccctgaataataatgatcactaacaactattgactactttagatggtcttgatattctaccaagctttttacatgtatcgtctcattcccattttatagacgaaaaaaatctgagcaaaaaagaaaaagtgaagtaacttgcccaaagtcatgcaaagttgggatatctaaagcagaagccttagaaactctgcaaattatcagaagagaatgtctcacaaataaaccaagatatgctggtacatctgagtcacacaagaagtgtacagcactggaacttcttgagcaggagcatacccagggcttcataatcaccttctgttcagcactagatgatattcttgggggtggagtgcccttaatgaaaacaacagaaatttgtggtgcaccaggtgttggaaaaacacaattatgaacaccgaaaagctttggaggatttcactcttgataatattctttctcatatttattattttcgctgtcgtgactacacagagttactggcacaagtttatcttcttccagatttcctttcagaacactcaaagccccaaacgtcttaaccggttccatcatcaactctaaaagtcccaggcttcatctaaatattatctaaatcagagattggtgagactctagttataattcatcctgaagtgaaattcccttccagctgtgaacgtttgaaatcaggttcgactagtgatagtggatggtattgcttttccatttcgtcatgacctagatgacctgtctcttcgtactcggttattaaatggcctagcccagcaaatgatcagccttgcaaataatcacagattagctgtaattttaaccaatcagatgacaacaaagattgatagaaatcaggccttgcttgttcctgcattaggggaaagttggggacatgctgctacaatacggctaatctttcattgggaccgaaagcaaaggttggcaacattgtacaagtcacccagccagaaggaatgcacagtactgtttcaaatcaaacctcagggatttagagatactgttgttacttctgcatgttcattgcaaacagaaggttccttgagcacccggaaacggtcacgagacccagaggaagaattataacccagaaacaaatctcaaagtgtacaaatttattgatgttgtgaaatcaatgtgtacaagtggacttgttaccttaaagtataaataaacacactatggcatgaatgaatccaaaaa

SEQ ID NO: 34928 - DNA, 1188 bp, Homo sapiens
ggtgcggagtttggctgctccggggttagcaggtgagcctgcgatgcgcgggaagacgttccgctttgaaatgcagcgggatttgaagttgggatatctaaagcagaagccttagaaactctgcaaattatcagaagagaatgtctcacaaataaaccaagatatgctggtacatctgagtcacacaagaagtgtacagcactggaacttcttgagcaggagcatacccagggcttcataatcaccttctgttcagcactagatgatattcttgggggtggagtgcccttaatgaaaacaacagaaatttgtggtgcaccaggtgttggaaaaacacaattatgtatgcagttggcagtagatgtgcagataccagaatgttttggaggagtggcaggtgaagcagtttttattgatacagagggaagttttatggttgatagagtggtagaccttgctactgcctgcattcagcaccttcagcttatagcagaaaaacacaagggagaggaacaccgaaaagctttggaggatttcactcttgataatattctttctcatatttattattttcgctgtcgtgactacacagagttactggcacaagtttatcttcttccagatttcctttcagaacactcaaaggttcgactagtgatagtggatggtattgcttttccatttcgtcatgacctagatgacctgtctcttcgtactcggttattaaatggcctagcccagcaaatgatcagccttgcaaataatcacagattagctgtaattttaaccaatcagatgacaacaaagattgatagaaatcaggccttgcttgttcctgcattaggggaaagttggggacatgctgctacaatacggctaatctttcattgggaccgaaagcaaaggttggcaacattgtacaagtcacccagccagaaggaatgcacagtactgtttcaaatcaaacctcagggatttagagatactgttgttacttctgcatgttcattgcaaacagaaggttccttgagcacccggaaacggtcacgagacccagaggaagaattataacccagaaacaaatctcaaagtgtacaaatttattgatgttgtgaaatcaatgtgtacaagtggacttgttaccttaaagtataaataaacacactatggcatgaatgaatccaaaaa

SEQ ID NO: 34929 - DNA, 1145 bp, Homo sapiens
gcaatctggaacgactctcttaatcctccaccgctacagcagaagttgggatatctaaagcagaagccttagaaactctgcaaattatcagaagagaatgtctcacaaataaaccaagatatgctggtacatctgagtcacacaagaagtgtacagcactggaacttcttgagcaggagcatacccagggcttcataatcaccttctgttcagcactagatgatattcttgggggtggagtgcccttaatgaaaacaacagaaatttgtggtgcaccaggtgttggaaaaacacaattatgtatgcagttggcagtagatgtgcagataccagaatgttttggaggagtggcaggtgaagcagtttttattgatacagagggaagttttatggttgatagagtggtagaccttgctactgcctgcattcagcaccttcagcttatagcagaaaaacacaagggagaggaacaccgaaaagctttggaggatttcactcttgataatattctttctcatatttattattttcgctgtcgtgactacacagagttactggcacaagtttatcttcttccagatttcctttcagaacactcaaaggttcgactagtgatagtggatggtattgcttttccatttcgtcatgacctagatgacctgtctcttcgtactcggttattaaatggcctagcccagcaaatgatcagccttgcaaataatcacagattagctgtaattttaaccaatcagatgacaacaaagattgatagaaatcaggccttgcttgttcctgcattaggggaaagttggggacatgctgctacaatacggctaatctttcattgggaccgaaagcaaaggttggcaacattgtacaagtcacccagccagaaggaatgcacagtactgtttcaaatcaaacctcagggatttagagatactgttgttacttctgcatgttcattgcaaacagaaggttccttgagcacccggaaacggtcacgagacccagaggaagaattataacccagaaacaaatctcaaagtgtacaaatttattgatgttgtgaaatcaatgtgtacaagtggacttgttaccttaaagtataaataaacacactatggcatgaatgaatccaaaaa

SEQ ID NO: 34930 - DNA, 1230 bp, Homo sapiens
ggtgcggagtttggctgctccggggttagcaggtgagcctgcgatgcgcgggaagacgttccgctttgaaatgcagcgggatttggtgagtttcccgctgtctccagcggtgcgggtgaagctggtgtctgcggggttccagactgctgaggaactcctagaggtgaaaccctccgagcttagcaaagaagttgggatatctaaagcagaagccttagaaactctgcaaattatcagaagagaatgtctcacaaataaaccaagatatgctggtacatctgagtcacacaagaagtgtacagcactggaacttcttgagcaggagcatacccagggcttcataatcaccttctgttcagcactagatgatattcttgggggtggagtgcccttaatgaaaacaacagaaatttgtggtgcaccaggtgttggaaaaacacaattatgtatgcagttggcagtagatgtgcagataccagaatgttttggaggagtggcaggtgaagcagtttttattgatacagagggaagttttatggttgatagagtggtagaccttgctactgcctgcattcagcaccttcagcttatagcagaaaaacacaagggagaggaacaccgaaaagctttggaggatttcactcttgataatattctttctcatatttattattttcgctgtcgtgactacacagagttactggcacaagtttatcttcttccagatttcctttcagaacactcaaaggttcgactagtgatagtggatggtattgcttttccatttcgtcatgacctagatgacctgtctcttcgtactcggttattaaatggcctagcccagcaaatgatcagccttgcaaataatcacagattagctgtaattttaaccaatcagatgacaacaaagattgatagaaatcaggccttgcttgttcctgcattaggggaaagttggggacatgctgctacaatacggctaatctttcattgggaccgaaagcaaagcctcagggatttagagatactgttgttacttctgcatgttcattgcaaacagaaggttccttgagcacccggaaacggtcacgagacccagaggaagaattataacccagaaacaaatctcaaagtgtacaaatttattgatgttgtgaaatcaatgtgtacaagtggacttgttaccttaaagtataaataaacacactatggcatgaatgaatccaaaaa

SEQ ID NO: 34931 - DNA, 1230 bp, Homo sapiens
ggtgcggagtttggctgctccggggttagcaggtgagcctgcgatgcgcgggaagacgttccgctttgaaatgcagcgggatttggtgagtttcccgctgtctccagcggtgcgggtgaagctggtgtctgcggggttccagactgctgaggaactcctagaggtgaaaccctccgagcttagcaaagaagttgggatatctaaagcagaagccttagaaactctgcaaattatcagaagagaatgtctcacaaataaaccaagatatgctggtacatctgagtcacacaagaagtgtacagcactggaacttcttgagcaggagcatacccagggcttcataatcaccttctgttcagcactagatgatattcttgggggtggagtgcccttaatgaaaacaacagaaatttgtggtgcaccaggtgttggaaaaacacaattatgtatgcagttggcagtagatgtgcagataccagaatgttttggaggagtggcaggtgaagcagtttttattgatacagagggaagttttatggttgatagagtggtagaccttgctactgcctgcattcagcaccttcagcttatagcagaaaaacacaagggagaggaacaccgaaaagctttggaggatttcactcttgataatattctttctcatatttattattttcgctgtcgtgactacacagagttactggcacaagtttatcttcttccagatttcctttcagaacactcaaaggttcgactagtgatagtggatggtattgcttttccatttcgtcatgacctagatgacctgtctcttcgtactcggttattaaatggcctagcccagcaaatgatcagccttgcaaataatcacagattagctgtaattttaaccaatcagatgacaacaaagattgatagaaatcaggccttgcttgttcctgcattaggttggcaacattgtacaagtcacccagccagaaggaatgcacagtactgtttcaaatcaaacctcagggatttagagatactgttgttacttctgcatgttcattgcaaacagaaggttccttgagcacccggaaacggtcacgagacccagaggaagaattataacccagaaacaaatctcaaagtgtacaaatttattgatgttgtgaaatcaatgtgtacaagtggacttgttaccttaaagtataaataaacacactatggcatgaatgaatccaaaaa

SEQ ID NO: 34932 - DNA, 1613 bp, Homo sapiens
ggtgcggagtttggctgctccggggttagcaggtgagcctgcgatgcgcgggaagacgttccgctttgaaatgcagcgggatttggtgagtttcccgctgtctccagcggtgcgggtgaagctggtgtctgcggggttccagactgctgaggaactcctagaggtgaaaccctccgagcttagcaaagaagttgggatatctaaagcagaagccttagaaactctgcaaattatcagaagagaatgtctcacaaataaaccaagatatgctggtacatctgagtcacacaagaagtgtacagcactggaacttcttgagcaggagcatacccagggcttcataatcaccttctgttcagcactagatgatattcttgggggtggagtgcccttaatgaaaacaacagaaatttgtggtgcaccaggtgttggaaaaacacaattatgtatgcagttggcagtagatgtgcagataccagaatgttttggaggagtggcaggtgaagcagtttttattgatacagagggaagttttatggttgatagagtggtagaccttgctactgcctgcattcagcaccttcagcttatagcagaaaaacacaagggagaggaacaccgaaaagctttggaggatttcactcttgataatattctttctcatatttattattttcgctgtcgtgactacacagagttactggcacaagtttatcttcttccagatttcctttcagaacactcaaaggttcgactagtgatagtggatggtattgcttttccatttcgtcatgacctagatgacctgtctcttcgtactcggttattaaatggcctagcccagcaaatgatcagccttgcaaataatcacagattagctgtaattttaaccaatcagatgacaacaaagattgatagaaatcaggccttgcttgttcctgcattaggtgggtaattaatcagataaacattttagtttatcacagtttttcttatctctttcatttgattctcattgagtactatacgcttcatgaaagcagactgtatttgtcttgttcactggttaatcttagcactaagcacagtaccgttagatactgattgttccttttagttatttaacatttattgagtggccagacacagtgtcccacacctgtaatcccaacaccttgggaggccgaggcggatcacttgaggctggtcttgaactcctgacctcatgatctgcccacctcagcctcccaaagtgctgggattacaggtgtgagccactgcgcctggccctagaataaagtagctttcttattagttacttaaaaatatttctaagatcagtcttcaaatgttcttaaagcatatttgtatatatattttttatctttcagcctcagggatttagagatactgttgttacttctgcatgttcattgcaaacagaaggttccttgagcacccggaaacggtcacgagacccagaggaagaattataacccagaaacaaatctcaaagtgtacaaatttattgatgttgtgaaatcaatgtgtacaagtggacttgttaccttaaagtataaataaacacactatggcatgaatgaatccaaaaa

SEQ ID NO: 34933 - DNA, 1416 bp, Homo sapiens
ggtgcggagtttggctgctccggggttagcaggtgagcctgcgatgcgcgggaagacgttccgctttgaaatgcagcgggatttggtgagtttcccgctgtctccagcggtgcgggtgaagctggtgtctgcggggttccagactgctgaggaactcctagaggtgaaaccctccgagcttagcaaagaagttgggatatctaaagcagaagccttagaaactctgcaaattatcagaagagaatgtctcacaaataaaccaagatatgctggtacatctgagtcacacaagaagtgtacagcactggaacttcttgagcaggagcatacccagggcttcataatcaccttctgttcagcactagatgatattcttgggggtggagtgcccttaatgaaaacaacagaaatttgtggtgcaccaggtgttggaaaaacacaattatgtatgcagttggcagtagatgtgcagataccagaatgttttggaggagtggcaggtgaagcagtttttattgatacagagggaagttttatggttgatagagtggtagaccttgctactgcctgcattcagcaccttcagcttatagcagaaaaacacaagggagaggaatctggctctaccgcccgggctggagtgcagtggcgcaatcttggcttactgcgaccttcacctcccaggttcaagcgattctcctgactcagcctcctgagtagctgggagctgcgaatacagaacaccgaaaagctttggaggatttcactcttgataatattctttctcatatttattattttcgctgtcgtgactacacagagttactggcacaagtttatcttcttccagatttcctttcagaacactcaaaggttcgactagtgatagtggatggtattgcttttccatttcgtcatgacctagatgacctgtctcttcgtactcggttattaaatggcctagcccagcaaatgatcagccttgcaaataatcacagattagctgtaattttaaccaatcagatgacaacaaagattgatagaaatcaggccttgcttgttcctgcattaggggaaagttggggacatgctgctacaatacggctaatctttcattgggaccgaaagcaaaggttggcaacattgtacaagtcacccagccagaaggaatgcacagtactgtttcaaatcaaacctcagggatttagagatactgttgttacttctgcatgttcattgcaaacagaaggttccttgagcacccggaaacggtcacgagacccagaggaagaattataacccagaaacaaatctcaaagtgtacaaatttattgatgttgtgaaatcaatgtgtacaagtggacttgttaccttaaagtataaataaacacactatggcatgaatgaatccaaaaa

SEQ ID NO: 34934 - DNA, 1032 bp, Homo sapiens
ggtgcggagtttggctgctccggggttagcaggtgagcctgcgatgcgcgggaagacgttccgctttgaaatgcagcgggatttggtgagtttcccgctgtctccagcggtgcgggtgaagctggtgtctgcggggttccagactgctgaggaactcctagaggtgaaaccctccgagcttagcaaagtatgcagttggcagtagatgtgcagataccagaatgttttggaggagtggcaggtgaagcagtttttattgatacagagggaagttttatggttgatagagtggtagaccttgctactgcctgcattcagcaccttcagcttatagcagaaaaacacaagggagaggaacaccgaaaagctttggaggatttcactcttgataatattctttctcatatttattattttcgctgtcgtgactacacagagttactggcacaagtttatcttcttccagatttcctttcagaacactcaaaggttcgactagtgatagtggatggtattgcttttccatttcgtcatgacctagatgacctgtctcttcgtactcggttattaaatggcctagcccagcaaatgatcagccttgcaaataatcacagattagctgtaattttaaccaatcagatgacaacaaagattgatagaaatcaggccttgcttgttcctgcattaggggaaagttggggacatgctgctacaatacggctaatctttcattgggaccgaaagcaaaggttggcaacattgtacaagtcacccagccagaaggaatgcacagtactgtttcaaatcaaacctcagggatttagagatactgttgttacttctgcatgttcattgcaaacagaaggttccttgagcacccggaaacggtcacgagacccagaggaagaattataacccagaaacaaatctcaaagtgtacaaatttattgatgttgtgaaatcaatgtgtacaagtggacttgttaccttaaagtataaataaacacactatggcatgaatgaatccaaaaa

SEQ ID NO: 34935 - DNA, 1269 bp, Homo sapiens
ggtgcggagtttggctgctccggggttagcaggtgagcctgcgatgcgcgggaagacgttccgctttgaaatgcagcgggatttggtgagtttcccgctgtctccagcggtgcgggtgaagctggtgtctgcggggttccagactgctgaggaactcctagaggtgaaaccctccgagcttagcaaagaagttgggatatctaaagcagaagccttagaaactctgcaaattatcagaagagaatgtctcacaaataaaccaagatatgctggtacatctgagtcacacaagaagtgtacagcactggaacttcttgagcaggagcatacccagggcttcataatcaccttctgttcagcactagatgatattcttgggggtggagtgcccttaatgaaaacaacagaaatttgtggtgcaccaggtgttggaaaaacacaattatgaacaccgaaaagctttggaggatttcactcttgataatattctttctcatatttattattttcgctgtcgtgactacacagagttactggcacaagtttatcttcttccagatttcctttcagaacactcaaagccccaaacgtcttaaccggttccatcatcaactctaaaagtcccaggcttcatctaaatattatctaaatcagagattggtgagactctagttataattcatcctgaagtgaaattcccttccagctgtgaacgtttgaaatcaggttcgactagtgatagtggatggtattgcttttccatttcgtcatgacctagatgacctgtctcttcgtactcggttattaaatggcctagcccagcaaatgatcagccttgcaaataatcacagattagctgtaattttaaccaatcagatgacaacaaagattgatagaaatcaggccttgcttgttcctgcattaggggaaagttggggacatgctgctacaatacggctaatctttcattgggaccgaaagcaaaggttggcaacattgtacaagtcacccagccagaaggaatgcacagtactgtttcaaatcaaacctcagggatttagagatactgttgttacttctgcatgttcattgcaaacagaaggttccttgagcacccggaaacggtcacgagacccagaggaagaattataacccagaaacaaatctcaaagtgtacaaatttattgatgttgtgaaatcaatgtgtacaagtggacttgttaccttaaagtataaataaacacactatggcatgaatgaatccaaaaa

SEQ ID NO: 34936 - DNA, 1166 bp, Homo sapiens
ggtgcggagtttggctgctccggggttagcaggtgagcctgcgatgcgcgggaagacgttccgctttgaaatgcagcgggatttgaagttgggatatctaaagcagaagccttagaaactctgcaaattatcagaagagaatgtctcacaaataaaccaagatatgctggtacatctgagtcacacaagaagtgtacagcactggaacttcttgagcaggagcatacccagggcttcataatcaccttctgttcagcactagatgatattcttgggggtggagtgcccttaatgaaaacaacagaaatttgtggtgcaccaggtgttggaaaaacacaattatgaacaccgaaaagctttggaggatttcactcttgataatattctttctcatatttattattttcgctgtcgtgactacacagagttactggcacaagtttatcttcttccagatttcctttcagaacactcaaagccccaaacgtcttaaccggttccatcatcaactctaaaagtcccaggcttcatctaaatattatctaaatcagagattggtgagactctagttataattcatcctgaagtgaaattcccttccagctgtgaacgtttgaaatcaggttcgactagtgatagtggatggtattgcttttccatttcgtcatgacctagatgacctgtctcttcgtactcggttattaaatggcctagcccagcaaatgatcagccttgcaaataatcacagattagctgtaattttaaccaatcagatgacaacaaagattgatagaaatcaggccttgcttgttcctgcattaggggaaagttggggacatgctgctacaatacggctaatctttcattgggaccgaaagcaaaggttggcaacattgtacaagtcacccagccagaaggaatgcacagtactgtttcaaatcaaacctcagggatttagagatactgttgttacttctgcatgttcattgcaaacagaaggttccttgagcacccggaaacggtcacgagacccagaggaagaattataacccagaaacaaatctcaaagtgtacaaatttattgatgttgtgaaatcaatgtgtacaagtggacttgttaccttaaagtataaataaacacactatggcatgaatgaatccaaaaa

SEQ ID NO: 34937 - DNA, 1163 bp, Homo sapiens
ggtgcggagtttggctgctccggggttagcaggtgagcctgcgatgcgcgggaagacgttccgctttgaaatgcagcgggatttggtgagtttcccgctgtctccagcggtgcgggtgaagctggtgtctgcggggttccagactgctgaggaactcctagaggtgaaaccctccgagcttagcaaagaagttgggatatctaaagcagaagccttagaaactctgcaaattatcagaagagaatgtctcacaaataaaccaagatatgctggtacatctgagtcacacaagaagtgtacagcactggaacttcttgagcaggagcatacccagggcttcataatcaccttctgttcagcactagatgatattcttgggggtggagtgcccttaatgaaaacaacagaaatttgtggtgcaccaggtgttggaaaaacacaattatgtatgcagttggcagtagatgtgcagataccagaatgttttggaggagtggcaggtgaagcagtttttattgatacagagggaagttttatggttgatagagtggtagaccttgctactgcctgcattcagcaccttcagcttatagcagaaaaacacaagggagaggaacaccgaaaagctttggaggatttcactcttgataatattctttctcatatttattattttcgctgtcgtgactacacagagttactggcacaagtttatcttcttccagatttcctttcagaacactcaaaggttcgactagtgatagtggatggtattgcttttccatttcgtcatgacctagatgacctgtctcttcgtactcggttattaaatggcctagcccagcaaatgatcagccttgcaaataatcacagattagctgttggcaacattgtacaagtcacccagccagaaggaatgcacagtactgtttcaaatcaaacctcagggatttagagatactgttgttacttctgcatgttcattgcaaacagaaggttccttgagcacccggaaacggtcacgagacccagaggaagaattataacccagaaacaaatctcaaagtgtacaaatttattgatgttgtgaaatcaatgtgtacaagtggacttgttaccttaaagtataaataaacacactatggcatgaatgaatccaaaaa

SEQ ID NO: 34938 - DNA, 1350 bp, Homo sapiens
ggtgcggagtttggctgctccggggttagcaggtgagcctgcgatgcgcgggaagacgttccgctttgaaatgcagcgggatttggtgagtttcccgctgtctccagcggtgcgggtgaagctggtgtctgcggggttccagactgctgaggaactcctagaggtgaaaccctccgagcttagcaaagaagttgggatatctaaagcagaagccttagaaactctgcaaattatcagaagagaatgtctcacaaataaaccaagatatgctggtacatctgagtcacacaagaagtgtacagcactggaacttcttgagcaggagcatacccagggcttcataatcaccttctgttcagcactagatgatattcttgggggtggagtgcccttaatgaaaacaacagaaatttgtggtgcaccaggtgttggaaaaacacaattatgtatgcagttggcagtagatgtgcagataccagaatgttttggaggagtggcaggtgaagcagtttttattgatacagagggaagttttatggttgatagagtggtagaccttgctactgcctgcattcagcaccttcagcttatagcagaaaaacacaagggagaggaacaccgaaaagctttggaggatttcactcttgataatattctttctcatatttattattttcgctgtcgtgactacacagagttactggcacaagtttatcttcttccagatttcctttcagaacactcaaaggcccactgcagtagcagaatcaccctactgctctgtggggtggccctgccccttcctctctctgcaagggccccaccctctgaaaccaaggacgacatagcattgccccctgggcttatggttcgactagtgatagtggatggtattgcttttccatttcgtcatgacctagatgacctgtctcttcgtactcggttattaaatggcctagcccagcaaatgatcagccttgcaaataatcacagattagctgtaattttaaccaatcagatgacaacaaagattgatagaaatcaggccttgcttgttcctgcattaggttggcaacattgtacaagtcacccagccagaaggaatgcacagtactgtttcaaatcaaacctcagggatttagagatactgttgttacttctgcatgttcattgcaaacagaaggttccttgagcacccggaaacggtcacgagacccagaggaagaattataacccagaaacaaatctcaaagtgtacaaatttattgatgttgtgaaatcaatgtgtacaagtggacttgttaccttaaagtataaataaacacactatggcatgaatgaatccaaaaa

SEQ ID NO: 34939 - DNA, 1615 bp, Homo sapiens
ggtgcggagtttggctgctccggggttagcaggtgagcctgcgatgcgcgggaagacgttccgctttgaaatgcagcgggatttggtgagtttcccgctgtctccagcggtgcgggtgaagctggtgtctgcggggttccagactgctgaggaactcctagaggtgaaaccctccgagcttagcaaaggtaacgactcctgatggcaagctgaggcacaccggccgccgtcagcgccgcctcagtcttcgttctctcgcctcggccttcagcccagtctccgttagattctgcttcctcccacgtccatgtttacagcgtgaaagagctcctcgactccacttacaagttgtctgaatggttaggagaactgtggtcgtgaaaacatttactaattgcttttcctctggcaatgcctgctgaatgctttgaggattgtctcatttaaccctcaacccgcttacgtagattattatattcagtatatggatgagagaactgatatcttggggagcttaggtaacttttcatgctaactgggttaggaaatactggagtcagaattggttgtctaatttttgctgttccaagatccaaggggtaagggttaaatttcagaaatgcaggattttgtgtaggactagagacactaagaatgagaaagagagtagaatccccggaatcttgaggaagcatagaaagaatattctcttacgtaattaactgaaacacccaaaacctcatattccagagcattgcagatgggaaccactgcatcctgagacatacaaatatgaggctggcggtggtcacttgttgtgcacatctctctatgacatgtctggacctgtgctattcactgaagaagatggaacagaattttaagttactgcccttactgatggaaaatacagaggtttcaattcgcctctaaagaataagtctcgtggacccagccttaactgtttaagtcataccgcgcgcagactgtgtcccccaagatttgatgggctcttttttcttcaacaagttggcttttcaaagaagaaatgtgagaccctgaataataatgatcactaacaactattgactactttagatggtcttgatattctaccaagctttttacatgtatcgtctcattcccattttatagacgaaaaaaatctgagcaaaaaagaaaaagtgaagtaacttgcccaaagtcatgcaaagttgggatatctaaagcagaagccttagaaactctgcaaattatcagaagagaatgtctcacaaataaaccaagatatgctggtacatctgagtcacacaagaagtgtacagcactggaacttcttgagcaggagcatacccagggcttcataatcaccttctgttcagcactagatgatattcttgggggtggagtgcccttaatgaaaacaacagaaatttgtggtgcaccaggtgttggaaaaacacaattatggtaaaataaagtgttctccttttaagggtgggtttaataacatattatgaaagtagtattttgtactatcgtcaggaaaccaaataagatatatatgtgctcttaattttaagtgtgtatgtgcattaaacaaaaattagcttac

SEQ ID NO: 34940 - DNA, 1658 bp, Homo sapiens
ggtgcggagtttggctgctccggggttagcaggtgagcctgcgatgcgcgggaagacgttccgctttgaaatgcagcgggatttggtgagtttcccgctgtctccagcggtgcgggtgaagctggtgtctgcggggttccagactgctgaggaactcctagaggtgaaaccctccgagcttagcaaaggtaacgactcctgatggcaagctgaggcacaccggccgccgtcagcgccgcctcagtcttcgttctctcgcctcggccttcagcccagtctccgttagattctgcttcctcccacgtccatgtttacagcgtgaaagagctcctcgactccacttacaagttgtctgaatggttaggagaactgtggtcgtgaaaacatttactaattgcttttcctctggcaatgcctgctgaatgctttgaggattgtctcatttaaccctcaacccgcttacgtagattattatattcagtatatggatgagagaactgatatcttggggagcttaggtaacttttcatgctaactgggttaggaaatactggagtcagaattggttgtctaatttttgctgttccaagatccaaggggtaagggttaaatttcagaaatgcaggattttgtgtaggactagagacactaagaatgagaaagagagtagaatccccggaatcttgaggaagcatagaaagaatattctcttacgtaattaactgaaacacccaaaacctcatattccagagcattgcagatgggaaccactgcatcctgagacatacaaatatgaggctggcggtggtcacttgttgtgcacatctctctatgacatgtctggacctgtgctattcactgaagaagatggaacagaattttaagttactgcccttactgatggaaaatacagaggtttcaattcgcctctaaagaataagtctcgtggacccagccttaactgtttaagtcataccgcgcgcagactgtgtcccccaagatttgatgggctcttttttcttcaacaagttggcttttcaaagaagaaatgtgagaccctgaataataatgatcactaacaactattgactactttagatggtcttgatattctaccaagctttttacatgtatcgtctcattcccattttatagacgaaaaaaatctgagcaaaaaagaaaaagtgaagtaacttgcccaaagtcatgcaaagttgggatatctaaagcagaagccttagaaactctgcaaattatcagaagagaatgtctcacaaataaaccaagatatgctggtacatctgagtcacacaagaagtgtacagcactggaacttcttgagcaggagcatacccagggcttcataatcaccttctgttcagcactagatgatattcttgggggtggagtgcccttaatgaaaacaacagaaatttgtggtgcaccaggtgttggaaaaacacaattatggtaaaataaagtgttctccttttaagggtgggtttaataacatattatgaaagtagtattttgtactatcgtcaggaaaccaaataagatatatatgtgctcttaattttaagtgtgtatgtgcattaaacaaaaattagcttactatttgtgttacttcattatcccttcttgataaatgtatgcaa

SEQ ID NO: 34941 - DNA, 1921 bp, Homo sapiens
ggtgcggagtttggctgctccggggttagcaggtgagcctgcgatgcgcgggaagacgttccgctttgaaatgcagcgggatttggtgagtttcccgctgtctccagcggtgcgggtgaagctggtgtctgcggggttccagactgctgaggaactcctagaggtgaaaccctccgagcttagcaaaggtaacgactcctgatggcaagctgaggcacaccggccgccgtcagcgccgcctcagtcttcgttctctcgcctcggccttcagcccagtctccgttagattctgcttcctcccacgtccatgtttacagcgtgaaagagctcctcgactccacttacaagttgtctgaatggttaggagaactgtggtcgtgaaaacatttactaattgcttttcctctggcaatgcctgctgaatgctttgaggattgtctcatttaaccctcaacccgcttacgtagattattatattcagtatatggatgagagaactgatatcttggggagcttaggtaacttttcatgctaactgggttaggaaatactggagtcagaattggttgtctaatttttgctgttccaagatccaaggggtaagggttaaatttcagaaatgcaggattttgtgtaggactagagacactaagaatgagaaagagagtagaatccccggaatcttgaggaagcatagaaagaatattctcttacgtaattaactgaaacacccaaaacctcatattccagagcattgcagatgggaaccactgcatcctgagacatacaaatatgaggctggcggtggtcacttgttgtgcacatctctctatgacatgtctggacctgtgctattcactgaagaagatggaacagaattttaagttactgcccttactgatggaaaatacagaggtttcaattcgcctctaaagaataagtctcgtggacccagccttaactgtttaagtcataccgcgcgcagactgtgtcccccaagatttgatgggctcttttttcttcaacaagttggcttttcaaagaagaaatgtgagaccctgaataataatgatcactaacaactattgactactttagatggtcttgatattctaccaagctttttacatgtatcgtctcattcccattttatagacgaaaaaaatctgagcaaaaaagaaaaagtgaagtaacttgcccaaagtcatgcaaagttgggatatctaaagcagaagccttagaaactctgcaaattatcagaagagaatgtctcacaaataaaccaagatatgctggtacatctgagtcacacaagaagtgtacagcactggaacttcttgagcaggagcatacccagggcttcataatcaccttctgttcagcactagatgatattcttgggggtggagtgcccttaatgaaaacaacagaaatttgtggtgcaccaggtgttggaaaaacacaattatgtatgcagttggcagtagatgtgcagataccagaatgttttggaggagtggcaggtgaagcagtttttattgatacagagggaagttttatggttgatagagtggtagaccttgctactgcctgcattcagcaccttcagcttatagcagaaaaacacaagggagagggtaagttagtaaatgatcttctttttttctgtattaataaaagtaatttgcatttgtgcccatctgagacctcagcaacactccatttggaatgtgaagcctaattactggacagttaactagtgttaaactcttttactactgttacaaaatgagaaatgccacagcctggactggcttttttttgttccccttttatggccctcacttcttcctgtaggagctttgggacaaaacctatgtatgtattccagcctgggtgacagagcgagactctgtctcat

SEQ ID NO: 34942 - DNA, 2022 bp, Homo sapiens
ggtgcggagtttggctgctccggggttagcaggtgagcctgcgatgcgcgggaagacgttccgctttgaaatgcagcgggatttggtgagtttcccgctgtctccagcggtgcgggtgaagctggtgtctgcggggttccagactgctgaggaactcctagaggtgaaaccctccgagcttagcaaaggtaacgactcctgatggcaagctgaggcacaccggccgccgtcagcgccgcctcagtcttcgttctctcgcctcggccttcagcccagtctccgttagattctgcttcctcccacgtccatgtttacagcgtgaaagagctcctcgactccacttacaagttgtctgaatggttaggagaactgtggtcgtgaaaacatttactaattgcttttcctctggcaatgcctgctgaatgctttgaggattgtctcatttaaccctcaacccgcttacgtagattattatattcagtatatggatgagagaactgatatcttggggagcttaggtaacttttcatgctaactgggttaggaaatactggagtcagaattggttgtctaatttttgctgttccaagatccaaggggtaagggttaaatttcagaaatgcaggattttgtgtaggactagagacactaagaatgagaaagagagtagaatccccggaatcttgaggaagcatagaaagaatattctcttacgtaattaactgaaacacccaaaacctcatattccagagcattgcagatgggaaccactgcatcctgagacatacaaatatgaggctggcggtggtcacttgttgtgcacatctctctatgacatgtctggacctgtgctattcactgaagaagatggaacagaattttaagttactgcccttactgatggaaaatacagaggtttcaattcgcctctaaagaataagtctcgtggacccagccttaactgtttaagtcataccgcgcgcagactgtgtcccccaagatttgatgggctcttttttcttcaacaagttggcttttcaaagaagaaatgtgagaccctgaataataatgatcactaacaactattgactactttagatggtcttgatattctaccaagctttttacatgtatcgtctcattcccattttatagacgaaaaaaatctgagcaaaaaagaaaaagtgaagtaacttgcccaaagtcatgcaaagttgggatatctaaagcagaagccttagaaactctgcaaattatcagaagagaatgtctcacaaataaaccaagatatgctggtacatctgagtcacacaagaagtgtacagcactggaacttcttgagcaggagcatacccagggcttcataatcaccttctgttcagcactagatgatattcttgggggtggagtgcccttaatgaaaacaacagaaatttgtggtgcaccaggtgttggaaaaacacaattatgtatgcagttggcagtagatgtgcagataccagaatgttttggaggagtggcaggtgaagcagtttttattgatacagagggaagttttatggttgatagagtggtagaccttgctactgcctgcattcagcaccttcagcttatagcagaaaaacacaagggagaggaatctggctctaccgcccgggctggagtgcagtggcgcaatcttggcttactgcgaccttcacctcccaggttcaagcgattctcctgactcagcctcctgagtagctgggagctgcgaatacaggcacgtgccaccatacctggctaatttttgtatttttagtagagacagagtttcatcatgttggccagactggtctcaaacttctgacctcaagtgatcctcctacgtcggcttccctaagtgctgggattatgagtgtgaacacctgtgcccagctccaaatctaaccaaacttttgagttactaatctctggactcccctgtgttgttacatgcactatgcacaattaataaactctttctcttgttaatccatcttt

SEQ ID NO: 34943 - DNA, 1497 bp, Homo sapiens
ggtgcggagtttggctgctccggggttagcaggtgagcctgcgatgcgcgggaagacgttccgctttgaaatgcagcgggatttggtgagtttcccgctgtctccagcggtgcgggtgaagctggtgtctgcggggttccagactgctgaggaactcctagaggtgaaaccctccgagcttagcaaaggtaacgactcctgatggcaagctgaggcacaccggccgccgtcagcgccgcctcagtcttcgttctctcgcctcggccttcagcccagtctccgttagattctgcttcctcccacgtccatgtttacagcgtgaaagagctcctcgactccacttacaagttgtctgaatggttaggagaactgtggtcgtgaaaacatttactaattgcttttcctctggcaatgcctgctgaatgctttgaggattgtctcatttaaccctcaacccgcttacgtagattattatattcagtatatggatgagagaactgatatcttggggagcttaggtaacttttcatgctaactgggttaggaaatactggagtcagaattggttgtctaatttttgctgttccaagatccaaggggtaagggttaaatttcagaaatgcaggattttgtgtaggactagagacactaagaatgagaaagagagtagaatccccggaatcttgaggaagcatagaaagaatattctcttacgtaattaactgaaacacccaaaacctcatattccagagcattgcagatgggaaccactgcatcctgagacatacaaatatgaggctggcggtggtcacttgttgtgcacatctctctatgacatgtctggacctgtgctattcactgaagaagatggaacagaattttaagttactgcccttactgatggaaaatacagaggtttcaattcgcctctaaagaataagtctcgtggacccagccttaactgtttaagtcataccgcgcgcagactgtgtcccccaagatttgatgggctcttttttcttcaacaagttggcttttcaaagaagaaataagttgggatatctaaagcagaagccttagaaactctgcaaattatcagaagagaatgtctcacaaataaaccaagatatgctggtacatctgagtcacacaagaagtgtacagcactggaacttcttgagcaggagcatacccagggcttcataatcaccttctgttcagcactagatgatattcttgggggtggagtgcccttaatgaaaacaacagaaatttgtggtgcaccaggtgttggaaaaacacaattatggtaaaataaagtgttctccttttaagggtgggtttaataacatattatgaaagtagtattttgtactatcgtcaggaaaccaaataagatatatatgtgctcttaattttaagtgtgtatgtgcattaaacaaaaattagcttactatttgtgttacttcattatcccttcttgataaatgtatgcaa

SEQ ID NO: 34944 - DNA, 550 bp, Homo sapiens
agatggcagcagctcactgcagagcagcgcgagctgtcgctgcaagcggtgatcgcctgggaaatccagaacctgcccgaagagcagcgcaccggctacatggggccgcaggaatgcgcgtcgaagtcggcgccggtgccgaacatcctgttcaagtcggatgcgatccattgatagaaatcaggccttgcttgttcctgcattaggggaaagttggggacatgctgctacaatacggctaatctttcattgggaccgaaagcaaaggttggcaacattgtacaagtcacccagccagaaggaatgcacagtactgtttcaaatcaaacctcagggatttagagatactgttgttacttctgcatgttcattgcaaacagaaggttccttgagcacccggaaacggtcacgagacccagaggaagaattataacccagaaacaaatctcaaagtgtacaaatttattgatgttgtgaaatcaatgtgtacaagtggacttgttaccttaaagtataaataaacacactatggcatgaatgaatccaaaaa

SEQ ID NO: 34945 - DNA, 965 bp, Homo sapiens
tagagatggggtttcaccatgttgcccagctggtcagaaggcggaggttgggctcaagcgatcatctgccggcctcagcctcctaaagtactaggattacaggtgcatgccaccatgtctggttaatttttgtatttttagtagagatggggtttcacaatcttggccagactggtctacttgataattttcaaagagactcacctaattttcttacattttgtttttgtaggtaattttaaccaatcagatgacaacaaagattgatagaaatcaggccttgcttgttcctgcattaggtgggtaattaatcagataaacattttagtttatcacagtttttcttatctctttcatttgattctcattgagtactatacgcttcatgaaagcagactgtatttgtcttgttcactggttaatcttagcactaagcacagtaccgttagatactgattgttccttttagttatttaacatttattgagtggccagacacagtgtcccacacctgtaatcccaacaccttgggaggccgaggcggatcacttgaggctggtcttgaactcctgacctcatgatctgcccacctcagcctcccaaagtgctgggattacaggtgtgagccactgcgcctggccctagaataaagtagctttcttattagttacttaaaaatatttctaagatcagtcttcaaatgttcttaaagcatatttgtatatatattttttatctttcagcctcagggatttagagatactgttgttacttctgcatgttcattgcaaacagaaggttccttgagcacccggaaacggtcacgagacccagaggaagaattataacccagaaacaaatctcaaagtgtacaaatttattgatgttgtgaaatcaatgtgtacaagtggacttgttaccttaaagtataaataaacacactatggcatgaatgaatccaaaaa

SEQ ID NO: 34946 - DNA, 510 bp, Homo sapiens
tttcgttatgttaaattaataaagtaagattatatttgatcagaggcgttctgagaaatgtataaccaagtcagtaaggccatatacagttattatgttttttactctcaggggaaagttggggacatgctgctacaatacggctaatctttcattgggaccgaaagcaaaggtcagtacagaaacaagttaataactccgaatattgggttaattatactgaatgaacacttacaggtttcttagagctagtcctgtggatgagatatacagtgacccatgaagtgacacttttgttgccttgtctgatatcacctagagcaaacatagaaatgtgttgttattactgcatatttagctacataggaaattctctggaatatttaaatgatggggcgcatgcacctgaaatgagtaggtggccaaggaatgccattttctaaagctcttcgaaataatttattagccatgtagaaggaggtgagtactctgtgttcctggaagagattg

SEQ ID NO: 34947 - DNA, 343 bp, Homo sapiens
tagtaattttgctataatttgtcatctttcagttaaagaattttgttatccaaaggagaacattttgttattaaaaagcattgtttttctacaattgccaatacatccaaacaggtaaaactaattaagagtgttttgttgtttcagaacaccgaaaagctttggaggatttcactcttgataatattctttctcatatttattattttcgctgtcgtgactacacagagttactggcacaagtttatcttcttccagatttcctttcagaacactcaaaggtatgagtcagactactgaaatgtaactaaccaagtattttttgaggtgtttgataagcatg

SEQ ID NO: 34948 - DNA, 559 bp, Homo sapiens
caccttggtggtgacactgcctcacaaggtggaggacgagcgggtgctccagcaggccctgcagctctgagggagccaggagtcgcggcccctgcctcccttcctccctggcgatcctcacctgcccagccatggcacacacccttcctgcacacccgcactacctgcacttctcgcacatcctcacgtggcccttatggtgccctgtgcagggtgccaccacagcctcattttacagacagccccctgaggcccagagacatgcagctctctgtccacaaccatgccacttgcatgggagccctgaaggctgtcaaagtccatttagggccaagtcccaagcctcccgggggcctgcggtgaacactggtcaagctctctccggctgggatgatcacaccctctgcttcctggccacctgccagcctccatgcaactctgtctgtctgctgcccatctgctgtctgtgcaagcaacttctggaccctggcaccctgggctgctggcctggaggagttcgggaaggaggatagaccaggaaataaagggtcaacagagc

SEQ ID NO: 34949 - DNA, 533 bp, Homo sapiens
cataaagctatcctgtttttcatgtttaggacattgttcccataaattcatgagctattcaaccctttataataaaaaagaatttgtgttagatgattttgcccaaatgtaggttaatgtaagtgttctgagtacgtttaaggtaggctagtctaagctctgatgctcagtaggttaggtgtattaaagacgtttttacttacgatatcttcccctcccaataaacccattgtaagtcaagaagcacctgtagaggtctgcctttaccaatttcagctgcgacaaatttaatgttcctgtattgcttttaaattggagagcagaagcaggtctgaaacaaatactgcagttagctttgtgttcttcgctatttattgaacagttcagagggcaaggaagcaaagagaagtgctctgagtgtgtctttgcttgccagctcctgaatttttaacagttctacagtggccttcctgtatttttctctcgttttgtgtgttctcttctgtttttgttgaccctgtctcaaaaaaaaa

SEQ ID NO: 34950 - DNA, 458 bp, Homo sapiens
gcggccgcctactactactactactaattcgcggccgcgtcgactgtaatcccagcactttgggaggccgagtgggtggatcatgaggtcaggagatcgagaccatcttggctaacatggtgaaaccccgtctctattaaaaatacaaaaaattagccaggcgtggtggtgggcacctgtagtcccagctacttgggagactgaggcaggagaatggcgtgaacccaggaggcagagcttgcagtgagctgagatcacgccactgcactccaccctaggcgacagagtgagattctgtctcaaaaaaaaaaaaagaaagcaaaaaaagattaccccaccttctttccatagtcctccctggaaggaggtcgatgtgcagagcccatgcttaaggaatgtggagttacactccactccttcatggggggtggggatatctgtataaattatttggaata

SEQ ID NO: 34951 - DNA, 349 bp, Homo sapiens
gcccagctccttctttcagggtggggggcattcagcctccactgtgtctgtcttttcttccctggggctccccctcgaggcgaggggccatgcatgtctgggggacccctgccccccaaaaccctctgtctgtctctgtctctttgctgtttgtccaagactcagtgtcccgacccttgttctcgccgtgaatgtcaatgggccaatcctctctgtcctttcagacacacacacacctgtgtccaccccttctgttcgccacaccctgcgtctggccggtccccccactgctgctgctatcaacgccagaataaacacactctgtgggtctcactccaactgggcctcc

SEQ ID NO: 34952 - DNA, 1523 bp, Homo sapiens
cccaccttggccgggattaccctccgagttccaggccatgacaaatgacatcactcccggcccaggcttaaaatctccccatgtgaggggatgtgtttccttcagcctctgctgtctggccgctctgtctaggtcctgggccacgggagagccccgtccctcctttctgaaggccccctgacttgggcctcagtgtccccgaagatcatgatggcgtatatgaacccggggccccactattctgtcaacgccttggccctaagtggccccagtgtggatctgatgcaccaggctgtgccctacccaagcgcccccaggaagcagcggcgggagcgcaccaccttcacccggagccaactggaggagctggaggcactgtttgccaagacccagtacccagacgtctatgcccgtgaggaggtggctctgaagatcaatctgcctgagtccagggttcaggtttggttcaagaaccggagggctaaatgcaggcagcagcgacagcagcagaaacagcagcagcagcccccagggggccaggccaaggcccggcctgccaagaggaaggcgggcacgtccccaagaccctccacagatgtgtgtccagaccctctgggcatctcagattcctacagtccccctctgcccggcccctcaggctccccaaccacggcagtggccactgtgtccatctggagcccagcctcagagtcccctttgcctgaggcgcagcgggctgggctggtggcctcagggccgtctctgacctccgccccctatgccatgacctacgccccggcctccgctttctgctcttccccctccgcctatgggtctccgagctcctatttcagcggcctagacccctacctttctcccatggtgccccagctagggggcccggctcttagccccctctctggcccctccgtgggaccttccctggcccagtcccccacctccctatcaggccagagctatggcgcctacagccccgtggatagcttggaattcaaggaccccacgggcacctggaaattcacctacaatcccatggaccctctggactacaaggatcagagtgcctggaagtttcagatcttgtagaggacgcagtctccatctctctccatcgggcctcgggaccctttctcttctgaatctgcttccctgcagtttagatcccgggatggcattcctgagaaagcaacccgaaccagctgtccttctgacagctcggtgttcagcttacagagaccacccctttcctccacagggagaggctcctccctctcctgggacagctcacaggtcctagtgattctctcaaccctaacaccgtctggcacgattgtgaccgctgaagtacaccacgagctccaggcttcagaaagtggtgctgagaacttgctccaagaagtcaaaccaaacttgcagttgatttggggtcatgtttaggtcagaatcaccgtgcccttgaacaagcaggtaggggggcttgataacttaactttccacgtgga

SEQ ID NO: 34953 - DNA, 1577 bp, Homo sapiens
aagagttgctgacaccttctctgtcccgctggaagttattttctcctccctctccctgtacagctgaccttccttccctgctgcagggccagggggtctgttccaggactggattctcccatcaggagcctctggactggtcgccgagggtcagacggcccctccctctcttgctgtcatccctggctcttcaagctaatgagacctgtcctgattcctcagccaggccccctgacttgggcctcagtgtccccgaagatcatgatggcgtatatgaacccggggccccactattctgtcaacgccttggccctaagtggccccagtgtggatctgatgcaccaggctgtgccctacccaagcgcccccaggaagcagcggcgggagcgcaccaccttcacccggagccaactggaggagctggaggcactgtttgccaagacccagtacccagacgtctatgcccgtgaggaggtggctctgaagatcaatctgcctgagtccagggttcaggtttggttcaagaaccggagggctaaatgcaggcagcagcgacagcagcagaaacagcagcagcagcccccagggggccaggccaaggcccggcctgccaagaggaaggcgggcacgtccccaagaccctccacagatgtgtgtccagaccctctgggcatctcagattcctacagtccccctctgcccggcccctcaggctccccaaccacggcagtggccactgtgtccatctggagcccagcctcagagtcccctttgcctgaggcgcagcgggctgggctggtggcctcagggccgtctctgacctccgccccctatgccatgacctacgccccggcctccgctttctgctcttccccctccgcctatgggtctccgagctcctatttcagcggcctagacccctacctttctcccatggtgccccagctagggggcccggctcttagccccctctctggcccctccgtgggaccttccctggcccagtcccccacctccctatcaggccagagctatggcgcctacagccccgtggatagcttggaattcaaggaccccacgggcacctggaaattcacctacaatcccatggaccctctggactacaaggatcagagtgcctggaagtttcagatcttgtagaggacgcagtctccatctctctccatcgggcctcgggaccctttctcttctgaatctgcttccctgcagtttagatcccgggatggcattcctgagaaagcaacccgaaccagctgtccttctgacagctcggtgttcagcttacagagaccacccctttcctccacagggagaggctcctccctctcctgggacagctcacaggtcctagtgattctctcaaccctaacaccgtctggcacgattgtgaccgctgaagtacaccacgagctccaggcttcagaaagtggtgctgagaacttgctccaagaagtcaaaccaaacttgcagttgatttggggtcatgtttaggtcagaatcaccgtgcccttgaacaagcaggtaggggggcttgataacttaactttccacgtgga

SEQ ID NO: 34954 - DNA, 3995 bp, Homo sapiens
gtttttttccagatttataatttaatggctgtgcagatcccagtccctcatttctgtcgctcacgtgcccactggtctggggtcagggttttctgttcaaaggcatggatgtgcgggagctcttctgctaggcacgcgttcaccagcctgtgtctctgaagcagcggtttcccctcgaacttggccgacaccaccaggactcggaagctacaggagcaacggttgagggtcgtgtcctccacctccacatgctccgcctccaggtcccgctgcagcttctcgcggaggtattcggcgctgagttccatggcggcagtccagctggaacggcagcccagtccagccttgccccggcgccctgacctgacgccctggcctgacgccctgcttcgtcgcctcctttctctcccaggtgctggaccagggactgagcgtcccccggagagggtccggtgtgaccccgacaagaagcagaaatggggaagaaactggatctttccaagctcactgatgaagaggcccagcatgtcttggaagttgttcaacgagattttgacctccgaaggaaagaagaggaacggctagaggcgttgaagggcaagattaagaaggaaagctccaagagggagctgctttccgacactgcccatctgaacgagacccactgcgcccgctgcctgcagccctaccagctgcttgtgaatagcaaaaggcagtgcctggaatgtggcctcttcacctgcaaaagctgtggccgcgtccacccggaggagcagggctggatctgtgacccctgccatctggccagagtcgtgaagatcggctcactggagtggtactatgagcatgtgaaagcccgcttcaagaggttcggaagtgccaaggtcatccggtccctccacgggcggctgcagggtggagctgggcctgaactgatatctgaagagagaagtggagacagcgaccagacagatgaggatggagaacctggctcagaggcccaggcccaggcccagccctttggcagcaaaaaaaagcgcctcctctccgtccacgacttcgacttcgagggagactcagatgactccactcagcctcaaggtcactccctgcacctgtcctcagtccctgaggccagggacagcccacagtccctcacagatgagtcctgctcagagaaggcagcccctcacaaggctgagggcctggaggaggctgatactggggcctctgggtgccactcccatccggaagagcagccgaccagcatctcaccttccagacacggcgccctggctgagctctgcccgcctggaggctcccacaggatggccctggggactgctgctgcactcgggtcgaatgtcatcaggaatgagcagctgcccctgcagtacttggccgatgtggacacctctgatgaggaaagcatccgggctcacgtgatggcctcccaccattccaagcggagaggccgggcgtcttctgagagtcagatctttgagctgaataagcatatttcagctgtggaatgcctgctgacctacctggagaacacagttgtgcctcccttggccaagggtctaggtgctggagtgcgcacggaggccgatgtagaggaggaggccctgaggaggaagctggaggagctgaccagcaacgtcagtgaccaggagacctcgtccgaggaggaggaagccaaggacgaaaaggcagagcccaacagggacaaatcagttgggcctctcccccaggcggacccggaggtgggcacggctgcccatcaaaccaacagacaggaaaaaagcccccaggaccctggggaccccgtccagtacaacaggaccacagatgaggagctgtcagagctggaggacagagtggcagtgacggcctcagaagtccagcaggcagagagcgaggtttcagacattgaatccaggattgcagccctgagggccgcagggctcacggtgaagccctcgggaaagccccggaggaagtcaaacctcccgatatttctccctcgagtggctgggaaacttggcaagagaccagaggacccaaatgcagacccttcaagtgaggccaaggcaatggctgtgccctatcttctgagaagaaagttcagtaattccctgaaaagtcaaggtaaagatgatgattcttttgatcggaaatcagtgtaccgaggctcgctgacacagagaaaccccaacgcgaggaaaggaatggccagccacaccttcgcgaaacctgtggtggcccaccagtcctaacgggacaggacagagagacagagcagccctgcactgttttccctccaccacagccatcctgtccctcattggctctgtgctttccactatacacagtcaccgtcccaatgagaaacaagaaggagcaccctccacatggactcccacctgcaagtggacagcgacattcagtcctgcactgctcacctgggtttactgatgactcctggctgccccaccatcctctctgatctgtgagaaacagctaagctgctgtgacttccctttaggacaatgttgtgtaaatctttgaaggacacaccgaagacctttatactgtgatcttttacccctttcactcttggctttcttatgttgctttcatgaatggaatggaaaaaagatgactcagttaaggcaccagccatatgtgtattcttgatggtctatatcggggtgtgagcagatgtttgcgtatttcttgtgggtgtgactggatattagacatccggacaagtgactgaactaatgatctgctgaataatgaaggaggaatagacaccccagtccccaccctacgtgcacccgctctgcaagttcccatgtgatctgtagaccaggggaaattacactgcggtcaagggcagagcctgcacatgacagcaagtgagcatttgatagatgctcagatgctagtgcagagagcctgctgggagacgaagagacagcaggcagagctccagatgggcaaggaagaggcttggttctagcctggctctgcccctcactgcagtggatccagtggggcagaggacagagggtcacaaccaatgagggatgtctgccaaggatgggggtgcagaggccacaggagtcagcttgccactcgcccattggttacatagatgatctctcagacaggctgggactcagagttatttcctagtatcggtgtgccccatccagttttaagtggagccctccaagactctccagagctgcctttgaacatcctaacagtaatcacatctcaccctccctgaggttcactttagacaggacccaatggctgcactgcctttgtcagagggggtgctgagaggagtggcttcttttagaatcaaacagtagagacaagagtcaagccttgtgtcttcaagcattgaccaagttaagtgtttccttccctctctcaataagacacttccaggagctttccaatctctcacttaaaactaaggtttgaatctcaaagtgttgctgggaggctgatactcctgcaacttcaggagacctgtgagcacacattagcagctgtttctctgactccttgtggcatcagataaaaacgtgggagtttttccatataattcccagccttacttataaattctattctttgaaaaaattattcaggctaggtaaggtggctcatacctataatcccagccctttgagaggccaaggtgggagaattgcttgaggccaggagtttgagacctcctgggcaacatagtgagatcccatctctacaaaaaacaaaacaaaaaaattacccaagcatgatggtatatgcctgtagtcgtacctacttacttaggaggctgaggcaggaggatcacttgagccctggaggttggggctgcagtgagccatgatcgcatcactatactcgagcctgggcaacagagtgagaccttgtctcttaaaaaaattaataataaataaatgaaaata

SEQ ID NO: 34955 - DNA, 3646 bp, Homo sapiens
agttgcccgcctgccccggagagccaggcgctaaccagccgctctgcgccccgcgccctgcttgcccccattatccagccttgccccggcgccctgacctgacgccctggcctgacgccctgcttcgtcgcctcctttctctcccaggtgctggaccagggactgagcgtcccccggagagggtccggtgtgaccccgacaagaagcagaaatggggaagaaactggatctttccaagctcactgatgaagaggcccagcatgtcttggaagttgttcaacgagattttgacctccgaaggaaagaagaggaacggctagaggcgttgaagggcaagattaagaaggaaagctccaagagggagctgctttccgacactgcccatctgaacgagacccactgcgcccgctgcctgcagccctaccagctgcttgtgaatagcaaaaggcagtgcctggaatgtggcctcttcacctgcaaaagctgtggccgcgtccacccggaggagcagggctggatctgtgacccctgccatctggccagagtcgtgaagatcggctcactggagtggtactatgagcatgtgaaagcccgcttcaagaggttcggaagtgccaaggtcatccggtccctccacgggcggctgcagggtggagctgggcctgaactgatatctgaagagagaagtggagacagcgaccagacagatgaggatggagaacctggctcagaggcccaggcccaggcccagccctttggcagcaaaaaaaagcgcctcctctccgtccacgacttcgacttcgagggagactcagatgactccactcagcctcaaggtcactccctgcacctgtcctcagtccctgaggccagggacagcccacagtccctcacagatgagtcctgctcagagaaggcagcccctcacaaggctgagggcctggaggaggctgatactggggcctctgggtgccactcccatccggaagagcagccgaccagcatctcaccttccagacacggcgccctggctgagctctgcccgcctggaggctcccacaggatggccctggggactgctgctgcactcgggtcgaatgtcatcaggaatgagcagctgcccctgcagtacttggccgatgtggacacctctgatgaggaaagcatccgggctcacgtgatggcctcccaccattccaagcggagaggccgggcgtcttctgagagtcagggtctaggtgctggagtgcgcacggaggccgatgtagaggaggaggccctgaggaggaagctggaggagctgaccagcaacgtcagtgaccaggagacctcgtccgaggaggaggaagccaaggacgaaaaggcagagcccaacagggacaaatcagttgggcctctcccccaggcggacccggaggtgggcacggctgcccatcaaaccaacagacaggaaaaaagcccccaggaccctggggaccccgtccagtacaacaggaccacagatgaggagctgtcagagctggaggacagagtggcagtgacggcctcagaagtccagcaggcagagagcgaggtttcagacattgaatccaggattgcagccctgagggccgcagggctcacggtgaagccctcgggaaagccccggaggaagtcaaacctcccgatatttctccctcgagtggctgggaaacttggcaagagaccagaggacccaaatgcagacccttcaagtgaggccaaggcaatggctgtgccctatcttctgagaagaaagttcagtaattccctgaaaagtcaaggtaaagatgatgattcttttgatcggaaatcagtgtaccgaggctcgctgacacagagaaaccccaacgcgaggaaaggaatggccagccacaccttcgcgaaacctgtggtggcccaccagtcctaacgggacaggacagagagacagagcagccctgcactgttttccctccaccacagccatcctgtccctcattggctctgtgctttccactatacacagtcaccgtcccaatgagaaacaagaaggagcaccctccacatggactcccacctgcaagtggacagcgacattcagtcctgcactgctcacctgggtttactgatgactcctggctgccccaccatcctctctgatctgtgagaaacagctaagctgctgtgacttccctttaggacaatgttgtgtaaatctttgaaggacacaccgaagacctttatactgtgatcttttacccctttcactcttggctttcttatgttgctttcatgaatggaatggaaaaaagatgactcagttaaggcaccagccatatgtgtattcttgatggtctatatcggggtgtgagcagatgtttgcgtatttcttgtgggtgtgactggatattagacatccggacaagtgactgaactaatgatctgctgaataatgaaggaggaatagacaccccagtccccaccctacgtgcacccgctctgcaagttcccatgtgatctgtagaccaggggaaattacactgcggtcaagggcagagcctgcacatgacagcaagtgagcatttgatagatgctcagatgctagtgcagagagcctgctgggagacgaagagacagcaggcagagctccagatgggcaaggaagaggcttggttctagcctggctctgcccctcactgcagtggatccagtggggcagaggacagagggtcacaaccaatgagggatgtctgccaaggatgggggtgcagaggccacaggagtcagcttgccactcgcccattggttacatagatgatctctcagacaggctgggactcagagttatttcctagtatcggtgtgccccatccagttttaagtggagccctccaagactctccagagctgcctttgaacatcctaacagtaatcacatctcaccctccctgaggttcactttagacaggacccaatggctgcactgcctttgtcagagggggtgctgagaggagtggcttcttttagaatcaaacagtagagacaagagtcaagccttgtgtcttcaagcattgaccaagttaagtgtttccttccctctctcaataagacacttccaggagctttccaatctctcacttaaaactaaggtttgaatctcaaagtgttgctgggaggctgatactcctgcaacttcaggagacctgtgagcacacattagcagctgtttctctgactccttgtggcatcagataaaaacgtgggagtttttccatataattcccagccttacttataaattctattctttgaaaaaattattcaggctaggtaaggtggctcatacctataatcccagccctttgagaggccaaggtgggagaattgcttgaggccaggagtttgagacctcctgggcaacatagtgagatcccatctctacaaaaaacaaaacaaaaaaattacccaagcatgatggtatatgcctgtagtcgtacctacttacttaggaggctgaggcaggaggatcacttgagccctggaggttggggctgcagtgagccatgatcgcatcactatactcgagcctgggcaacagagtgagaccttgtctcttaaaaaaattaataataaataaatgaaaata

SEQ ID NO: 34956 - DNA, 515 bp, Homo sapiens
gcatttttacagaagcgataggggaaaggaagcaatcagctatgcaggtgagcctcagggggatgactgtgaatagaatgggaggcagctttgccctaagcagttcccagcttgactttttcctttagcttggtgattgtggagtctcaagatttgttttcttttcacaatctgaaattcaaagttccctgggtatcctgtattttcatttgcacactttggcgccctagtcccagagtcctggagcggcatactgggggtggctgtgcagtcccagcatccccaacccagcatgtatagagagcatccatccttacatccagctgacccatgcccatgctcctccctgtggctggaggttcaacaataacataagtctcttctttgccctccagatatttctccctcgagtggctgggaaacttggcaagagaccagaggacccaaatgcagacccttcaagtgaggccaaggtatgtgttactccattcaagccccagacacccgacaaaggt

SEQ ID NO: 34957 - DNA, 490 bp, Homo sapiens
catctcatagctgattcctgaggataaaactaatgctatgaaccacgtaccttttaaaatgcgtattcccggagttaaaaacaattcacttaaattcattaaactacacaagtttccagacaagcattagaaaaccatttaacccaagtacagacagatgtcctgagaagtcagcagcgttctgtgttgtctcttactctgtgacttgattggtattggtaggcttctgggactgatgacttgtgatcctgtgacattccaggtgtgaccccgacaagaagcagaaatggggaagaaactggatctttccaagctcactgatgaagaggcccagcatgtcttggaagttgttcaacgagattttgacctccgaaggaaagaagaggaacggctagagtgagtgtgccgtgctgagcccacggagcccggggtccctgatcttcccccagggccatcatatgggtgctgtatgggtgggtcaacagccacg

SEQ ID NO: 34958 - DNA, 468 bp, Homo sapiens
cagtggtaagggggagtgctgggatttaaaccagacctgcagggcagaaacttgtactctttctgccataccacccaaatgtggcagcttccccaaagctgagcatctcttatttcaggcatttcatgcttaatttattgaaaatgtccattctcatattgctaaaagttcaaatattgctagagagcagaaaatagtggccatggttaattagaagctggaagaacaataagaaatccaaaattagttgacaattcctaaacgtcacaacttgatgaagcctgggtgacagagcaagactttgtctcaaaaaaaaaaaaaagaaagaacaaaaaagaaaagaaagtcaaggaaatgcgaagaccacacaccagtgcagtgtgatgggcctttctgctgcttcattagtgtgaggatttccagggccacagcactccagcctgggtgacagagcaagactttgtctca

SEQ ID NO: 34959 - DNA, 3745 bp, Homo sapiens
cgctagtagaggcggggtgaatcggacgaggcggagagccaggcgctaaccagccgctctgcgccccgcgccctgcttgcccccattatccagccttgccccggcgccctgacctgacgccctggcctgacgccctgcttcgtcgcctcctttctctcccaggtgctggaccagggactgagcgtcccccggagagggtccggtgtgaccccgacaagaagcagaaatggggaagaaactggatctttccaagctcactgatgaagaggcccagcatgtcttggaagttgttcaacgagattttgacctccgaaggaaagaagaggaacggctagaggcgttgaagggcaagattaagaaggaaagctccaagagggagctgctttccgacactgcccatctgaacgagacccactgcgcccgctgcctgcagccctaccagctgcttgtgaatagcaaaaggcagtgcctggaatgtggcctcttcacctgcaaaagctgtggccgcgtccacccggaggagcagggctggatctgtgacccctgccatctggccagagtcgtgaagatcggctcactggagtggtactatgagcatgtgaaagcccgcttcaagaggttcggaagtgccaaggtcatccggtccctccacgggcggctgcagggtggagctgggcctgaactgatatctgaagagagaagtggagacagcgaccagacagatgaggatggagaacctggctcagaggcccaggcccaggcccagccctttggcagcaaaaaaaagcgcctcctctccgtccacgacttcgacttcgagggagactcagatgactccactcagcctcaaggtcactccctgcacctgtcctcagtccctgaggccagggacagcccacagtccctcacagatgagtcctgctcagagaaggcagcccctcacaaggctgagggcctggaggaggctgatactggggcctctgggtgccactcccatccggaagagcagccgaccagcatctcaccttccagacacggcgccctggctgagctctgcccgcctggaggctcccacaggatggccctggggactgctgctgcactcgggtcgaatgtcatcaggaatgagcagctgcccctgcagtacttggccgatgtggacacctctgatgaggaaagcatccgggctcacgtgatggcctcccaccattccaagcggagaggccgggcgtcttctgagagtcagatctttgagctgaataagcatatttcagctgtggaatgcctgctgacctacctggagaacacagttgtgcctcccttggccaagggtctaggtgctggagtgcgcacggaggccgatgtagaggaggaggccctgaggaggaagctggaggagctgaccagcaacgtcagtgaccaggagacctcgtccgaggaggaggaagccaaggacgaaaaggcagagcccaacagggacaaatcagttgggcctctcccccaggcggacccggaggtgggcacggctgcccatcaaaccaacagacaggaaaaaagcccccaggaccctggggaccccgtccagtacaacaggaccacagatgaggagctgtcagagctggaggacagagtggcagtgacggcctcagaagtccagcaggcagagagcgaggtttcagacattgaatccaggattgcagccctgagggccgcagggctcacggtgaagccctcgggaaagccccggaggaagtcaaacctcccgatatttctccctcgagtggctgggaaacttggcaagagaccagaggacccaaatgcagacccttcaagtgaggccaaggcaatggctgtgccctatcttctgagaagaaagttcagtaattccctgaaaagtcaaggtaaagatgatgattcttttgatcggaaatcagtgtaccgaggctcgctgacacagagaaaccccaacgcgaggaaaggaatggccagccacaccttcgcgaaacctgtggtggcccaccagtcctaacgggacaggacagagagacagagcagccctgcactgttttccctccaccacagccatcctgtccctcattggctctgtgctttccactatacacagtcaccgtcccaatgagaaacaagaaggagcaccctccacatggactcccacctgcaagtggacagcgacattcagtcctgcactgctcacctgggtttactgatgactcctggctgccccaccatcctctctgatctgtgagaaacagctaagctgctgtgacttccctttaggacaatgttgtgtaaatctttgaaggacacaccgaagacctttatactgtgatcttttacccctttcactcttggctttcttatgttgctttcatgaatggaatggaaaaaagatgactcagttaaggcaccagccatatgtgtattcttgatggtctatatcggggtgtgagcagatgtttgcgtatttcttgtgggtgtgactggatattagacatccggacaagtgactgaactaatgatctgctgaataatgaaggaggaatagacaccccagtccccaccctacgtgcacccgctctgcaagttcccatgtgatctgtagaccaggggaaattacactgcggtcaagggcagagcctgcacatgacagcaagtgagcatttgatagatgctcagatgctagtgcagagagcctgctgggagacgaagagacagcaggcagagctccagatgggcaaggaagaggcttggttctagcctggctctgcccctcactgcagtggatccagtggggcagaggacagagggtcacaaccaatgagggatgtctgccaaggatgggggtgcagaggccacaggagtcagcttgccactcgcccattggttacatagatgatctctcagacaggctgggactcagagttatttcctagtatcggtgtgccccatccagttttaagtggagccctccaagactctccagagctgcctttgaacatcctaacagtaatcacatctcaccctccctgaggttcactttagacaggacccaatggctgcactgcctttgtcagagggggtgctgagaggagtggcttcttttagaatcaaacagtagagacaagagtcaagccttgtgtcttcaagcattgaccaagttaagtgtttccttccctctctcaataagacacttccaggagctttccaatctctcacttaaaactaaggtttgaatctcaaagtgttgctgggaggctgatactcctgcaacttcaggagacctgtgagcacacattagcagctgtttctctgactccttgtggcatcagataaaaacgtgggagtttttccatataattcccagccttacttataaattctattctttgaaaaaattattcaggctaggtaaggtggctcatacctataatcccagccctttgagaggccaaggtgggagaattgcttgaggccaggagtttgagacctcctgggcaacatagtgagatcccatctctacaaaaaacaaaacaaaaaaattacccaagcatgatggtatatgcctgtagtcgtacctacttacttaggaggctgaggcaggaggatcacttgagccctggaggttggggctgcagtgagccatgatcgcatcactatactcgagcctgggcaacagagtgagaccttgtctcttaaaaaaattaataataaataaatgaaaata

SEQ ID NO: 34960 - DNA, 3730 bp, Homo sapiens
agttgcccgcctgccccggagagccaggcgctaaccagccgctctgcgccccgcgccctgcttgcccccattatccagccttgccccggcgccctgacctgacgccctggcctgacgccctgcttcgtcgcctcctttctctcccaggtgctggaccagggactgagcgtcccccggagagggtccggtgtgaccccgacaagaagcagaaatggggaagaaactggatctttccaagctcactgatgaagaggcccagcatgtcttggaagttgttcaacgagattttgacctccgaaggaaagaagaggaacggctagaggcgttgaagggcaagattaagaaggaaagctccaagagggagctgctttccgacactgcccatctgaacgagacccactgcgcccgctgcctgcagccctaccagctgcttgtgaatagcaaaaggcagtgcctggaatgtggcctcttcacctgcaaaagctgtggccgcgtccacccggaggagcagggctggatctgtgacccctgccatctggccagagtcgtgaagatcggctcactggagtggtactatgagcatgtgaaagcccgcttcaagaggttcggaagtgccaaggtcatccggtccctccacgggcggctgcagggtggagctgggcctgaactgatatctgaagagagaagtggagacagcgaccagacagatgaggatggagaacctggctcagaggcccaggcccaggcccagccctttggcagcaaaaaaaagcgcctcctctccgtccacgacttcgacttcgagggagactcagatgactccactcagcctcaaggtcactccctgcacctgtcctcagtccctgaggccagggacagcccacagtccctcacagatgagtcctgctcagagaaggcagcccctcacaaggctgagggcctggaggaggctgatactggggcctctgggtgccactcccatccggaagagcagccgaccagcatctcaccttccagacacggcgccctggctgagctctgcccgcctggaggctcccacaggatggccctggggactgctgctgcactcgggtcgaatgtcatcaggaatgagcagctgcccctgcagtacttggccgatgtggacacctctgatgaggaaagcatccgggctcacgtgatggcctcccaccattccaagcggagaggccgggcgtcttctgagagtcagatctttgagctgaataagcatatttcagctgtggaatgcctgctgacctacctggagaacacagttgtgcctcccttggccaagggtctaggtgctggagtgcgcacggaggccgatgtagaggaggaggccctgaggaggaagctggaggagctgaccagcaacgtcagtgaccaggagacctcgtccgaggaggaggaagccaaggacgaaaaggcagagcccaacagggacaaatcagttgggcctctcccccaggcggacccggaggtgggcacggctgcccatcaaaccaacagacaggaaaaaagcccccaggaccctggggaccccgtccagtacaacaggaccacagatgaggagctgtcagagctggaggacagagtggcagtgacggcctcagaagtccagcaggcagagagcgaggtttcagacattgaatccaggattgcagccctgagggccgcagggctcacggtgaagccctcgggaaagccccggaggaagtcaaacctcccgatatttctccctcgagtggctgggaaacttggcaagagaccagaggacccaaatgcagacccttcaagtgaggccaaggcaatggctgtgccctatcttctgagaagaaagttcagtaattccctgaaaagtcaaggtaaagatgatgattcttttgatcggaaatcagtgtaccgaggctcgctgacacagagaaaccccaacgcgaggaaaggaatggccagccacaccttcgcgaaacctgtggtggcccaccagtcctaacgggacaggacagagagacagagcagccctgcactgttttccctccaccacagccatcctgtccctcattggctctgtgctttccactatacacagtcaccgtcccaatgagaaacaagaaggagcaccctccacatggactcccacctgcaagtggacagcgacattcagtcctgcactgctcacctgggtttactgatgactcctggctgccccaccatcctctctgatctgtgagaaacagctaagctgctgtgacttccctttaggacaatgttgtgtaaatctttgaaggacacaccgaagacctttatactgtgatcttttacccctttcactcttggctttcttatgttgctttcatgaatggaatggaaaaaagatgactcagttaaggcaccagccatatgtgtattcttgatggtctatatcggggtgtgagcagatgtttgcgtatttcttgtgggtgtgactggatattagacatccggacaagtgactgaactaatgatctgctgaataatgaaggaggaatagacaccccagtccccaccctacgtgcacccgctctgcaagttcccatgtgatctgtagaccaggggaaattacactgcggtcaagggcagagcctgcacatgacagcaagtgagcatttgatagatgctcagatgctagtgcagagagcctgctgggagacgaagagacagcaggcagagctccagatgggcaaggaagaggcttggttctagcctggctctgcccctcactgcagtggatccagtggggcagaggacagagggtcacaaccaatgagggatgtctgccaaggatgggggtgcagaggccacaggagtcagcttgccactcgcccattggttacatagatgatctctcagacaggctgggactcagagttatttcctagtatcggtgtgccccatccagttttaagtggagccctccaagactctccagagctgcctttgaacatcctaacagtaatcacatctcaccctccctgaggttcactttagacaggacccaatggctgcactgcctttgtcagagggggtgctgagaggagtggcttcttttagaatcaaacagtagagacaagagtcaagccttgtgtcttcaagcattgaccaagttaagtgtttccttccctctctcaataagacacttccaggagctttccaatctctcacttaaaactaaggtttgaatctcaaagtgttgctgggaggctgatactcctgcaacttcaggagacctgtgagcacacattagcagctgtttctctgactccttgtggcatcagataaaaacgtgggagtttttccatataattcccagccttacttataaattctattctttgaaaaaattattcaggctaggtaaggtggctcatacctataatcccagccctttgagaggccaaggtgggagaattgcttgaggccaggagtttgagacctcctgggcaacatagtgagatcccatctctacaaaaaacaaaacaaaaaaattacccaagcatgatggtatatgcctgtagtcgtacctacttacttaggaggctgaggcaggaggatcacttgagccctggaggttggggctgcagtgagccatgatcgcatcactatactcgagcctgggcaacagagtgagaccttgtctcttaaaaaaattaataataaataaatgaaaata

SEQ ID NO: 34961 - DNA, 3464 bp, Homo sapiens
  misc_feature (26)..(26): n is a, c, g, or t
tatcacaggacttatgcgatggaatngactccgaaggaaagaagagaacggtagaggcgttgaagggcaagattaagaaggaaagctccaagagggagctgctttccgacactgcccatctgaacgagacccactgcgcccgctgcctgcagccctaccagctgcttgtgaatagcaaaaggcagtgcctggaatgtggcctcttcacctgcaaaagctgtggccgcgtccacccggaggagcagggctggatctgtgacccctgccatctggccagagtcgtgaagatcggctcactggagtggtactatgagcatgtgaaagcccgcttcaagaggttcggaagtgccaaggtcatccggtccctccacgggcggctgcagggtggagctgggcctgaactgatatctgaagagagaagtggagacagcgaccagacagatgaggatggagaacctggctcagaggcccaggcccaggcccagccctttggcagcaaaaaaaagcgcctcctctccgtccacgacttcgacttcgagggagactcagatgactccactcagcctcaaggtcactccctgcacctgtcctcagtccctgaggccagggacagcccacagtccctcacagatgagtcctgctcagagaaggcagcccctcacaaggctgagggcctggaggaggctgatactggggcctctgggtgccactcccatccggaagagcagccgaccagcatctcaccttccagacacggcgccctggctgagctctgcccgcctggaggctcccacaggatggccctggggactgctgctgcactcgggtcgaatgtcatcaggaatgagcagctgcccctgcagtacttggccgatgtggacacctctgatgaggaaagcatccgggctcacgtgatggcctcccaccattccaagcggagaggccgggcgtcttctgagagtcagatctttgagctgaataagcatatttcagctgtggaatgcctgctgacctacctggagaacacagttgtgcctcccttggccaagggtctaggtgctggagtgcgcacggaggccgatgtagaggaggaggccctgaggaggaagctggaggagctgaccagcaacgtcagtgaccaggagacctcgtccgaggaggaggaagccaaggacgaaaaggcagagcccaacagggacaaatcagttgggcctctcccccaggcggacccggaggtgggcacggctgcccatcaaaccaacagacaggaaaaaagcccccaggaccctggggaccccgtccagtacaacaggaccacagatgaggagctgtcagagctggaggacagagtggcagtgacggcctcagaagtccagcaggcagagagcgaggtttcagacattgaatccaggattgcagccctgagggccgcagggctcacggtgaagccctcgggaaagccccggaggaagtcaaacctcccgatatttctccctcgagtggctgggaaacttggcaagagaccagaggacccaaatgcagacccttcaagtgaggccaaggcaatggctgtgccctatcttctgagaagaaagttcagtaattccctgaaaagtcaaggtaaagatgatgattcttttgatcggaaatcagtgtaccgaggctcgctgacacagagaaaccccaacgcgaggaaaggaatggccagccacaccttcgcgaaacctgtggtggcccaccagtcctaacgggacaggacagagagacagagcagccctgcactgttttccctccaccacagccatcctgtccctcattggctctgtgctttccactatacacagtcaccgtcccaatgagaaacaagaaggagcaccctccacatggactcccacctgcaagtggacagcgacattcagtcctgcactgctcacctgggtttactgatgactcctggctgccccaccatcctctctgatctgtgagaaacagctaagctgctgtgacttccctttaggacaatgttgtgtaaatctttgaaggacacaccgaagacctttatactgtgatcttttacccctttcactcttggctttcttatgttgctttcatgaatggaatggaaaaaagatgactcagttaaggcaccagccatatgtgtattcttgatggtctatatcggggtgtgagcagatgtttgcgtatttcttgtgggtgtgactggatattagacatccggacaagtgactgaactaatgatctgctgaataatgaaggaggaatagacaccccagtccccaccctacgtgcacccgctctgcaagttcccatgtgatctgtagaccaggggaaattacactgcggtcaagggcagagcctgcacatgacagcaagtgagcatttgatagatgctcagatgctagtgcagagagcctgctgggagacgaagagacagcaggcagagctccagatgggcaaggaagaggcttggttctagcctggctctgcccctcactgcagtggatccagtggggcagaggacagagggtcacaaccaatgagggatgtctgccaaggatgggggtgcagaggccacaggagtcagcttgccactcgcccattggttacatagatgatctctcagacaggctgggactcagagttatttcctagtatcggtgtgccccatccagttttaagtggagccctccaagactctccagagctgcctttgaacatcctaacagtaatcacatctcaccctccctgaggttcactttagacaggacccaatggctgcactgcctttgtcagagggggtgctgagaggagtggcttcttttagaatcaaacagtagagacaagagtcaagccttgtgtcttcaagcattgaccaagttaagtgtttccttccctctctcaataagacacttccaggagctttccaatctctcacttaaaactaaggtttgaatctcaaagtgttgctgggaggctgatactcctgcaacttcaggagacctgtgagcacacattagcagctgtttctctgactccttgtggcatcagataaaaacgtgggagtttttccatataattcccagccttacttataaattctattctttgaaaaaattattcaggctaggtaaggtggctcatacctataatcccagccctttgagaggccaaggtgggagaattgcttgaggccaggagtttgagacctcctgggcaacatagtgagatcccatctctacaaaaaacaaaacaaaaaaattacccaagcatgatggtatatgcctgtagtcgtacctacttacttaggaggctgaggcaggaggatcacttgagccctggaggttggggctgcagtgagccatgatcgcatcactatactcgagcctgggcaacagagtgagaccttgtctcttaaaaaaattaataataaataaatgaaaata

SEQ ID NO: 34962 - DNA, 3625 bp, Homo sapiens
cgctagtagaggcggggtgaatcggacgaggcggagagccaggcgctaaccagccgctctgcgccccgcgccctgcttgcccccattatccagccttgccccggcgccctgacctgacgccctggcctgacgccctgcttcgtcgcctcctttctctcccaggtgctggaccagggactgagcgtcccccggagagggtccggtgtgaccccgacaagaagcagaaatggggaagaaactggatctttccaagctcactgatgaagaggcccagcatgtcttggaagttgttcaacgagattttgacctccgaaggaaagaagaggaacggctagaggcgttgaagggcaagattaagaaggaaagctccaagagggagctgctttccgacactgcccatctgaacgagacccactgcgcccgctgcctgcagccctaccagctgcttgtgaatagcaaaaggcagtgcctggaatgtggcctcttcacctgcaaaagctgtggccgcgtccacccggaggagcagggctggatctgtgacccctgccatctggccagagtcgtgaagatcggctcactggagtggtactatgagcatgtgaaagcccgcttcaagaggttcggaagtgccaaggtcatccggtccctccacgggcggctgcagggtggagctgggcctgaactgatatctgaagagagaagtggagacagcgaccagacagatgaggatggagaacctggctcagaggcccaggcccaggcccagccctttggcagcaaatccctcacagatgagtcctgctcagagaaggcagcccctcacaaggctgagggcctggaggaggctgatactggggcctctgggtgccactcccatccggaagagcagccgaccagcatctcaccttccagacacggcgccctggctgagctctgcccgcctggaggctcccacaggatggccctggggactgctgctgcactcgggtcgaatgtcatcaggaatgagcagctgcccctgcagtacttggccgatgtggacacctctgatgaggaaagcatccgggctcacgtgatggcctcccaccattccaagcggagaggccgggcgtcttctgagagtcagatctttgagctgaataagcatatttcagctgtggaatgcctgctgacctacctggagaacacagttgtgcctcccttggccaagggtctaggtgctggagtgcgcacggaggccgatgtagaggaggaggccctgaggaggaagctggaggagctgaccagcaacgtcagtgaccaggagacctcgtccgaggaggaggaagccaaggacgaaaaggcagagcccaacagggacaaatcagttgggcctctcccccaggcggacccggaggtgggcacggctgcccatcaaaccaacagacaggaaaaaagcccccaggaccctggggaccccgtccagtacaacaggaccacagatgaggagctgtcagagctggaggacagagtggcagtgacggcctcagaagtccagcaggcagagagcgaggtttcagacattgaatccaggattgcagccctgagggccgcagggctcacggtgaagccctcgggaaagccccggaggaagtcaaacctcccgatatttctccctcgagtggctgggaaacttggcaagagaccagaggacccaaatgcagacccttcaagtgaggccaaggcaatggctgtgccctatcttctgagaagaaagttcagtaattccctgaaaagtcaaggtaaagatgatgattcttttgatcggaaatcagtgtaccgaggctcgctgacacagagaaaccccaacgcgaggaaaggaatggccagccacaccttcgcgaaacctgtggtggcccaccagtcctaacgggacaggacagagagacagagcagccctgcactgttttccctccaccacagccatcctgtccctcattggctctgtgctttccactatacacagtcaccgtcccaatgagaaacaagaaggagcaccctccacatggactcccacctgcaagtggacagcgacattcagtcctgcactgctcacctgggtttactgatgactcctggctgccccaccatcctctctgatctgtgagaaacagctaagctgctgtgacttccctttaggacaatgttgtgtaaatctttgaaggacacaccgaagacctttatactgtgatcttttacccctttcactcttggctttcttatgttgctttcatgaatggaatggaaaaaagatgactcagttaaggcaccagccatatgtgtattcttgatggtctatatcggggtgtgagcagatgtttgcgtatttcttgtgggtgtgactggatattagacatccggacaagtgactgaactaatgatctgctgaataatgaaggaggaatagacaccccagtccccaccctacgtgcacccgctctgcaagttcccatgtgatctgtagaccaggggaaattacactgcggtcaagggcagagcctgcacatgacagcaagtgagcatttgatagatgctcagatgctagtgcagagagcctgctgggagacgaagagacagcaggcagagctccagatgggcaaggaagaggcttggttctagcctggctctgcccctcactgcagtggatccagtggggcagaggacagagggtcacaaccaatgagggatgtctgccaaggatgggggtgcagaggccacaggagtcagcttgccactcgcccattggttacatagatgatctctcagacaggctgggactcagagttatttcctagtatcggtgtgccccatccagttttaagtggagccctccaagactctccagagctgcctttgaacatcctaacagtaatcacatctcaccctccctgaggttcactttagacaggacccaatggctgcactgcctttgtcagagggggtgctgagaggagtggcttcttttagaatcaaacagtagagacaagagtcaagccttgtgtcttcaagcattgaccaagttaagtgtttccttccctctctcaataagacacttccaggagctttccaatctctcacttaaaactaaggtttgaatctcaaagtgttgctgggaggctgatactcctgcaacttcaggagacctgtgagcacacattagcagctgtttctctgactccttgtggcatcagataaaaacgtgggagtttttccatataattcccagccttacttataaattctattctttgaaaaaattattcaggctaggtaaggtggctcatacctataatcccagccctttgagaggccaaggtgggagaattgcttgaggccaggagtttgagacctcctgggcaacatagtgagatcccatctctacaaaaaacaaaacaaaaaaattacccaagcatgatggtatatgcctgtagtcgtacctacttacttaggaggctgaggcaggaggatcacttgagccctggaggttggggctgcagtgagccatgatcgcatcactatactcgagcctgggcaacagagtgagaccttgtctcttaaaaaaattaataataaataaatgaaaata

SEQ ID NO: 34963 - DNA, 3541 bp, Homo sapiens
cgctagtagaggcggggtgaatcggacgaggcggagagccaggcgctaaccagccgctctgcgccccgcgccctgcttgcccccattatccagccttgccccggcgccctgacctgacgccctggcctgacgccctgcttcgtcgcctcctttctctcccaggtgctggaccagggactgagcgtcccccggagagggtccggtgtgaccccgacaagaagcagaaatggggaagaaactggatctttccaagctcactgatgaagaggcccagcatgtcttggaagttgttcaacgagattttgacctccgaaggaaagaagaggaacggctagaggcgttgaagggcaagattaagaaggaaagctccaagagggagctgctttccgacactgcccatctgaacgagacccactgcgcccgctgcctgcagccctaccagctgcttgtgaatagcaaaaggcagtgcctggaatgtggcctcttcacctgcaaaagctgtggccgcgtccacccggaggagcagggctggatctgtgacccctgccatctggccagagtcgtgaagatcggctcactggagtggtactatgagcatgtgaaagcccgcttcaagaggttcggaagtgccaaggtcatccggtccctccacgggcggctgcagggtggagctgggcctgaactgatatctgaagagagaagtggagacagcgaccagacagatgaggatggagaacctggctcagaggcccaggcccaggcccagccctttggcagcaaatccctcacagatgagtcctgctcagagaaggcagcccctcacaaggctgagggcctggaggaggctgatactggggcctctgggtgccactcccatccggaagagcagccgaccagcatctcaccttccagacacggcgccctggctgagctctgcccgcctggaggctcccacaggatggccctggggactgctgctgcactcgggtcgaatgtcatcaggaatgagcagctgcccctgcagtacttggccgatgtggacacctctgatgaggaaagcatccgggctcacgtgatggcctcccaccattccaagcggagaggccgggcgtcttctgagagtcagggtctaggtgctggagtgcgcacggaggccgatgtagaggaggaggccctgaggaggaagctggaggagctgaccagcaacgtcagtgaccaggagacctcgtccgaggaggaggaagccaaggacgaaaaggcagagcccaacagggacaaatcagttgggcctctcccccaggcggacccggaggtgggcacggctgcccatcaaaccaacagacaggaaaaaagcccccaggaccctggggaccccgtccagtacaacaggaccacagatgaggagctgtcagagctggaggacagagtggcagtgacggcctcagaagtccagcaggcagagagcgaggtttcagacattgaatccaggattgcagccctgagggccgcagggctcacggtgaagccctcgggaaagccccggaggaagtcaaacctcccgatatttctccctcgagtggctgggaaacttggcaagagaccagaggacccaaatgcagacccttcaagtgaggccaaggcaatggctgtgccctatcttctgagaagaaagttcagtaattccctgaaaagtcaaggtaaagatgatgattcttttgatcggaaatcagtgtaccgaggctcgctgacacagagaaaccccaacgcgaggaaaggaatggccagccacaccttcgcgaaacctgtggtggcccaccagtcctaacgggacaggacagagagacagagcagccctgcactgttttccctccaccacagccatcctgtccctcattggctctgtgctttccactatacacagtcaccgtcccaatgagaaacaagaaggagcaccctccacatggactcccacctgcaagtggacagcgacattcagtcctgcactgctcacctgggtttactgatgactcctggctgccccaccatcctctctgatctgtgagaaacagctaagctgctgtgacttccctttaggacaatgttgtgtaaatctttgaaggacacaccgaagacctttatactgtgatcttttacccctttcactcttggctttcttatgttgctttcatgaatggaatggaaaaaagatgactcagttaaggcaccagccatatgtgtattcttgatggtctatatcggggtgtgagcagatgtttgcgtatttcttgtgggtgtgactggatattagacatccggacaagtgactgaactaatgatctgctgaataatgaaggaggaatagacaccccagtccccaccctacgtgcacccgctctgcaagttcccatgtgatctgtagaccaggggaaattacactgcggtcaagggcagagcctgcacatgacagcaagtgagcatttgatagatgctcagatgctagtgcagagagcctgctgggagacgaagagacagcaggcagagctccagatgggcaaggaagaggcttggttctagcctggctctgcccctcactgcagtggatccagtggggcagaggacagagggtcacaaccaatgagggatgtctgccaaggatgggggtgcagaggccacaggagtcagcttgccactcgcccattggttacatagatgatctctcagacaggctgggactcagagttatttcctagtatcggtgtgccccatccagttttaagtggagccctccaagactctccagagctgcctttgaacatcctaacagtaatcacatctcaccctccctgaggttcactttagacaggacccaatggctgcactgcctttgtcagagggggtgctgagaggagtggcttcttttagaatcaaacagtagagacaagagtcaagccttgtgtcttcaagcattgaccaagttaagtgtttccttccctctctcaataagacacttccaggagctttccaatctctcacttaaaactaaggtttgaatctcaaagtgttgctgggaggctgatactcctgcaacttcaggagacctgtgagcacacattagcagctgtttctctgactccttgtggcatcagataaaaacgtgggagtttttccatataattcccagccttacttataaattctattctttgaaaaaattattcaggctaggtaaggtggctcatacctataatcccagccctttgagaggccaaggtgggagaattgcttgaggccaggagtttgagacctcctgggcaacatagtgagatcccatctctacaaaaaacaaaacaaaaaaattacccaagcatgatggtatatgcctgtagtcgtacctacttacttaggaggctgaggcaggaggatcacttgagccctggaggttggggctgcagtgagccatgatcgcatcactatactcgagcctgggcaacagagtgagaccttgtctcttaaaaaaattaataataaataaatgaaaata

SEQ ID NO: 34964 - DNA, 2453 bp, Homo sapiens
tacttagaggatccgagtggtagtgtttctgagagtagggtctaggtgctggagtgcgcacggaggccgatgtagaggaggaggccctgaggaggaagctggaggagctgaccagcaacgtcagtgaccaggagacctcgtccgaggaggaggaagccaaggacgaaaaggcagagcccaacagggacaaatcagttgggcctctcccccaggcggacccggaggtgggcacggctgcccatcaaaccaacagacaggaaaaaagcccccaggaccctggggaccccgtccagtacaacaggaccacagatgaggagctgtcagagctggaggacagagtggcagtgacggcctcagaagtccagcaggcagagagcgaggtttcagacattgaatccaggattgcagccctgagggccgcagggctcacggtgaagccctcgggaaagccccggaggaagtcaaacctcccgatatttctccctcgagtggctgggaaacttggcaagagaccagaggacccaaatgcagacccttcaagtgaggccaaggcaatggctgtgccctatcttctgagaagaaagttcagtaattccctgaaaagtcaaggtaaagatgatgattcttttgatcggaaatcagtgtaccgaggctcgctgacacagagaaaccccaacgcgaggaaaggaatggccagccacaccttcgcgaaacctgtggtggcccaccagtcctaacgggacaggacagagagacagagcagccctgcactgttttccctccaccacagccatcctgtccctcattggctctgtgctttccactatacacagtcaccgtcccaatgagaaacaagaaggagcaccctccacatggactcccacctgcaagtggacagcgacattcagtcctgcactgctcacctgggtttactgatgactcctggctgccccaccatcctctctgatctgtgagaaacagctaagctgctgtgacttccctttaggacaatgttgtgtaaatctttgaaggacacaccgaagacctttatactgtgatcttttacccctttcactcttggctttcttatgttgctttcatgaatggaatggaaaaaagatgactcagttaaggcaccagccatatgtgtattcttgatggtctatatcggggtgtgagcagatgtttgcgtatttcttgtgggtgtgactggatattagacatccggacaagtgactgaactaatgatctgctgaataatgaaggaggaatagacaccccagtccccaccctacgtgcacccgctctgcaagttcccatgtgatctgtagaccaggggaaattacactgcggtcaagggcagagcctgcacatgacagcaagtgagcatttgatagatgctcagatgctagtgcagagagcctgctgggagacgaagagacagcaggcagagctccagatgggcaaggaagaggcttggttctagcctggctctgcccctcactgcagtggatccagtggggcagaggacagagggtcacaaccaatgagggatgtctgccaaggatgggggtgcagaggccacaggagtcagcttgccactcgcccattggttacatagatgatctctcagacaggctgggactcagagttatttcctagtatcggtgtgccccatccagttttaagtggagccctccaagactctccagagctgcctttgaacatcctaacagtaatcacatctcaccctccctgaggttcactttagacaggacccaatggctgcactgcctttgtcagagggggtgctgagaggagtggcttcttttagaatcaaacagtagagacaagagtcaagccttgtgtcttcaagcattgaccaagttaagtgtttccttccctctctcaataagacacttccaggagctttccaatctctcacttaaaactaaggtttgaatctcaaagtgttgctgggaggctgatactcctgcaacttcaggagacctgtgagcacacattagcagctgtttctctgactccttgtggcatcagataaaaacgtgggagtttttccatataattcccagccttacttataaattctattctttgaaaaaattattcaggctaggtaaggtggctcatacctataatcccagccctttgagaggccaaggtgggagaattgcttgaggccaggagtttgagacctcctgggcaacatagtgagatcccatctctacaaaaaacaaaacaaaaaaattacccaagcatgatggtatatgcctgtagtcgtacctacttacttaggaggctgaggcaggaggatcacttgagccctggaggttggggctgcagtgagccatgatcgcatcactatactcgagcctgggcaacagagtgagaccttgtctcttaaaaaaattaataataaataaatgaaaata

SEQ ID NO: 34965 - DNA, 2375 bp, Homo sapiens
gcatttttacagaagcgataggggaaaggaagcaatcagctatgcaggtgagcctcagggggatgactgtgaatagaatgggaggcagctttgccctaagcagttcccagcttgactttttcctttagcttggtgattgtggagtctcaagatttgttttcttttcacaatctgaaattcaaagttccctgggtatcctgtattttcatttgcacactttggcgccctagtcccagagtcctggagcggcatactgggggtggctgtgcagtcccagcatccccaacccagcatgtatagagagcatccatccttacatccagctgacccatgcccatgctcctccctgtggctggaggttcaacaataacataagtctcttctttgccctccagatatttctccctcgagtggctgggaaacttggcaagagaccagaggacccaaatgcagacccttcaagtgaggccaaggcaatggctgtgccctatcttctgagaagaaagttcagtaattccctgaaaagtcaaggtaaagatgatgattcttttgatcggaaatcagtgtaccgaggctcgctgacacagagaaaccccaacgcgaggaaaggaatggccagccacaccttcgcgaaacctgtggtggcccaccagtcctaacgggacaggacagagagacagagcagccctgcactgttttccctccaccacagccatcctgtccctcattggctctgtgctttccactatacacagtcaccgtcccaatgagaaacaagaaggagcaccctccacatggactcccacctgcaagtggacagcgacattcagtcctgcactgctcacctgggtttactgatgactcctggctgccccaccatcctctctgatctgtgagaaacagctaagctgctgtgacttccctttaggacaatgttgtgtaaatctttgaaggacacaccgaagacctttatactgtgatcttttacccctttcactcttggctttcttatgttgctttcatgaatggaatggaaaaaagatgactcagttaaggcaccagccatatgtgtattcttgatggtctatatcggggtgtgagcagatgtttgcgtatttcttgtgggtgtgactggatattagacatccggacaagtgactgaactaatgatctgctgaataatgaaggaggaatagacaccccagtccccaccctacgtgcacccgctctgcaagttcccatgtgatctgtagaccaggggaaattacactgcggtcaagggcagagcctgcacatgacagcaagtgagcatttgatagatgctcagatgctagtgcagagagcctgctgggagacgaagagacagcaggcagagctccagatgggcaaggaagaggcttggttctagcctggctctgcccctcactgcagtggatccagtggggcagaggacagagggtcacaaccaatgagggatgtctgccaaggatgggggtgcagaggccacaggagtcagcttgccactcgcccattggttacatagatgatctctcagacaggctgggactcagagttatttcctagtatcggtgtgccccatccagttttaagtggagccctccaagactctccagagctgcctttgaacatcctaacagtaatcacatctcaccctccctgaggttcactttagacaggacccaatggctgcactgcctttgtcagagggggtgctgagaggagtggcttcttttagaatcaaacagtagagacaagagtcaagccttgtgtcttcaagcattgaccaagttaagtgtttccttccctctctcaataagacacttccaggagctttccaatctctcacttaaaactaaggtttgaatctcaaagtgttgctgggaggctgatactcctgcaacttcaggagacctgtgagcacacattagcagctgtttctctgactccttgtggcatcagataaaaacgtgggagtttttccatataattcccagccttacttataaattctattctttgaaaaaattattcaggctaggtaaggtggctcatacctataatcccagccctttgagaggccaaggtgggagaattgcttgaggccaggagtttgagacctcctgggcaacatagtgagatcccatctctacaaaaaacaaaacaaaaaaattacccaagcatgatggtatatgcctgtagtcgtacctacttacttaggaggctgaggcaggaggatcacttgagccctggaggttggggctgcagtgagccatgatcgcatcactatactcgagcctgggcaacagagtgagaccttgtctcttaaaaaaattaataataaataaatgaaaata

SEQ ID NO: 34966 - DNA, 1935 bp, Homo sapiens
  misc_feature (14)..(14): n is a, c, g, or t
gatcccattcccanccactcgagggaggccaaggcaatggctgtgccctatcttctgagaagaaagttcagtaattccctgaaaagtcaaggtaaagatgatgattcttttgatcggaaatcagtgtaccgaggctcgctgacacagagaaaccccaacgcgaggaaaggaatggccagccacaccttcgcgaaacctgtggtggcccaccagtcctaacgggacaggacagagagacagagcagccctgcactgttttccctccaccacagccatcctgtccctcattggctctgtgctttccactatacacagtcaccgtcccaatgagaaacaagaaggagcaccctccacatggactcccacctgcaagtggacagcgacattcagtcctgcactgctcacctgggtttactgatgactcctggctgccccaccatcctctctgatctgtgagaaacagctaagctgctgtgacttccctttaggacaatgttgtgtaaatctttgaaggacacaccgaagacctttatactgtgatcttttacccctttcactcttggctttcttatgttgctttcatgaatggaatggaaaaaagatgactcagttaaggcaccagccatatgtgtattcttgatggtctatatcggggtgtgagcagatgtttgcgtatttcttgtgggtgtgactggatattagacatccggacaagtgactgaactaatgatctgctgaataatgaaggaggaatagacaccccagtccccaccctacgtgcacccgctctgcaagttcccatgtgatctgtagaccaggggaaattacactgcggtcaagggcagagcctgcacatgacagcaagtgagcatttgatagatgctcagatgctagtgcagagagcctgctgggagacgaagagacagcaggcagagctccagatgggcaaggaagaggcttggttctagcctggctctgcccctcactgcagtggatccagtggggcagaggacagagggtcacaaccaatgagggatgtctgccaaggatgggggtgcagaggccacaggagtcagcttgccactcgcccattggttacatagatgatctctcagacaggctgggactcagagttatttcctagtatcggtgtgccccatccagttttaagtggagccctccaagactctccagagctgcctttgaacatcctaacagtaatcacatctcaccctccctgaggttcactttagacaggacccaatggctgcactgcctttgtcagagggggtgctgagaggagtggcttcttttagaatcaaacagtagagacaagagtcaagccttgtgtcttcaagcattgaccaagttaagtgtttccttccctctctcaataagacacttccaggagctttccaatctctcacttaaaactaaggtttgaatctcaaagtgttgctgggaggctgatactcctgcaacttcaggagacctgtgagcacacattagcagctgtttctctgactccttgtggcatcagataaaaacgtgggagtttttccatataattcccagccttacttataaattctattctttgaaaaaattattcaggctaggtaaggtggctcatacctataatcccagccctttgagaggccaaggtgggagaattgcttgaggccaggagtttgagacctcctgggcaacatagtgagatcccatctctacaaaaaacaaaacaaaaaaattacccaagcatgatggtatatgcctgtagtcgtacctacttacttaggaggctgaggcaggaggatcacttgagccctggaggttggggctgcagtgagccatgatcgcatcactatactcgagcctgggcaacagagtgagaccttgtctcttaaaaaaattaataataaataaatgaaaata

SEQ ID NO: 34967 - DNA, 1945 bp, Homo sapiens
acgccgttcctgagggaaaagacgagccgtagtgcgagtcatggcaatggctgtgccctatcttctgagaagaaagttcagtaattccctgaaaagtcaaggtaaagatgatgattcttttgatcggaaatcagtgtaccgaggctcgctgacacagagaaaccccaacgcgaggaaaggaatggccagccacaccttcgcgaaacctgtggtggcccaccagtcctaacgggacaggacagagagacagagcagccctgcactgttttccctccaccacagccatcctgtccctcattggctctgtgctttccactatacacagtcaccgtcccaatgagaaacaagaaggagcaccctccacatggactcccacctgcaagtggacagcgacattcagtcctgcactgctcacctgggtttactgatgactcctggctgccccaccatcctctctgatctgtgagaaacagctaagctgctgtgacttccctttaggacaatgttgtgtaaatctttgaaggacacaccgaagacctttatactgtgatcttttacccctttcactcttggctttcttatgttgctttcatgaatggaatggaaaaaagatgactcagttaaggcaccagccatatgtgtattcttgatggtctatatcggggtgtgagcagatgtttgcgtatttcttgtgggtgtgactggatattagacatccggacaagtgactgaactaatgatctgctgaataatgaaggaggaatagacaccccagtccccaccctacgtgcacccgctctgcaagttcccatgtgatctgtagaccaggggaaattacactgcggtcaagggcagagcctgcacatgacagcaagtgagcatttgatagatgctcagatgctagtgcagagagcctgctgggagacgaagagacagcaggcagagctccagatgggcaaggaagaggcttggttctagcctggctctgcccctcactgcagtggatccagtggggcagaggacagagggtcacaaccaatgagggatgtctgccaaggatgggggtgcagaggccacaggagtcagcttgccactcgcccattggttacatagatgatctctcagacaggctgggactcagagttatttcctagtatcggtgtgccccatccagttttaagtggagccctccaagactctccagagctgcctttgaacatcctaacagtaatcacatctcaccctccctgaggttcactttagacaggacccaatggctgcactgcctttgtcagagggggtgctgagaggagtggcttcttttagaatcaaacagtagagacaagagtcaagccttgtgtcttcaagcattgaccaagttaagtgtttccttccctctctcaataagacacttccaggagctttccaatctctcacttaaaactaaggtttgaatctcaaagtgttgctgggaggctgatactcctgcaacttcaggagacctgtgagcacacattagcagctgtttctctgactccttgtggcatcagataaaaacgtgggagtttttccatataattcccagccttacttataaattctattctttgaaaaaattattcaggctaggtaaggtggctcatacctataatcccagccctttgagaggccaaggtgggagaattgcttgaggccaggagtttgagacctcctgggcaacatagtgagatcccatctctacaaaaaacaaaacaaaaaaattacccaagcatgatggtatatgcctgtagtcgtacctacttacttaggaggctgaggcaggaggatcacttgagccctggaggttggggctgcagtgagccatgatcgcatcactatactcgagcctgggcaacagagtgagaccttgtctcttaaaaaaattaataataaataaatgaaaata

SEQ ID NO: 34968 - DNA, 2511 bp, Homo sapiens
cagtggtaagggggagtgctgggatttaaaccagacctgcagggcagaaacttgtactctttctgccataccacccaaatgtggcagcttccccaaagctgagcatctcttatttcaggcatttcatgcttaatttattgaaaatgtccattctcatattgctaaaagttcaaatattgctagagagcagaaaatagtggccatggttaattagaagctggaagaacaataagaaatccaaaattagttgacaattcctaaacgtcacaacttgatgaagcctgggtgacagagcaagactttgtctcaaaaaaaaaaaaaagaaagaacaaaaaagaaaagaaagtcaaggaaatgcgaagaccacacaccagtgcagtgtgatgggcctttctgctgcttcattagtgtgaggatttccagggccacagtgaggaagaatgttaatgccagtgccagagcaaaggagaaagaagttggcaaaactgttgatttgcatgacagctgaaatgtaaatactttttaaaaaatatgtgatgtggaagcttcttaaaaggggatatgtccatttttttctaccttttaaatttctgaggaggccaaggcacttgtttgggctaagtatgtgattgataaagcaccatccctcttcctgttttccccaaaggtaaagatgatgattcttttgatcggaaatcagtgtaccgaggctcgctgacacagagaaaccccaacgcgaggaaaggaatggccagccacaccttcgcgaaacctgtggtggcccaccagtcctaacgggacaggacagagagacagagcagccctgcactgttttccctccaccacagccatcctgtccctcattggctctgtgctttccactatacacagtcaccgtcccaatgagaaacaagaaggagcaccctccacatggactcccacctgcaagtggacagcgacattcagtcctgcactgctcacctgggtttactgatgactcctggctgccccaccatcctctctgatctgtgagaaacagctaagctgctgtgacttccctttaggacaatgttgtgtaaatctttgaaggacacaccgaagacctttatactgtgatcttttacccctttcactcttggctttcttatgttgctttcatgaatggaatggaaaaaagatgactcagttaaggcaccagccatatgtgtattcttgatggtctatatcggggtgtgagcagatgtttgcgtatttcttgtgggtgtgactggatattagacatccggacaagtgactgaactaatgatctgctgaataatgaaggaggaatagacaccccagtccccaccctacgtgcacccgctctgcaagttcccatgtgatctgtagaccaggggaaattacactgcggtcaagggcagagcctgcacatgacagcaagtgagcatttgatagatgctcagatgctagtgcagagagcctgctgggagacgaagagacagcaggcagagctccagatgggcaaggaagaggcttggttctagcctggctctgcccctcactgcagtggatccagtggggcagaggacagagggtcacaaccaatgagggatgtctgccaaggatgggggtgcagaggccacaggagtcagcttgccactcgcccattggttacatagatgatctctcagacaggctgggactcagagttatttcctagtatcggtgtgccccatccagttttaagtggagccctccaagactctccagagctgcctttgaacatcctaacagtaatcacatctcaccctccctgaggttcactttagacaggacccaatggctgcactgcctttgtcagagggggtgctgagaggagtggcttcttttagaatcaaacagtagagacaagagtcaagccttgtgtcttcaagcattgaccaagttaagtgtttccttccctctctcaataagacacttccaggagctttccaatctctcacttaaaactaaggtttgaatctcaaagtgttgctgggaggctgatactcctgcaacttcaggagacctgtgagcacacattagcagctgtttctctgactccttgtggcatcagataaaaacgtgggagtttttccatataattcccagccttacttataaattctattctttgaaaaaattattcaggctaggtaaggtggctcatacctataatcccagccctttgagaggccaaggtgggagaattgcttgaggccaggagtttgagacctcctgggcaacatagtgagatcccatctctacaaaaaacaaaacaaaaaaattacccaagcatgatggtatatgcctgtagtcgtacctacttacttaggaggctgaggcaggaggatcacttgagccctggaggttggggctgcagtgagccatgatcgcatcactatactcgagcctgggcaacagagtgagaccttgtctcttaaaaaaattaataataaataaatgaaaata

SEQ ID NO: 34969 - DNA, 3622 bp, Homo sapiens
cgctagtagaggcggggtgaatcggacgaggcggagagccaggcgctaaccagccgctctgcgccccgcgccctgcttgcccccattatccagccttgccccggcgccctgacctgacgccctggcctgacgccctgcttcgtcgcctcctttctctcccaggtgctggaccagggactgagcgtcccccggagagggtccggtgtgaccccgacaagaagcagaaatggggaagaaactggatctttccaagctcactgatgaagaggcccagcatgtcttggaagttgttcaacgagattttgacctccgaaggaaagaagaggaacggctagaggcgttgaagggcaagattaagaaggaaagctccaagagggagctgctttccgacactgcccatctgaacgagacccactgcgcccgctgcctgcagccctaccagctgcttgtgaatagcaaaaggcagtgcctggaatgtggcctcttcacctgcaaaagctgtggccgcgtccacccggaggagcagggctggatctgtgacccctgccatctggccagagtcgtgaagatcggctcactggagtggtactatgagcatgtgaaagcccgcttcaagaggttcggaagtgccaaggtcatccggtccctccacgggcggctgcagggtggagctgggcctgaactgatatctgaagagagaagtggagacagcgaccagacagatgaggatggagaacctggctcagaggcccaggcccaggcccagccctttggcagcaaaaaaaagcgcctcctctccgtccacgacttcgacttcgagggagactcagatgactccactcagcctcaaggtcactccctgcacctgtcctcagtccctgaggccagggacagcccacagtccctcacagatgagtcctgctcagagaaggcagcccctcacaaggctgagggcctggaggaggctgatactggggcctctgggtgccactcccatccggaagagcagccgaccagcatctcaccttccagacacggcgccctggctgagctctgcccgcctggaggctcccacaggatggccctggggactgctgctgcactcgggtcgaatgtcatcaggaatgagcagctgcccctgcagtacttggccgatgtggacacctctgatgaggaaagcatccgggctcacgtgatggcctcccaccattccaagcggagaggccgggcgtcttctgagagtcagatctttgagctgaataagcatatttcagctgtggaatgcctgctgacctacctggagaacacagttgtgcctcccttggccaagggtctaggtgctggagtgcgcacggaggccgatgtagaggaggaggccctgaggaggaagctggaggagctgaccagcaacgtcagtgaccaggagacctcgtccgaggaggaggaagccaaggacgaaaaggcagagcccaacagggacaaatcagttgggcctctcccccaggcggacccggaggtgggcacggctgcccatcaaaccaacagacaggaaaaaagcccccaggaccctggggaccccgtccagtacaacaggaccacagatgaggagctgtcagagctggaggacagagtggcagtgacggcctcagaagtccagcaggcagagagcgaggtttcagacattgaatccaggattgcagccctgagggccgcagggctcacggtgaagccctcgggaaagccccggaggaagtcaaacctcccgatatttctccctcgagtggctgggaaacttggcaagagaccagaggacccaaatgcagacccttcaagtgaggccaaggcaatggctgtgccctatcttctgagaagaaagttcagtaattccctgaaaagtcaaggtaaagatgatgattcttttgatcggaaatcagtgtaccgaggctcgctgacacagagaaaccccaacgcgaggaaaggaatggccagccacaccttcgcgtcaccgtcccaatgagaaacaagaaggagcaccctccacatggactcccacctgcaagtggacagcgacattcagtcctgcactgctcacctgggtttactgatgactcctggctgccccaccatcctctctgatctgtgagaaacagctaagctgctgtgacttccctttaggacaatgttgtgtaaatctttgaaggacacaccgaagacctttatactgtgatcttttacccctttcactcttggctttcttatgttgctttcatgaatggaatggaaaaaagatgactcagttaaggcaccagccatatgtgtattcttgatggtctatatcggggtgtgagcagatgtttgcgtatttcttgtgggtgtgactggatattagacatccggacaagtgactgaactaatgatctgctgaataatgaaggaggaatagacaccccagtccccaccctacgtgcacccgctctgcaagttcccatgtgatctgtagaccaggggaaattacactgcggtcaagggcagagcctgcacatgacagcaagtgagcatttgatagatgctcagatgctagtgcagagagcctgctgggagacgaagagacagcaggcagagctccagatgggcaaggaagaggcttggttctagcctggctctgcccctcactgcagtggatccagtggggcagaggacagagggtcacaaccaatgagggatgtctgccaaggatgggggtgcagaggccacaggagtcagcttgccactcgcccattggttacatagatgatctctcagacaggctgggactcagagttatttcctagtatcggtgtgccccatccagttttaagtggagccctccaagactctccagagctgcctttgaacatcctaacagtaatcacatctcaccctccctgaggttcactttagacaggacccaatggctgcactgcctttgtcagagggggtgctgagaggagtggcttcttttagaatcaaacagtagagacaagagtcaagccttgtgtcttcaagcattgaccaagttaagtgtttccttccctctctcaataagacacttccaggagctttccaatctctcacttaaaactaaggtttgaatctcaaagtgttgctgggaggctgatactcctgcaacttcaggagacctgtgagcacacattagcagctgtttctctgactccttgtggcatcagataaaaacgtgggagtttttccatataattcccagccttacttataaattctattctttgaaaaaattattcaggctaggtaaggtggctcatacctataatcccagccctttgagaggccaaggtgggagaattgcttgaggccaggagtttgagacctcctgggcaacatagtgagatcccatctctacaaaaaacaaaacaaaaaaattacccaagcatgatggtatatgcctgtagtcgtacctacttacttaggaggctgaggcaggaggatcacttgagccctggaggttggggctgcagtgagccatgatcgcatcactatactcgagcctgggcaacagagtgagaccttgtctcttaaaaaaattaataataaataaatgaaaata

SEQ ID NO: 34970 - DNA, 1933 bp, Homo sapiens
cgctagtagaggcggggtgaatcggacgaggcggagagccaggcgctaaccagccgctctgcgccccgcgccctgcttgcccccattatccagccttgccccggcgccctgacctgacgccctggcctgacgccctgcttcgtcgcctcctttctctcccaggtgctggaccagggactgagcgtcccccggagagggtccggtgtgaccccgacaagaagcagaaatggggaagaaactggatctttccaagctcactgatgaagaggcccagcatgtcttggaagttgttcaacgagattttgacctccgaaggaaagaagaggaacggctagaggcgttgaagggcaagattaagaaggaaagctccaagagggagctgctttccgacactgcccatctgaacgagacccactgcgcccgctgcctgcagccctaccagctgcttgtgaatagcaaaaggcagtgcctggaatgtggcctcttcacctgcaaaagctgtggccgcgtccacccggaggagcagggctggatctgtgacccctgccatctggccagagtcgtgaagatcggctcactggagtggtactatgagcatgtgaaagcccgcttcaagaggttcggaagtgccaaggtcatccggtccctccacgggcggctgcagggtggagctgggcctgaactgatatctgaagagagaagtggagacagcgaccagacagatgaggatggagaacctggctcagaggcccaggcccaggcccagccctttggcagcaaaaaaaagcgcctcctctccgtccacgacttcgacttcgagggagactcagatgactccactcagcctcaaggtcactccctgcacctgtcctcagtccctgaggccagggacagcccacagtccctcacagatgagtcctgctcagagaaggcagcccctcacaaggctgagggcctggaggaggctgatactggggcctctgggtgccactcccatccggaagagcagccgaccagcatctcaccttccagacacggcgccctggctgagctctgcccgcctggaggctcccacaggatggccctggggactgctgctgcactcgggtcgaatgtcatcaggaatgagcagctgcccctgcagtacttggccgatgtggacacctctgatgaggaaagcatccgggctcacgtgatggcctcccaccattccaagcggagaggccgggcgtcttctgagagtcagatctttgagctgaataagcatatttcagctgtggaatgcctgctgacctacctggagaacacagttgtgcctcccttggccaagggtctaggtgctggagtgcgcacggaggccgatgtagaggaggaggccctgaggaggaagctggaggagctgaccagcaacgtcagtgaccaggagacctcgtccgaggaggaggaagccaaggacgaaaaggcagagcccaacagggacaaatcagttgggcctctcccccaggcggacccggaggtgggcacggctgcccatcaaaccaacagacaggaaaaaagcccccaggaccctggggaccccgtccagtacaacaggaccacagccatcctgtccctcattggctctgtgctttccactatacacagtcaccgtcccaatgagaaacaagaaggagcaccctccacatggactcccacctgcaagtggacagcgacattcagtcctgcactgctcacctgggtttactgatgactcctggctgccccaccatcctctctgatctgtgagaaacagctaagctgctgtgacttccctttaggacaatgttgtgtaaatctttgaaggacacaccgaagacctttatactgtgatcttttacccctttcactcttggctttcttatgttgcttctggtggtgggcagtgcccgtaggc

SEQ ID NO: 34971 - DNA, 1475 bp, Homo sapiens
cgctagtagaggcggggtgaatcggacgaggcggagagccaggcgctaaccagccgctctgcgccccgcgccctgcttgcccccattatccagccttgccccggcgccctgacctgacgccctggcctgacgccctgcttcgtcgcctcctttctctcccaggtgctggaccagggactgagcgtcccccggagagggtccggtgtgaccccgacaagaagcagaaatggggaagaaactggatctttccaagctcactgatgaagaggcccagcatgtcttggaagttgttcaacgagattttgacctccgaaggaaagaagaggaacggctagaggcgttgaagggcaagattaagaaggaaagctccaagagggagctgctttccgacactgcccatctgaacgagacccactgcgcccgctgcctgcagccctaccagctgcttgtgaatagcaaaaggcagtgcctggaatgtggcctcttcacctgcaaaagctgtggccgcgtccacccggaggagcagggctggatctgtgacccctgccatctggccagagtcgtgaagatcggctcactggagtggtactatgagcatgtgaaagcccgcttcaagaggttcggaagtgccaaggtcatccggtccctccacgggcggctgcagggtggagctgggcctgaactgatatctgaagagagaagtggagacagcgaccagacagatgaggatggagaacctggctcagaggcccaggcccaggcccagccctttggcagcaaaaaaaagcgcctcctctccgtccacgacttcgacttcgagggagactcagatgactccactcagcctcaaggtcactccctgcacctgtcctcagtccctgaggccagggacagcccacagtccctcacagatgagtcctgctcagagaaggcagcccctcacaaggctgagggcctggaggaggctgatactggggcctctgggtgccactcccatccggaagagcagccgaccagcatctcaccttccagacacggcgccctggctgagctctgcccgcctggaggctcccacaggatggccctggggactgctgctgcactcgggtcgaatgtcatcaggaatgagcagctgcccctgcagtacttggccgatgtggacacctctgatgaggaaagcatccgggctcacgtgatggcctcccaccattccaagcggagaggccgggcgtcttctgagagtcaggtaacggtggctggaaagacttctgtcttgtcgtttctttgggtggagtctttttacctccacaccaagtcactttagagaaattacagcttttaatactttcaaactatgaaattgcacaagcctacttaatggagatacgtcatcacaatattttttgtggaagtgaattcacataacagaaaattaaccatcttagtatggccattccccaaaaattaaaaatcga

SEQ ID NO: 34972 - DNA, 1267 bp, Homo sapiens
cgctagtagaggcggggtgaatcggacgaggcggagagccaggcgctaaccagccgctctgcgccccgcgccctgcttgcccccattatccagccttgccccggcgccctgacctgacgccctggcctgacgccctgcttcgtcgcctcctttctctcccaggtgctggaccagggactgagcgtcccccggagagggtccggtgtgaccccgacaagaagcagaaatggggaagaaactggatctttccaagctcactgatgaagaggcccagcatgtcttggaagttgttcaacgagattttgacctccgaaggaaagaagaggaacggctagaggcgttgaagggcaagattaagaaggaaagctccaagagggagctgctttccgacactgcccatctgaacgagacccactgcgcccgctgcctgcagccctaccagctgcttgtgaatagcaaaaggcagtgcctggaatgtggcctcttcacctgcaaaagctgtggccgcgtccacccggaggagcagggctggatctgtgacccctgccatctggccagagtcgtgaagatcggctcactggagtggtactatgagcatgtgaaagcccgcttcaagaggttcggaagtgccaaggtcatccggtccctccacgggcggctgcagggtggagctgggcctgaactgatatctgaagagagaagtggagacagcgaccagacagatgaggatggagaacctggctcagaggcccaggcccaggcccagccctttggcagcaaaaaaaagcgcctcctctccgtccacgacttcgacttcgagggagactcagatgactccactcagcctcaaggtcactccctgcacctgtcctcagtccctgaggccagggacagcccacaggtcagtgggtcctcgtgtctttcccctgcccctcccaggaacctgagtggcaggtgctcaggccccaggtgagggacagcactctggaagcagtgtctgatggccacacagtcccacctggctcccaaggcatgacagggaaggggaccgatgtgggaagacaggatccagagacctcacactcccccaggattagcatgtctggagatatgagcaggcagcttggagaagcagggggcgatgcagggccctgagactggacagatgagttggggcccagggatcggtgcttgggacagaaataaggcagaacccccgagactcaggagggcgggactgcctcgtcgacgcggccgcgaatttagt

SEQ ID NO: 34973 - DNA, 1624 bp, Homo sapiens
ggagtagggtcttacggatagtatcttagggagcaccctccacatggactcccacctgcaagtggacagcgacattcagtcctgcactgctcacctgggtttactgatgactcctggctgccccaccatcctctctgatctgtgagaaacagctaagctgctgtgacttccctttaggacaatgttgtgtaaatctttgaaggacacaccgaagacctttatactgtgatcttttacccctttcactcttggctttcttatgttgctttcatgaatggaatggaaaaaagatgactcagttaaggcaccagccatatgtgtattcttgatggtctatatcggggtgtgagcagatgtttgcgtatttcttgtgggtgtgactggatattagacatccggacaagtgactgaactaatgatctgctgaataatgaaggaggaatagacaccccagtccccaccctacgtgcacccgctctgcaagttcccatgtgatctgtagaccaggggaaattacactgcggtcaagggcagagcctgcacatgacagcaagtgagcatttgatagatgctcagatgctagtgcagagagcctgctgggagacgaagagacagcaggcagagctccagatgggcaaggaagaggcttggttctagcctggctctgcccctcactgcagtggatccagtggggcagaggacagagggtcacaaccaatgagggatgtctgccaaggatgggggtgcagaggccacaggagtcagcttgccactcgcccattggttacatagatgatctctcagacaggctgggactcagagttatttcctagtatcggtgtgccccatccagttttaagtggagccctccaagactctccagagctgcctttgaacatcctaacagtaatcacatctcaccctccctgaggttcactttagacaggacccaatggctgcactgcctttgtcagagggggtgctgagaggagtggcttcttttagaatcaaacagtagagacaagagtcaagccttgtgtcttcaagcattgaccaagttaagtgtttccttccctctctcaataagacacttccaggagctttccaatctctcacttaaaactaaggtttgaatctcaaagtgttgctgggaggctgatactcctgcaacttcaggagacctgtgagcacacattagcagctgtttctctgactccttgtggcatcagataaaaacgtgggagtttttccatataattcccagccttacttataaattctattctttgaaaaaattattcaggctaggtaaggtggctcatacctataatcccagccctttgagaggccaaggtgggagaattgcttgaggccaggagtttgagacctcctgggcaacatagtgagatcccatctctacaaaaaacaaaacaaaaaaattacccaagcatgatggtatatgcctgtagtcgtacctacttacttaggaggctgaggcaggaggatcacttgagccctggaggttggggctgcagtgagccatgatcgcatcactatactcgagcctgggcaacagagtgagaccttgtctcttaaaaaaattaataataaataaatgaaaata

SEQ ID NO: 34974 - DNA, 835 bp, Homo sapiens
cgctagtagaggcggggtgaatcggacgaggcggagagccaggcgctaaccagccgctctgcgccccgcgccctgcttgcccccattatccagccttgccccggcgccctgacctgacgccctggcctgacgccctgcttcgtcgcctcctttctctcccaggtgctggaccagggactgagcgtcccccggagagggtccggtgtgaccccgacaagaagcagaaatggggaagaaactggatctttccaagctcactgatgaagaggcccagcatgtcttggaagttgttcaacgagattttgacctccgaaggaaagaagaggaacggctagaggcgttgaagggcaagattaagaaggaaagctccaagagggagctgctttccgacactgcccatctgaacgagacccactgcgcccgctgcctgcagccctaccagctgcttgtgaatagcaaaaggcagtgcctggaatgtggcctcttcacctgcaaaagctgtggccgcgtccacccggaggagcagggctggatctgtgacccctgccatctggccagagtcgtgaagatcggctcactggagtggtactatgagcatgtgaaagcccgcttcaagaggttcggaagtgccaaggtcatccggtccctccacgggcggctgcagggtggaggtaaggagtggagagtaagaacggctttttgttcccaggcattttaggaatattaaagcaggttcctttggagtgtgcatgtgtgtgtgtacgtgtgtgtgtgcatgtgtgtgtgcacatgtgtgtgcatgcacatgcctctctgtgaattcctgcttctggct

SEQ ID NO: 34975 - DNA, 483 bp, Homo sapiens
acatgtgtatatgtgtgcatgtgttgtgtgtgtaggtttgtgtgtgtgtgtgtgaatttatttactggcttacaaagcgaagacaatccctgcctctcccaggcatctaccggcttccacccccataccccgtcgctctgctgcgtcctgcctgatgggcgctgggcttccatttctcacggggatcctgcagtttctcagccccatgcactctgggacgaagttcagctcatatcaggcccaatggcgtttacaggctgaacgtcattcccgatctttccaccgagggcctctgtgatttgggggctttgtcaggaaagtggagcctcacggaaaagcatactggctaaaacacgcggcttcttcatcgactcaatctaatcatccccttggtgttcgtctgtgagaccccaggcagccagccctgtcgatctgtctcaataggcttcgtccaaatagaaaattaaatgatcatgtgcaata

SEQ ID NO: 34976 - DNA, 3907 bp, Homo sapiens
gaaggacaggcaggccgggcggactggagacggcggctcgccttgggaccctctgagcttgcgggccccgctgagcacccaaaggccggccctagagtccaggagaagagcgcagcggcgcggagctcccaggcgttccccgcagcgcgtcctcggtcctggaaccaccgcgccgcgcgtcctggcttccacatctgccccatttgcccgcggatcttgactttttcttggcgggcaaggcctcggtctcctccccgcagcagggctgcccgcggctgcgggaccctcctggtcctgatgcctggcagaatcgaaggggtgagggtgctggaccagggactgagcgtcccccggagagggtccggtgtgaccccgacaagaagcagaaatggggaagaaactggatctttccaagctcactgatgaagaggcccagcatgtcttggaagttgttcaacgagattttgacctccgaaggaaagaagaggaacggctagaggcgttgaagggcaagattaagaaggaaagctccaagagggagctgctttccgacactgcccatctgaacgagacccactgcgcccgctgcctgcagccctaccagctgcttgtgaatagcaaaaggcagtgcctggaatgtggcctcttcacctgcaaaagctgtggccgcgtccacccggaggagcagggctggatctgtgacccctgccatctggccagagtcgtgaagatcggctcactggagtggtactatgagcatgtgaaagcccgcttcaagaggttcggaagtgccaaggtcatccggtccctccacgggcggctgcagggtggagctgggcctgaactgatatctgaagagagaagtggagacagcgaccagacagatgaggatggagaacctggctcagaggcccaggcccaggcccagccctttggcagcaaaaaaaagcgcctcctctccgtccacgacttcgacttcgagggagactcagatgactccactcagcctcaaggtcactccctgcacctgtcctcagtccctgaggccagggacagcccacagtccctcacagatgagtcctgctcagagaaggcagcccctcacaaggctgagggcctggaggaggctgatactggggcctctgggtgccactcccatccggaagagcagccgaccagcatctcaccttccagacacggcgccctggctgagctctgcccgcctggaggctcccacaggatggccctggggactgctgctgcactcgggtcgaatgtcatcaggaatgagcagctgcccctgcagtacttggccgatgtggacacctctgatgaggaaagcatccgggctcacgtgatggcctcccaccattccaagcggagaggccgggcgtcttctgagagtcagatctttgagctgaataagcatatttcagctgtggaatgcctgctgacctacctggagaacacagttgtgcctcccttggccaagggtctaggtgctggagtgcgcacggaggccgatgtagaggaggaggccctgaggaggaagctggaggagctgaccagcaacgtcagtgaccaggagacctcgtccgaggaggaggaagccaaggacgaaaaggcagagcccaacagggacaaatcagttgggcctctcccccaggcggacccggaggtgggcacggctgcccatcaaaccaacagacaggaaaaaagcccccaggaccctggggaccccgtccagtacaacaggaccacagatgaggagctgtcagagctggaggacagagtggcagtgacggcctcagaagtccagcaggcagagagcgaggtttcagacattgaatccaggattgcagccctgagggccgcagggctcacggtgaagccctcgggaaagccccggaggaagtcaaacctcccgatatttctccctcgagtggctgggaaacttggcaagagaccagaggacccaaatgcagacccttcaagtgaggccaaggcaatggctgtgccctatcttctgagaagaaagttcagtaattccctgaaaagtcaaggtaaagatgatgattcttttgatcggaaatcagtgtaccgaggctcgctgacacagagaaaccccaacgcgaggaaaggaatggccagccacaccttcgcgaaacctgtggtggcccaccagtcctaacgggacaggacagagagacagagcagccctgcactgttttccctccaccacagccatcctgtccctcattggctctgtgctttccactatacacagtcaccgtcccaatgagaaacaagaaggagcaccctccacatggactcccacctgcaagtggacagcgacattcagtcctgcactgctcacctgggtttactgatgactcctggctgccccaccatcctctctgatctgtgagaaacagctaagctgctgtgacttccctttaggacaatgttgtgtaaatctttgaaggacacaccgaagacctttatactgtgatcttttacccctttcactcttggctttcttatgttgctttcatgaatggaatggaaaaaagatgactcagttaaggcaccagccatatgtgtattcttgatggtctatatcggggtgtgagcagatgtttgcgtatttcttgtgggtgtgactggatattagacatccggacaagtgactgaactaatgatctgctgaataatgaaggaggaatagacaccccagtccccaccctacgtgcacccgctctgcaagttcccatgtgatctgtagaccaggggaaattacactgcggtcaagggcagagcctgcacatgacagcaagtgagcatttgatagatgctcagatgctagtgcagagagcctgctgggagacgaagagacagcaggcagagctccagatgggcaaggaagaggcttggttctagcctggctctgcccctcactgcagtggatccagtggggcagaggacagagggtcacaaccaatgagggatgtctgccaaggatgggggtgcagaggccacaggagtcagcttgccactcgcccattggttacatagatgatctctcagacaggctgggactcagagttatttcctagtatcggtgtgccccatccagttttaagtggagccctccaagactctccagagctgcctttgaacatcctaacagtaatcacatctcaccctccctgaggttcactttagacaggacccaatggctgcactgcctttgtcagagggggtgctgagaggagtggcttcttttagaatcaaacagtagagacaagagtcaagccttgtgtcttcaagcattgaccaagttaagtgtttccttccctctctcaataagacacttccaggagctttccaatctctcacttaaaactaaggtttgaatctcaaagtgttgctgggaggctgatactcctgcaacttcaggagacctgtgagcacacattagcagctgtttctctgactccttgtggcatcagataaaaacgtgggagtttttccatataattcccagccttacttataaattctattctttgaaaaaattattcaggctaggtaaggtggctcatacctataatcccagccctttgagaggccaaggtgggagaattgcttgaggccaggagtttgagacctcctgggcaacatagtgagatcccatctctacaaaaaacaaaacaaaaaaattacccaagcatgatggtatatgcctgtagtcgtacctacttacttaggaggctgaggcaggaggatcacttgagccctggaggttggggctgcagtgagccatgatcgcatcactatactcgagcctgggcaacagagtgagaccttgtctcttaaaaaaattaataataaataaatgaaaata

SEQ ID NO: 34977 - DNA, 3589 bp, Homo sapiens
cgctagtagaggcggggtgaatcggacgaggcggagagccaggcgctaaccagccgctctgcgccccgcgccctgcttgcccccattatccagccttgccccggcgccctgacctgacgccctggcctgacgccctgcttcgtcgcctcctttctctcccaggtgctggaccagggactgagcgtcccccggagagggtccggtgtgaccccgacaagaagcagaaatggggaagaaactggatctttccaagctcactgatgaagaggcccagcatgtcttggaagttgttcaacgagattttgacctccgaaggaaagaagaggaacggctagaggcgttgaagggcaagattaagaaggaaagctccaagagggagctgctttccgacactgcccatctgaacgagacccactgcgcccgctgcctgcagccctaccagctgcttgtgaatagcaaaaggcagtgcctggaatgtggcctcttcacctgcaaaagctgtggccgcgtccacccggaggagcagggctggatctgtgacccctgccatctggccagagtcgtgaagatcggctcactggagtggtactatgagcatgtgaaagcccgcttcaagaggttcggaagtgccaaggtcatccggtccctccacgggcggctgcagggtggagctgggcctgaactgatatctgaagagagaagtggagacagcgaccagacagatgaggatggagaacctggctcagaggcccaggcccaggcccagccctttggcagcaaaaaaaagcgcctcctctccgtccacgacttcgacttcgagggagactcagatgactccactcagcctcaaggtcactccctgcacctgtcctcagtccctgaggccagggacagcccacagtccctcacagatgagtcctgctcagagaaggcagcccctcacaaggctgagggcctggaggaggctgatactggggcctctgggtgccactcccatccggaagagcagccgaccagcatctcaccttccagacacggcgccctggctgagctctgcccgcctggaggctcccacaggatggccctggggactgctgctgcactcgggtcgaatgtcatcaggaatgagcagctgcccctgcagtacttggccgatgtggacacctctgatgaggaaagcatccgggctcacgtgatggcctcccaccattccaagcggagaggccgggcgtcttctgagagtcagatctttgagctgaataagcatatttcagctgtggaatgcctgctgacctacctggagaacacagttgtgcctcccttggccaagggtctaggtgctggagtgcgcacggaggccgatgtagaggaggaggccctgaggaggaagctggaggagctgaccagcaacgtcagtgaccaggagacctcgtccgaggaggaggaagccaaggacgaaaaggcagagcccaacagggacaaatcagttgggcctctcccccaggcggacccggaggtttcagacattgaatccaggattgcagccctgagggccgcagggctcacggtgaagccctcgggaaagccccggaggaagtcaaacctcccgatatttctccctcgagtggctgggaaacttggcaagagaccagaggacccaaatgcagacccttcaagtgaggccaaggcaatggctgtgccctatcttctgagaagaaagttcagtaattccctgaaaagtcaaggtaaagatgatgattcttttgatcggaaatcagtgtaccgaggctcgctgacacagagaaaccccaacgcgaggaaaggaatggccagccacaccttcgcgaaacctgtggtggcccaccagtcctaacgggacaggacagagagacagagcagccctgcactgttttccctccaccacagccatcctgtccctcattggctctgtgctttccactatacacagtcaccgtcccaatgagaaacaagaaggagcaccctccacatggactcccacctgcaagtggacagcgacattcagtcctgcactgctcacctgggtttactgatgactcctggctgccccaccatcctctctgatctgtgagaaacagctaagctgctgtgacttccctttaggacaatgttgtgtaaatctttgaaggacacaccgaagacctttatactgtgatcttttacccctttcactcttggctttcttatgttgctttcatgaatggaatggaaaaaagatgactcagttaaggcaccagccatatgtgtattcttgatggtctatatcggggtgtgagcagatgtttgcgtatttcttgtgggtgtgactggatattagacatccggacaagtgactgaactaatgatctgctgaataatgaaggaggaatagacaccccagtccccaccctacgtgcacccgctctgcaagttcccatgtgatctgtagaccaggggaaattacactgcggtcaagggcagagcctgcacatgacagcaagtgagcatttgatagatgctcagatgctagtgcagagagcctgctgggagacgaagagacagcaggcagagctccagatgggcaaggaagaggcttggttctagcctggctctgcccctcactgcagtggatccagtggggcagaggacagagggtcacaaccaatgagggatgtctgccaaggatgggggtgcagaggccacaggagtcagcttgccactcgcccattggttacatagatgatctctcagacaggctgggactcagagttatttcctagtatcggtgtgccccatccagttttaagtggagccctccaagactctccagagctgcctttgaacatcctaacagtaatcacatctcaccctccctgaggttcactttagacaggacccaatggctgcactgcctttgtcagagggggtgctgagaggagtggcttcttttagaatcaaacagtagagacaagagtcaagccttgtgtcttcaagcattgaccaagttaagtgtttccttccctctctcaataagacacttccaggagctttccaatctctcacttaaaactaaggtttgaatctcaaagtgttgctgggaggctgatactcctgcaacttcaggagacctgtgagcacacattagcagctgtttctctgactccttgtggcatcagataaaaacgtgggagtttttccatataattcccagccttacttataaattctattctttgaaaaaattattcaggctaggtaaggtggctcatacctataatcccagccctttgagaggccaaggtgggagaattgcttgaggccaggagtttgagacctcctgggcaacatagtgagatcccatctctacaaaaaacaaaacaaaaaaattacccaagcatgatggtatatgcctgtagtcgtacctacttacttaggaggctgaggcaggaggatcacttgagccctggaggttggggctgcagtgagccatgatcgcatcactatactcgagcctgggcaacagagtgagaccttgtctcttaaaaaaattaataataaataaatgaaaata

SEQ ID NO: 34978 - DNA, 3333 bp, Homo sapiens
tgagtaggtggatgagtggataaatgggtgggtgggtaggtgaatagatgaatagattgataaatagggggatgggtggattggtagatgggtagatggagggatacattgctgtgtggataggtgggtgaatggatgaaggagggagggatgggcaggtagatggatagattagtggatggatgggtggatgggctgacaaatggcttgttcccagactgtttgtccttgggtggagtcatgcaggtatctattgcagctgggcctgaactgatatctgaagagagaagtggagacagcgaccagacagatgaggatggagaacctggctcagaggcccaggcccaggcccagccctttggcagcaaaaaaaagcgcctcctctccgtccacgacttcgacttcgagggagactcagatgactccactcagcctcaaggtcactccctgcacctgtcctcagtccctgaggccagggacagcccacagtccctcacagatgagtcctgctcagagaaggcagcccctcacaaggctgagggcctggaggaggctgatactggggcctctgggtgccactcccatccggaagagcagccgaccagcatctcaccttccagacacggcgccctggctgagctctgcccgcctggaggctcccacaggatggccctggggactgctgctgcactcgggtcgaatgtcatcaggaatgagcagctgcccctgcagtacttggccgatgtggacacctctgatgaggaaagcatccgggctcacgtgatggcctcccaccattccaagcggagaggccgggcgtcttctgagagtcagatctttgagctgaataagcatatttcagctgtggaatgcctgctgacctacctggagaacacagttgtgcctcccttggccaagggtctaggtgctggagtgcgcacggaggccgatgtagaggaggaggccctgaggaggaagctggaggagctgaccagcaacgtcagtgaccaggagacctcgtccgaggaggaggaagccaaggacgaaaaggcagagcccaacagggacaaatcagttgggcctctcccccaggcggacccggaggtgggcacggctgcccatcaaaccaacagacaggaaaaaagcccccaggaccctggggaccccgtccagtacaacaggaccacagatgaggagctgtcagagctggaggacagagtggcagtgacggcctcagaagtccagcaggcagagagcgaggtttcagacattgaatccaggattgcagccctgagggccgcagggctcacggtgaagccctcgggaaagccccggaggaagtcaaacctcccgatatttctccctcgagtggctgggaaacttggcaagagaccagaggacccaaatgcagacccttcaagtgaggccaaggcaatggctgtgccctatcttctgagaagaaagttcagtaattccctgaaaagtcaaggtaaagatgatgattcttttgatcggaaatcagtgtaccgaggctcgctgacacagagaaaccccaacgcgaggaaaggaatggccagccacaccttcgcgaaacctgtggtggcccaccagtcctaacgggacaggacagagagacagagcagccctgcactgttttccctccaccacagccatcctgtccctcattggctctgtgctttccactatacacagtcaccgtcccaatgagaaacaagaaggagcaccctccacatggactcccacctgcaagtggacagcgacattcagtcctgcactgctcacctgggtttactgatgactcctggctgccccaccatcctctctgatctgtgagaaacagctaagctgctgtgacttccctttaggacaatgttgtgtaaatctttgaaggacacaccgaagacctttatactgtgatcttttacccctttcactcttggctttcttatgttgctttcatgaatggaatggaaaaaagatgactcagttaaggcaccagccatatgtgtattcttgatggtctatatcggggtgtgagcagatgtttgcgtatttcttgtgggtgtgactggatattagacatccggacaagtgactgaactaatgatctgctgaataatgaaggaggaatagacaccccagtccccaccctacgtgcacccgctctgcaagttcccatgtgatctgtagaccaggggaaattacactgcggtcaagggcagagcctgcacatgacagcaagtgagcatttgatagatgctcagatgctagtgcagagagcctgctgggagacgaagagacagcaggcagagctccagatgggcaaggaagaggcttggttctagcctggctctgcccctcactgcagtggatccagtggggcagaggacagagggtcacaaccaatgagggatgtctgccaaggatgggggtgcagaggccacaggagtcagcttgccactcgcccattggttacatagatgatctctcagacaggctgggactcagagttatttcctagtatcggtgtgccccatccagttttaagtggagccctccaagactctccagagctgcctttgaacatcctaacagtaatcacatctcaccctccctgaggttcactttagacaggacccaatggctgcactgcctttgtcagagggggtgctgagaggagtggcttcttttagaatcaaacagtagagacaagagtcaagccttgtgtcttcaagcattgaccaagttaagtgtttccttccctctctcaataagacacttccaggagctttccaatctctcacttaaaactaaggtttgaatctcaaagtgttgctgggaggctgatactcctgcaacttcaggagacctgtgagcacacattagcagctgtttctctgactccttgtggcatcagataaaaacgtgggagtttttccatataattcccagccttacttataaattctattctttgaaaaaattattcaggctaggtaaggtggctcatacctataatcccagccctttgagaggccaaggtgggagaattgcttgaggccaggagtttgagacctcctgggcaacatagtgagatcccatctctacaaaaaacaaaacaaaaaaattacccaagcatgatggtatatgcctgtagtcgtacctacttacttaggaggctgaggcaggaggatcacttgagccctggaggttggggctgcagtgagccatgatcgcatcactatactcgagcctgggcaacagagtgagaccttgtctcttaaaaaaattaataataaataaatgaaaata

SEQ ID NO: 34979 - DNA, 2155 bp, Homo sapiens
acttgggcctgacgtagaggcgggtgcagagaggggagggtgatcaggacaccagcacagggttcagcaggcagagagcgaggtttcagacattgaatccaggattgcagccctgagggccgcagggctcacggtgaagccctcgggaaagccccggaggaagtcaaacctcccgatatttctccctcgagtggctgggaaacttggcaagagaccagaggacccaaatgcagacccttcaagtgaggccaaggcaatggctgtgccctatcttctgagaagaaagttcagtaattccctgaaaagtcaaggtaaagatgatgattcttttgatcggaaatcagtgtaccgaggctcgctgacacagagaaaccccaacgcgaggaaaggaatggccagccacaccttcgcgaaacctgtggtggcccaccagtcctaacgggacaggacagagagacagagcagccctgcactgttttccctccaccacagccatcctgtccctcattggctctgtgctttccactatacacagtcaccgtcccaatgagaaacaagaaggagcaccctccacatggactcccacctgcaagtggacagcgacattcagtcctgcactgctcacctgggtttactgatgactcctggctgccccaccatcctctctgatctgtgagaaacagctaagctgctgtgacttccctttaggacaatgttgtgtaaatctttgaaggacacaccgaagacctttatactgtgatcttttacccctttcactcttggctttcttatgttgctttcatgaatggaatggaaaaaagatgactcagttaaggcaccagccatatgtgtattcttgatggtctatatcggggtgtgagcagatgtttgcgtatttcttgtgggtgtgactggatattagacatccggacaagtgactgaactaatgatctgctgaataatgaaggaggaatagacaccccagtccccaccctacgtgcacccgctctgcaagttcccatgtgatctgtagaccaggggaaattacactgcggtcaagggcagagcctgcacatgacagcaagtgagcatttgatagatgctcagatgctagtgcagagagcctgctgggagacgaagagacagcaggcagagctccagatgggcaaggaagaggcttggttctagcctggctctgcccctcactgcagtggatccagtggggcagaggacagagggtcacaaccaatgagggatgtctgccaaggatgggggtgcagaggccacaggagtcagcttgccactcgcccattggttacatagatgatctctcagacaggctgggactcagagttatttcctagtatcggtgtgccccatccagttttaagtggagccctccaagactctccagagctgcctttgaacatcctaacagtaatcacatctcaccctccctgaggttcactttagacaggacccaatggctgcactgcctttgtcagagggggtgctgagaggagtggcttcttttagaatcaaacagtagagacaagagtcaagccttgtgtcttcaagcattgaccaagttaagtgtttccttccctctctcaataagacacttccaggagctttccaatctctcacttaaaactaaggtttgaatctcaaagtgttgctgggaggctgatactcctgcaacttcaggagacctgtgagcacacattagcagctgtttctctgactccttgtggcatcagataaaaacgtgggagtttttccatataattcccagccttacttataaattctattctttgaaaaaattattcaggctaggtaaggtggctcatacctataatcccagccctttgagaggccaaggtgggagaattgcttgaggccaggagtttgagacctcctgggcaacatagtgagatcccatctctacaaaaaacaaaacaaaaaaattacccaagcatgatggtatatgcctgtagtcgtacctacttacttaggaggctgaggcaggaggatcacttgagccctggaggttggggctgcagtgagccatgatcgcatcactatactcgagcctgggcaacagagtgagaccttgtctcttaaaaaaattaataataaataaatgaaaata

SEQ ID NO: 34980 - DNA, 2113 bp, Homo sapiens
  misc_feature (22)..(22): n is a, c, g, or t
  misc_feature (26)..(26): n is a, c, g, or t
  misc_feature (95)..(95): n is a, c, g, or t
  misc_feature (98)..(98): n is a, c, g, or t
  misc_feature (101)..(102): n is a, c, g, or t
  misc_feature (108)..(108): n is a, c, g, or t
  misc_feature (130)..(130): n is a, c, g, or t
  misc_feature (212)..(212): n is a, c, g, or t
  misc_feature (267)..(267): n is a, c, g, or t
gggacccatccataaacagccnaaangaggtgtcagagtgagaagatgcataagctcacagtccacagcagagagcgagtttcaaacatgcatcnagnatnncagccntgatttcgcaggctcacgtgangcctcgggaagccccgaggagtcaaactccgatattctcctcgagtgctggaactgcagagacagagacacaagcagacatncagtgagccaggcatggtgtgcctatctctgagagaagtcagtaatcctgaaagncagtaaagatgatgattcttttgatcggaaatcagtgtaccgaggctcgctgacacagagaaaccccaacgcgaggaaaggaatggccagccacaccttcgcgaaacctgtggtggcccaccagtcctaacgggacaggacagagagacagagcagccctgcactgttttccctccaccacagccatcctgtccctcattggctctgtgctttccactatacacagtcaccgtcccaatgagaaacaagaaggagcaccctccacatggactcccacctgcaagtggacagcgacattcagtcctgcactgctcacctgggtttactgatgactcctggctgccccaccatcctctctgatctgtgagaaacagctaagctgctgtgacttccctttaggacaatgttgtgtaaatctttgaaggacacaccgaagacctttatactgtgatcttttacccctttcactcttggctttcttatgttgctttcatgaatggaatggaaaaaagatgactcagttaaggcaccagccatatgtgtattcttgatggtctatatcggggtgtgagcagatgtttgcgtatttcttgtgggtgtgactggatattagacatccggacaagtgactgaactaatgatctgctgaataatgaaggaggaatagacaccccagtccccaccctacgtgcacccgctctgcaagttcccatgtgatctgtagaccaggggaaattacactgcggtcaagggcagagcctgcacatgacagcaagtgagcatttgatagatgctcagatgctagtgcagagagcctgctgggagacgaagagacagcaggcagagctccagatgggcaaggaagaggcttggttctagcctggctctgcccctcactgcagtggatccagtggggcagaggacagagggtcacaaccaatgagggatgtctgccaaggatgggggtgcagaggccacaggagtcagcttgccactcgcccattggttacatagatgatctctcagacaggctgggactcagagttatttcctagtatcggtgtgccccatccagttttaagtggagccctccaagactctccagagctgcctttgaacatcctaacagtaatcacatctcaccctccctgaggttcactttagacaggacccaatggctgcactgcctttgtcagagggggtgctgagaggagtggcttcttttagaatcaaacagtagagacaagagtcaagccttgtgtcttcaagcattgaccaagttaagtgtttccttccctctctcaataagacacttccaggagctttccaatctctcacttaaaactaaggtttgaatctcaaagtgttgctgggaggctgatactcctgcaacttcaggagacctgtgagcacacattagcagctgtttctctgactccttgtggcatcagataaaaacgtgggagtttttccatataattcccagccttacttataaattctattctttgaaaaaattattcaggctaggtaaggtggctcatacctataatcccagccctttgagaggccaaggtgggagaattgcttgaggccaggagtttgagacctcctgggcaacatagtgagatcccatctctacaaaaaacaaaacaaaaaaattacccaagcatgatggtatatgcctgtagtcgtacctacttacttaggaggctgaggcaggaggatcacttgagccctggaggttggggctgcagtgagccatgatcgcatcactatactcgagcctgggcaacagagtgagaccttgtctcttaaaaaaattaataataaataaatgaaaata

SEQ ID NO: 34981 - DNA, 2312 bp, Homo sapiens
cgctagtagaggcggggtgaatcggacgaggcggagagccaggcgctaaccagccgctctgcgccccgcgccctgcttgcccccattatccagccttgccccggcgccctgacctgacgccctggcctgacgccctgcttcgtcgcctcctttctctcccaggtgctggaccagggactgagcgtcccccggagagggtccggtgtgaccccgacaagaagcagaaatggggaagaaactggatctttccaagctcactgatgaagaggcccagcatgtcttggaagttgttcaacgagattttgacctccgaaggaaagaagaggaacggctagaggcgttgaagggcaagattaagaaggaaagctccaagagggagctgctttccgacactgcccatctgaacgagacccactgcgcccgctgcctgcagccctaccagctgcttgtgaatagcaaaaggcagtgcctggaatgtggcctcttcacctgcaaaagctgtggccgcgtccacccggaggagcagggctggatctgtgacccctgccatctggccagagtcgtgaagatcggctcactggagtggtactatgagcatgtgaaagcccgcttcaagaggttcggaagtgccaaggtcatccggtccctccacgggcggctgcagggtggagctgggcctgaactgatatctgaagagagaagtggagacagcgaccagacagatgaggatggagaacctggctcagaggcccaggcccaggcccagccctttggcagcaaaaaaaagcgcctcctctccgtccacgacttcgacttcgagggagactcagatgactccactcagcctcaaggtcactccctgcacctgtcctcagtccctgaggccagggacagcccacagtccctcacagatgagtcctgctcagagaaggcagcccctcacaaggctgagggcctggaggaggctgatactggggcctctgggtgccactcccatccggaagagcagccgaccagcatctcaccttccagacacggcgccctggctgagctctgcccgcctggaggctcccacaggatggccctggggactgctgctgcactcgggtcgaatgtcatcaggaatgagcagctgcccctgcagtacttggccgatgtggacacctctgatgaggaaagcatccgggctcacgtgatggcctcccaccattccaagcggagaggccgggcgtcttctgagagtcagatctttgagctgaataagcatatttcagctgtggaatgcctgctgacctacctggagaacacagttgtgcctcccttggccaagggtctaggtgctggagtgcgcacggaggccgatgtagaggaggaggccctgaggaggaagctggaggagctgaccagcaacgtcagtgaccaggagacctcgtccgaggaggaggaagccaaggacgaaaaggcagagcccaacagggacaaatcagttgggcctctcccccaggcggacccggaggtgggcacggctgcccatcaaaccaacagacaggaaaaaagcccccaggaccctggggaccccgtccagtacaacaggaccacagatgaggagctgtcagagctggaggacagagtggcagtgacggcctcagaagtccagcaggcagagagcgaggtttcagacattgaatccaggattgcagccctgagggccgcagggctcacggtgaagccctcgggaaagccccggaggaagtcaaacctcccgatatttctccctcgagtggctgggaaacttggcaagagaccagaggacccaaatgcagacccttcaagtgaggccaaggcaatggctgtgccctatcttctgagaagaaagttcagtaattccctgaaaagtcaaggtaaagatgatgattcttttgatcggaaatcagtgtaccgaggctcgctgacacagagaaaccccaacgcgaggaaaggaatggccagccacaccttcgcgaaacctgtggtggcccaccagtcctaacgggacaggacagagagacagagcagccctgcactgttttccctccaccacagccatcctgtccctcattggctctgtgctttccactatacacagtcaccgtcccaatgagaaacaagaaggagcaccctccacatggactcccacctgcaagtggacagcgacattcagtcctgcactgctcacctgggtttactgatgactcctggctgccccaccatcctctctgatctgtgagaaacaaaacgctgccctggtacccctatgtccaggtatagcagtt

SEQ ID NO: 34982 - DNA, 1557 bp, Homo sapiens
cgctagtagaggcggggtgaatcggacgaggcggagagccaggcgctaaccagccgctctgcgccccgcgccctgcttgcccccattatccagccttgccccggcgccctgacctgacgccctggcctgacgccctgcttcgtcgcctcctttctctcccaggtgctggaccagggactgagcgtcccccggagagggtccggtgtgaccccgacaagaagcagaaatggggaagaaactggatctttccaagctcactgatgaagaggcccagcatgtcttggaagttgttcaacgagattttgacctccgaaggaaagaagaggaacggctagaggcgttgaagggcaagattaagaaggaaagctccaagagggagctgctttccgacactgcccatctgaacgagacccactgcgcccgctgcctgcagccctaccagctgcttgtgaatagcaaaaggcagtgcctggaatgtggcctcttcacctgcaaaagctgtggccgcgtccacccggaggagcagggctggatctgtgacccctgccatctggccagagtcgtgaagatcggctcactggagtggtactatgagcatgtgaaagcccgcttcaagaggttcggaagtgccaaggtcatccggtccctccacgggcggctgcagggtggagctgggcctgaactgatatctgaagagagaagtggagacagcgaccagacagatgaggatggagaacctggctcagaggcccaggcccaggcccagccctttggcagcaaaaaaaagcgcctcctctccgtccacgacttcgacttcgagggagactcagatgactccactcagcctcaaggtcactccctgcacctgtcctcagtccctgaggccagggacagcccacagtccctcacagatgagtcctgctcagagaaggcagcccctcacaaggctgagggcctggaggaggctgatactggggcctctgggtgccactcccatccggaagagcagccgaccagcatctcaccttccagacacggcgccctggctgagctctgcccgcctggaggctcccacaggatggccctggggactgctgctgcactcgggtcgaatgtcatcaggaatgagcagctgcccctgcagtacttggccgatgtggacacctctgatgaggaaagcatccgggctcacgtgatggcctcccaccattccaagcggagaggccgggcgtcttctgagagtcagatctttgagctgaataagcatatttcagctgtggaatgcctgctgacctacctggagaacacagttgtgcctcccttggccaaggctgaacgtcattcccgatctttccaccgagggcctctgtgatttgggggctttgtcaggaaagtggagcctcacggaaaagcatactggctaaaacacgcggcttcttcatcgactcaatctaatcatccccttggtgttcgtctgtgagaccccaggcagccagccctgtcgatctgtctcaataggcttcgtccaaatagaaaattaaatgatcatgtgcaata

SEQ ID NO: 34983 - DNA, 2284 bp, Homo sapiens
cgctagtagaggcggggtgaatcggacgaggcggagagccaggcgctaaccagccgctctgcgccccgcgccctgcttgcccccattatccagccttgccccggcgccctgacctgacgccctggcctgacgccctgcttcgtcgcctcctttctctcccaggtgctggaccagggactgagcgtcccccggagagggtccggtgtgaccccgacaagaagcagaaatggggaagaaactggatctttccaagctcactgatgaagaggcccagcatgtcttggaagttgttcaacgagattttgacctccgaaggaaagaagaggaacggctagaggcgttgaagggcaagattaagaaggaaagctccaagagggagctgctttccgacactgcccatctgaacgagacccactgcgcccgctgcctgcagccctaccagctgcttgtgaatagcaaaaggcagtgcctggaatgtggcctcttcacctgcaaaagctgtggccgcgtccacccggaggagcagggctggatctgtgacccctgccatctggccagagtcgtgaagatcggctcactggagtggtactatgagcatgtgaaagcccgcttcaagaggttcggaagtgccaaggtcatccggtccctccacgggcggctgcagggtggagctgggcctgaactgatatctgaagagagaagtggagacagcgaccagacagatgaggatggagaacctggctcagaggcccaggcccaggcccagccctttggcagcaaacccaccatcctctctgatctgtgagaaacagctaagctgctgtgacttccctttaggacaatgttgtgtaaatctttgaaggacacaccgaagacctttatactgtgatcttttacccctttcactcttggctttcttatgttgctttcatgaatggaatggaaaaaagatgactcagttaaggcaccagccatatgtgtattcttgatggtctatatcggggtgtgagcagatgtttgcgtatttcttgtgggtgtgactggatattagacatccggacaagtgactgaactaatgatctgctgaataatgaaggaggaatagacaccccagtccccaccctacgtgcacccgctctgcaagttcccatgtgatctgtagaccaggggaaattacactgcggtcaagggcagagcctgcacatgacagcaagtgagcatttgatagatgctcagatgctagtgcagagagcctgctgggagacgaagagacagcaggcagagctccagatgggcaaggaagaggcttggttctagcctggctctgcccctcactgcagtggatccagtggggcagaggacagagggtcacaaccaatgagggatgtctgccaaggatgggggtgcagaggccacaggagtcagcttgccactcgcccattggttacatagatgatctctcagacaggctgggactcagagttatttcctagtatcggtgtgccccatccagttttaagtggagccctccaagactctccagagctgcctttgaacatcctaacagtaatcacatctcaccctccctgaggttcactttagacaggacccaatggctgcactgcctttgtcagagggggtgctgagaggagtggcttcttttagaatcaaacagtagagacaagagtcaagccttgtgtcttcaagcattgaccaagttaagtgtttccttccctctctcaataagacacttccaggagctttccaatctctcacttaaaactaaggtttgaatctcaaagtgttgctgggaggctgatactcctgcaacttcaggagacctgtgagcacacattagcagctgtttctctgactccttgtggcatcagataaaaacgtgggagtttttccatataattcccagccttacttataaattctattctttgaaaaaattattcaggctaggtaaggtggctcatacctataatcccagccctttgagaggccaaggtgggagaattgcttgaggccaggagtttgagacctcctgggcaacatagtgagatcccatctctacaaaaaacaaaacaaaaaaattacccaagcatgatggtatatgcctgtagtcgtacctacttacttaggaggctgaggcaggaggatcacttgagccctggaggttggggctgcagtgagccatgatcgcatcactatactcgagcctgggcaacagagtgagaccttgtctcttaaaaaaattaataataaataaatgaaaata

SEQ ID NO: 34984 - DNA, 856 bp, Homo sapiens
gtttttttccagatttataatttaatggctgtgcagatcccagtccctcatttctgtcgctcacgtgcccactggtctggggtcagggttttctgttcaaaggcatggatgtgcgggagctcttctgctaggcacgcgttcaccagcctgtgtctctgaagcagcggtttcccctcgaacttggccgacaccaccaggactcggaagctacaggagcaacggttgagggtcgtgtcctccacctccacatgctccgcctccaggtcccgctgcagcttctcgcggaggtattcggcgctgagttccatggcggcagtccagctggaacggcagcccagtccagccttgccccggcgccctgacctgacgccctggcctgacgccctgcttcgtcgcctcctttctctcccaggtgctggaccagggactgagcgtcccccggagagggtccggtgtgaccccgacaagaagcagaaatggggaagaaactggatctttccaagctcactgatgaagaggcccagcatgtcttggaagttgttcaacgagattttgacctccgaaggaaagaagaggaacggctagaggcgttgaagggcaagattaagaaggaaagctccaagagggagctgctttccgacactgcccatctgaacgagacccactgcgcccgctgcctgcagccctaccagctgcttgtgaatagcaaaaggcagtgcctggaatgtggcctcttcacctgcaaaagctgtggccgcgtccacccggaggagcagggctggatctgtgacccctgccatctggccagagtcgtgaagatcgctcactgagcgtggacaatcatgtggaccagcta

SEQ ID NO: 34985 - DNA, 438 bp, Homo sapiens
cacatatacttatcagatacattttcttatctaatgtacataagaggccactgaaatgaactgttatgtccatgcctgaaagttagcatctcagactaggtttctggcttgtataaatataacttgaagtttaaagagttttaagttttggccaggcgcagtggctcacacctgtactcccagcagtttgaggtcccgaggtggatggatcacgaggtcagaaattcaagaccagccaggccaaacatggttgaaaccctatctctactaaaaatacaaaaagttagctgggtgtggtggccagcacctgtaatcccagctactcgggaggctgatgaggcaggagaatcgcttgaacttgggagatggaggtcgcggtgagcggagatcacaccactgcactccagtgggtgataatgcaagactcagtctcaaaaa

SEQ ID NO: 34986 - DNA, 437 bp, Homo sapiens
tggatcatatgtgtattcattctcaacagaaatagaacccataggaaggagggaaagagatgattgatagacagataatagatagataatggataggtagatgatagataatggatagatgattgatagatagatagatagatagatagatagatagatagatagatagattagatagatagatagataggagataggtaggccaggtgcggtggctcactcctgtaatcccagcactttgggaggttgagataggtggatcacttaagggagttcaagaccagcctgaccaacatggcgaaaccccatgtctaccaaaataagttagccaggcatggtggtgcatgcctgtaatcccagtttcttgggaggctgaggcacgagaatcacttgaacctggggggcagaggctgcagtgagctgagatggtgccactg

SEQ ID NO: 34987 - DNA, 439 bp, Homo sapiens
agctcactgcaacctccacttcccaagtttaagcgattctccctgcctcggcctcccgagtagctgggattacaggtgcctgccaccacgattggctaatttttgtattttttagtagagacagggtttcgccatgttggccaggctggtcttgaactcctgacctcaggtgatccgcccacttcggcctcccaaagtgctgggattacaggtgtgagccactgcatccagccaggtttgtgtctttaggtactaaaaaatgttataacggcctattccttagttggttcacatagttctttgagatcttgttccttcttggcctcatctctttattctgtccagtgtctttcctggactcattgaggtcagagtgaaatttctgttcctatgaaagttattctttttgtcacctctgatcctttgaccgtggtagtcc

SEQ ID NO: 34988 - DNA, 348 bp, Homo sapiens
aatttgggccctcgaggcccaagaattcggcacgaggtgagaaagcagttcaatgaatctctccatcaggtttcagtgagtgtgtcagttattaaactattgcctctcagcatcaaagccacatggccatattcaacattgggatgctaaggctggggacagagagccaaatcatataattccacccctggctccttccaaatcttatgtccttctcatatttcaaaacgcaatcatgccttctcaacagtccccctattcttaactcattccagtattaactcaaaagtccaaatccaaaggctcatctgagacaagggcaagtcccttcttcctatggagcctgta

SEQ ID NO: 34989 - DNA, 569 bp, Homo sapiens
  misc_feature (549)..(549): n is a, c, g, or t
aggagtagaagtgagatgttaagatcttatggcactaaagacttactattctgttcctacatactctgttaggatcagatagatgttatagaaatgccttttgtttctcctgcccttcttgatgtcacagttttttgtacttccagctgtctaaaggcatgaatctcctcttggagcattctcccagacccttctttagaagagtctatactaagttcttggtgccctcttcggcagccaagggtgaaggccccatagaggagaggatccaaaggagcattgaggaggcccaagaggaaaaggatgtggctcaggctgggagggacttcagttagcatggtgggggagaaccagtaccacatacccagtaggtaataaggtgtccagcagaggatgaaggtcagcaagataagcagggccagtctcagggcccggagacgaacacggggacaattgtcaaaggagcgggggagggcaaattcaccagcaggggctaggaatttagaaaatatactgtaattcagacactcagcttctgatctgagtaangatcctgtagatcacctcag

SEQ ID NO: 34990 - DNA, 390 bp, Homo sapiens
tgtatccccaacacctagtttgttgcccagcacatagcacaaactgcagattccaagacttactacatttaataagttctacttcttccacactaagaactaaggtcctttctgagcacatgattggaaagtagataaaaagtagtaaagatagaaactctcaggtgggaagttgtccacattacttcatttgcaagtgagggacactgtggattcttgacttttctgtttcgcagaaaggtctttgggcatttctaaagaatatttgaaaattgaagtgtggagataaaactataaaacctttagaagaagatacaggagtaaatcttcataaccctggattatgcagtggtttcttagatatgacaccaaaagcacaagcaacaacaa

SEQ ID NO: 34991 - DNA, 532 bp, Homo sapiens
ccacgcgtccgaagaaaagttactcttatatagggttaaaattgccattcgtagctattcttgctatatttggtttctcatttaaaatttgaaagtaattttcaaggatcctagaaatcaaaagaaaaattaatatttttaaaaaatgtctatgaaaaataatttactctttagtaaacagtatttttctggagttgctatgataacttgaattattccattgcaggagataagtggctctgagctgtgctttccaagtgggcagaaaataaaatctgcttatcttccccaaaggcaaattcacataccagctgtttttcagtctcctgctcattataagcagactttcacatcttgcctcataggtatggctgttgtgtttttattgtatcatgattgctgcttcatgtaagtagtaaaattgtgagaatttaatacattatattgtgaattttcatactaaataccttatttttcatatgttctagtttttgacagtaacttttattctaatttcagatcaaaactgagt

SEQ ID NO: 34992 - DNA, 122 bp, Homo sapiens
agaaaatacatgattatagcccaacttattctacctgataaactctgaattatgggtcacataaaccattttagaggggtagttttaaaccaattaaatttattctaaatttaatgtgttat

SEQ ID NO: 34993 - DNA, 300 bp, Homo sapiens
tggggataattgcttgaaatgtttgtgtgtattttgaggatttgttgtaattgaatttaattgagtgctttgcaaaatcatttgtcatgattttaggcttggtatgcatagatatttaaattcgggggcatgtctcaaattatttacagaagagattgaaacttgaaataatgtaagttatgatttttactttatcttttcctcactttcagtattcttcacatgaggatgtatatacttttgttataaaagtagtcttgttcacagaggcatatttaaaacatatgtaccggtaaaaaa

SEQ ID NO: 34994 - DNA, 769 bp, Homo sapiens
attcccagggaagatgttttttgttgtggttagttggtttttggttttgttttgtttttgcactctccagaggagcctctggagggagcatgccctctttttggtaattaaccctttagcagctggcgaggccgctttgctgggggttgaagatagtcatagaggagggaaaaggggtgacggttttggaagcatctgcccacacctacaatgggcttaagcacaacttgctttctgttttcctgagttggcatggaggaattttttttttgtcactattgcattggtatgtgagttttctttggacaaactagcctccgatgaagtatgactttgtgggatacctttgtccatgggaaagagtgttgcataggaaaattgttcaagtctttgttctagttctcttattcagccacatctcttgtacattatccattacttgtgaattcttgcaagaaaaagatcagtctcaattcttgctttttgttttacttctatggaaactgaggcacagagcttcaaatgacatgcacattctcacagaggaactgagaatgggaacattatcatccaaaatgcctgcggaatgactggctgggtatgaaattgtgttgactgctagtcacagagcatattggtggacacagccctgactcctttagtgtagcaatgggaaagaagggaggaggagggaagggggtgaagcaaagaggagctggaactctgtctctgtccctaccgccccccccgccccaccacctatgtttaa

SEQ ID NO: 34995 - DNA, 369 bp, Homo sapiens
gatctttatgatctttcatcacattttgaaaagtatggttccactgaacctaagcagtaggtttgtattcaagaatacgaagaagtggccgggcgcggtggctcacgcctgtcatcccagcactttgggaggctgaggcaggcggatcatgaagtcaggagattgagaccatcctggctaacatggtgaaaccctgtctctactaagtatacaaaaaaagtagccgggcgtggtggtgggtgcctgtagtcccagctactcgggaggctgaggcaggagaatgggcctgaacccgggaggcggagcttgcagtgagccgagattgcaccactgcactccagcctgggcaacagagcgagactccatctc

SEQ ID NO: 34996 - DNA, 1393 bp, Homo sapiens
ctttaagtgaaaaggtgaaagttcttggcttagtaaggagataaaatacattatgtgccgagattgctaagatctgtgagaacaaatcgtctatgaaattgtgaagaaggaaaaacaaatttgtgctagttttgctgtcacacctcaaactgcaaaagttacagtcacagtgcataagtgcttggttaagacaggaaaagcattaaatttgtgggtggaagacatgaacagaaatgtgttccaattaatggcaattgggttcagtactgtctgtggtttcagggatccactaggggtcttggaacatatcccccacacataagagggcactactgcattgcttagaagcaagtcacaggtcctcctcacatttaaggggatggggtcatacaaggatgtgaaaaccaagattagaacataatggaggccaccttaagaatctattcactggcattttaaggaagtcctgggagtgatgtcaccaatatggcatagtagatctacaagccttaatctccccataaaaaaatatagatagccattcacaaaccagaatagccctgatagtgctcaaggatctatttaagaatctaccacaacacactggagaaaaaaaagaagaatatccacagaaaggattgctgttgaaattggcatacttgaggcaccaggagatggttaggaacgaagaaatgcagaggatattggtatcagctgtacaggtgaactgctgtggttcccaggagcctgctttgcagaggacagtggcatcttttgcaacagaggtaaccaacagccattcctgtccaggaaccccatagagggagatgtggctgcacactcccataacccctaagaatcagttgctcttgtgctgttctgggactggagctgccacatttcccatccctgtgcatgcccccaacctctgagctgtggctgttccacaagtgcccacattcctgaccccttctctgagggtttattctgtgtacccatgtctcatacaccagaaccatagcaagctagatcatgtgtgggtcccagagccaaggtctctccgtgcatgcctgtgctctgggtacaaacttagctgccatagagagctagctggcatccctaacgctgcagccactgtagctctattcatgcccatagtcctgtcccaggttccctggcttacccattacttcataagcaccaacatgcaagtgggggtgccttcatcccagcaccaatgccattaatgccttggatcccagagccatagtccctctgctcatgctcatacttcaagacttggctctatggctgctttacatgccactcatcagacacctgtaccactgccactgtgagcaggcccacaagccagaccttgtgccaaaagaga

SEQ ID NO: 34997 - DNA, 1602 bp, Homo sapiens
cggggagagcgcgcatgcctggtccggtggagggagggtgccgggcgtcacaggtcctgacagggaagaagttggcaggtcctggcaggggacgagctgcggcggtggcacctccgggtgtggaaggctccagtgagatggagtcgcgagtcgcggacgctgggaccggcgagaccgcgcgagcagcgggcgggagtccggcagttggctgcaccactcgggggcccgtagtctcggcgcccctgggagccgcccggtggaagctcctgcggcaggttctgaagcaaaaacacctggatgattgcctgcgacatgtatctgtaagaagatttgaatcatttaatctgttttcagtaacagaaggcaaagaaagggaaactgaagaggaggttggtgcatgggtccaatatacaagcatcttctgtcctgaatacagtatctccttaaggcataatagtggatccttgaatgttgaagatgtccttaccagctttgacaatacaggaaatgtttgcatctggccatctgaagaggttttggcttactactgcctcaagcacaataatatattcagggcccttgctgtgtgtgagctagggggtggcatgacatgcttggctgggctcatggttgctatttctgcagatgtcaaagaagttctgttaactgatgggaatgaaaaggccatcagaaatgtgcaagacatcatcacaaggaatcagaaggctggtgtgtttaagacccagaaaatatcaagctgcgttttacgatgggataatgagacagatgtctctcaactggaaggacattttgacattgttatgtgtgctgactgcctgtttctggaccagtacagagccagccttgttgatgcaataaagagattactccagcccagggggaaagcgatggtatttgccccacgccgagggaatactttaaaccagttttgcaatctagctgaaaaagctggtttctgtatccaaagacatgaaaattatgatgaacacatttcaaacttccactccaagttgaaaaaggaaaacccggacatatatgaagaaaaccttcattacccgcttctgcttattttgaccaaacatggatagaagattaagcttctcaaagacgaagaaacgtatcaagtgcatagggaatatttttacaaaaacggaaatctgtaaggggtataatcgcctgcctgcgccctttgcagcatttcacgtgtgggctatggactccacctgtcctcacccacgttattccccagctgccctctccagctccctccccgcctctttttacactctgcttgttgctcgtcctgccctaaacctttgtttgtctttaaatgtgtataagctgcctgtctgtgacttgaatttgactggtgaacaaactaaatatttttccctgtaattgagacagaatttcttttgatgatacccatccctccttcattttttttttttttttggtctttgttctgttttggtggtggtagtttttaatcagtaaacccagcaaatatcatgattctttcctggttagaaaaataaataaagtgtatctttttatctccctccaattaattgtattaaa

SEQ ID NO: 34998 - DNA, 805 bp, Homo sapiens
cggggagagcgcgcatgcctggtccggtggagggagggtgccgggcgtcacaggtcctgacagggaagaagttggcaggtcctggcaggggacgagctgcggcggtggcacctccgggtgtggaaggctccagtgagatggagtcgcgagtcgcggacgctgggaccggcgagaccgcgcgagcagcgggcgggagtccggcagttggctgcaccactcgggggcccgtagtctcggcgcccctgggagccgcccggtggaagctcctgcggcaggttctgaagcaaaaacacctggatgattgcctgcgacatgtatctgtaagaagatttgaatcatttaatctgttttcagtaacagaaggcaaagaaagggaaactgaagaggaggttggtgcatgggtccaatatacaagcatcttctgtcctgaatacagtatctccttaaggcataatagtggatccttgaatgttgaagatgtccttaccagctttgacaatacaggaaatgtttgggaagcaaccaggggaaaatgaagatatcaccatcagtagtaactcttccttttttgtttaaatggtaaatatgcctggggagatgggacttataagaaatcatagcagaaatcctcatgctaaatgtttttcttttccttcttttctgggagatcattaatcagctatcctattttcctattttacgatttctccttctccagcccaattatgttttctacaaagctagtgtctgggatactaactcttaactcattcaagcaagcttctcggctatatcattcaataaa

SEQ ID NO: 34999 - DNA, 1077 bp, Homo sapiens
cggggagagcgcgcatgcctggtccggtggagggagggtgccgggcgtcacaggtcctgacagggaagaagttggcaggtcctggcaggggacgagctgcggcggtggcacctccgggtgtggaaggctccagtgagatggagtcgcgagtcgcggacgctgggaccggcgagaccgcgcgagcagcgggcgggagtccggcagttggctgcaccactcgggggcccgtagtctcggcgcccctgggagccgcccggtggaagctcctgcggcaggttctgaagcaaaaacacctggatgattgcctgcgacatgtatctgtaagaagatttgaatcatttaatctgttttcagtaacagaaggcaaagaaagggaaactgaagaggaggttggtgcatgggtccaatatacaagcatcttctgtcctgaatacagtatctccttaaggcataatagtggatccttgaatgttgaagatgtccttaccagctttgacaatacaggaaatgtttaaaggtttaagactttggaatgatactcacctgcatttgacttctggctctgaaattcatcttgagcaatttgtatcatctctatgaacctcaactgttttcatctcttagggctggctgtgttataaagaaagtaacttttcattgcttgaatttcttcgaatgttgtgggaagaaattaagaggaatctcgtacagaatgaatcacgtctgcgtattgatttattgctgtgtgatatacgacccaaccttctttttatatatttatatttactatggtggaaaacaaaccattttgaaagtgcttacctttaactaggaatagccagtatcttcgagaaagcgtatttttgaaacatacttatttgagttaaaattgtgaaatgcatttaaaaattgaaattgaaagtagaactactggagaagttttaaatatttattggaacagaaagagcaatctccacaagtgtttattaagttcctattatgtgctgtcctgcattttcaattctcaaatgatttatcaactttgaagtacaaagtagtaaaacattctttctacac

SEQ ID NO: 35000 - DNA, 990 bp, Homo sapiens
cggggagagcgcgcatgcctggtccggtggagggagggtgccgggcgtcacaggtcctgacagggaagaagttggcaggtcctggcaggggacgagctgcggcggtggcacctccgggtgtggaaggctccagtgagatggagtcgcgagtcgcggacgctgggaccggcgagaccgcgcgagcagcgggcgggagtccggcagttggctgcaccactcgggggcccgtagtctcggcgcccctgggagccgcccggtggaagctcctgcggcaggttctgaagcaaaaacacctggatgattgcctgcgacatgtatctgtaagaagatttgaatcatttaatctgttttcagtaacagaaggcaaagaaagggaaactgaagaggaggttggtgcatgggtccaatatacaagcatcttctgtcctgaatacagtatctccttaaggcataatagtggatccttgaatgttgaagatgtccttaccagctttgacaatacaggaaatgtttacacagggtctcactctgttgcccaggctggagtgcagtggtgatcataactcagtgcagcctcaaactcctgaactgctcatatatttaagaaacacttcgtggcagaagattatgatactcttgcttatttattggcttaaggattaaggatccccaaagtctcagacttcagtaagtaagcctatgtcctacatgatgtctgtaaactccactccctcttagacttacatcctagaacaaagacatagggggcttcttcaactgtggccatacatttttgtcccagacccagcttcattgtgttaaaagtcttggtgttatgtgaagagtgtctttatccatccttccgtcattcagtgtagagttctaggatttttgaaataggatagattcattctgacctgcctgaattgaaagtcatattaaaatgtgggcagggaatcgggaagggaaatgtggagaaaaggaatgtgt

SEQ ID NO: 35001 - DNA, 860 bp, Homo sapiens
cggggagagcgcgcatgcctggtccggtggagggagggtgccgggcgtcacaggtcctgacagggaagaagttggcaggtcctggcaggggacgagctgcggcggtggcacctccgggtgtggaaggctccagtgagatggagtcgcgagtcgcggacgctgggaccggcgagaccgcgcgagcagcgggcgggagtccggcagttggctgcaccactcgggggcccgtagtctcggcgcccctgggagccgcccggtggaagctcctgcggcaggttctgaagcaaaaacacctggatgattgcctgcgacatgtatctgtaagaagatttgaatcatttaatctgttttcagtaacagaaggcaaagaaagggaaactgaagaggaggttggtgcatgggtccaatatacaagcatcttctgtcctgaatacagtatctccttaaggcataatagtggatccttgaatgttgaagatgtccttaccagctttgacaatacaggaaatgtttgggaagcaaccaggggaaaatgaagatatcaccatcagtagtaactcttccttttttgtttaaatggtaaatatgcctggggagatgggacttataagaaaagatgttttggccaaggcatcctacctctgcttgtcttcatgatcttcattacaatcatagcagaaatcctcatgctaaatgtttttcttttccttcttttctgggagatcattaatcagctatcctattttcctattttacgatttctccttctccagcccaattatgttttctacaaagctagtgtctgggatactaactcttaactcattcaagcaagcttctcggctatatcattcaataaa

SEQ ID NO: 35002 - DNA, 1776 bp, Homo sapiens
cggggagagcgcgcatgcctggtccggtggagggagggtgccgggcgtcacaggtcctgacagggaagaagttggcaggtcctggcaggggacgagctgcggcggtggcacctccgggtgtggaaggctccagtgagatggagtcgcgagtcgcggacgctgggaccggcgagaccgcgcgagcagcgggcgggagtccggcagttggctgcaccactcgggggcccgtagtctcggcgcccctgggagccgcccggtggaagctcctgcggcaggttctgaagcaaaaacacctggatgattgcctgcgacatgtatctgtaagaagatttgaatcatttaatctgttttcagtaacagaaggcaaagaaagggaaactgaagaggaggttggtgcatgggtccaatatacaagcatcttctgtcctgaatacagtatctccttaaggcataatagtggatccttgaatgttgaagatgtccttaccagctttgacaatacaggaaatgtttacacagggtctcactctgttgcccaggctggagtgcagtggtgatcataactcagtgcagcctcaaactcctgaactgctcatatatttaagaaacacttcgtggcagaagattatgatactcttgcttatttattggcttaaggattaaggatccccaaagtctcagacttcagcatctggccatctgaagaggttttggcttactactgcctcaagcacaataatatattcagggcccttgctgtgtgtgagctagggggtggcatgacatgcttggctgggctcatggttgctatttctgcagatgtcaaagaagttctgttaactgatgggaatgaaaaggccatcagaaatgtgcaagacatcatcacaaggaatcagaaggctggtgtgtttaagacccagaaaatatcaagctgcgttttacgatgggataatgagacagatgtctctcaactggaaggacattttgacattgttatgtgtgctgactgcctgtttctggaccagtacagagccagccttgttgatgcaataaagagattactccagcccagggggaaagcgatggtatttgccccacgccgagggaatactttaaaccagttttgcaatctagctgaaaaagctggtttctgtatccaaagacatgaaaattatgatgaacacatttcaaacttccactccaagttgaaaaaggaaaacccggacatatatgaagaaaaccttcattacccgcttctgcttattttgaccaaacatggatagaagattaagcttctcaaagacgaagaaacgtatcaagtgcatagggaatatttttacaaaaacggaaatctgtaaggggtataatcgcctgcctgcgccctttgcagcatttcacgtgtgggctatggactccacctgtcctcacccacgttattccccagctgccctctccagctccctccccgcctctttttacactctgcttgttgctcgtcctgccctaaacctttgtttgtctttaaatgtgtataagctgcctgtctgtgacttgaatttgactggtgaacaaactaaatatttttccctgtaattgagacagaatttcttttgatgatacccatccctccttcattttttttttttttttggtctttgttctgttttggtggtggtagtttttaatcagtaaacccagcaaatatcatgattctttcctggttagaaaaataaataaagtgtatctttttatctccctccaattaattgtattaaa

SEQ ID NO: 35003 - DNA, 1874 bp, Homo sapiens
cggggagagcgcgcatgcctggtccggtggagggagggtgccgggcgtcacaggtcctgacagggaagaagttggcaggtcctggcaggggacgagctgcggcggtggcacctccgggtgtggaaggctccagtgagatggagtcgcgagtcgcggacgctgggaccggcgagaccgcgcgagcagcgggcgggagtccggcagttggctgcaccactcgggggcccgtagtctcggcgcccctgggagccgcccggtggaagctcctgcggcaggttctgaagcaaaaacacctggatgattgcctgcgacatgtatctgtaagaagatttgaatcatttaatctgttttcagtaacagaaggcaaagaaagggaaactgaagaggaggttggtgcatgggtccaatatacaagcatcttctgtcctgaatacagtatctccttaaggcataatagtggatccttgaatgttgaagatgtccttaccagctttgacaatacaggaaatgtttgtcttcatcctcatcatcttaccattgaataggctgaggtgaaggaggcggaaaaggaggagtttgtcttgctgtcagaggcggaagaaaatccatgtacacagggtctcactctgttgcccaggctggagtgcagtggtgatcataactcagtgcagcctcaaactcctgaactgctcatatatttaagaaacacttcgtggcagaagattatgatactcttgcttatttattggcttaaggattaaggatccccaaagtctcagacttcagcatctggccatctgaagaggttttggcttactactgcctcaagcacaataatatattcagggcccttgctgtgtgtgagctagggggtggcatgacatgcttggctgggctcatggttgctatttctgcagatgtcaaagaagttctgttaactgatgggaatgaaaaggccatcagaaatgtgcaagacatcatcacaaggaatcagaaggctggtgtgtttaagacccagaaaatatcaagctgcgttttacgatgggataatgagacagatgtctctcaactggaaggacattttgacattgttatgtgtgctgactgcctgtttctggaccagtacagagccagccttgttgatgcaataaagagattactccagcccagggggaaagcgatggtatttgccccacgccgagggaatactttaaaccagttttgcaatctagctgaaaaagctggtttctgtatccaaagacatgaaaattatgatgaacacatttcaaacttccactccaagttgaaaaaggaaaacccggacatatatgaagaaaaccttcattacccgcttctgcttattttgaccaaacatggatagaagattaagcttctcaaagacgaagaaacgtatcaagtgcatagggaatatttttacaaaaacggaaatctgtaaggggtataatcgcctgcctgcgccctttgcagcatttcacgtgtgggctatggactccacctgtcctcacccacgttattccccagctgccctctccagctccctccccgcctctttttacactctgcttgttgctcgtcctgccctaaacctttgtttgtctttaaatgtgtataagctgcctgtctgtgacttgaatttgactggtgaacaaactaaatatttttccctgtaattgagacagaatttcttttgatgatacccatccctccttcattttttttttttttttggtctttgttctgttttggtggtggtagtttttaatcagtaaacccagcaaatatcatgattctttcctggttagaaaaataaataaagtgtatctttttatctccctccaattaattgtattaaa

SEQ ID NO: 35004 - DNA, 1184 bp, Homo sapiens
cggggagagcgcgcatgcctggtccggtggagggagggtgccgggcgtcacaggtcctgacagggaagaagttggcaggtcctggcaggggacgagctgcggcggtggcacctccgggtgtggaaggctccagtgagatggagtcgcgagtcgcggacgctgggaccggcgagaccgcgcgagcagcgggcgggagtccggcagttggctgcaccactcgggggcccgtagtctcggcgcccctgggagccgcccggtggaagctcctgcggcaggttctgaagcaaaaacacctggatgattgcctgcgacatgtatctgtaagaagatttgaatcatttaatctgttttcagtaacagaaggcaaagaaagggaaactgaagaggaggttggtgcatgggtccaatatacaagcatcttctgtcctgaatacagtatctccttaaggcataatagtggatccttgaatgttgaagatgtccttaccagctttgacaatacaggaaatgtttgtcttcatcctcatcatcttaccattgaataggctgaggtgaaggaggcggaaaaggaggagtttgtcttgctgtcagaggcggaagaaaatccatgtacacagggtctcactctgttgcccaggctggagtgcagtggtgatcataactcagtgcagcctcaaactcctgaactgctcatatatttaagaaacacttcgtggcagaagattatgatactcttgcttatttattggcttaaggattaaggatccccaaagtctcagacttcagcatctggccatctgaagaggttttggcttactactgcctcaagcacaataatatattcaggtacagagctgcacttaagatattttttagcccatcacggatattgaatcaacatattaaaaattgccatgattatattcttcaaattaaattgttagaaaaaaatataagaaaagaaaaacaggaagaaaaggaaaacagaaagaggggaaaaagttcacagtgaacacatgttgcttctcaagtgaaatctgaattgccttgggtactaatattgcacagcaaggtttttgctatatgtcaaaggcttttgatttccactcaaggcattttatttcactttgatttgggggaaacaaaagtgaagctccaatcaatccttactgattgtgaaggtc

SEQ ID NO: 35005 - DNA, 1088 bp, Homo sapiens
cggggagagcgcgcatgcctggtccggtggagggagggtgccgggcgtcacaggtcctgacagggaagaagttggcaggtcctggcaggggacgagctgcggcggtggcacctccgggtgtggaaggctccagtgagatggagtcgcgagtcgcggacgctgggaccggcgagaccgcgcgagcagcgggcgggagtccggcagttggctgcaccactcgggggcccgtagtctcggcgcccctgggagccgcccggtggaagctcctgcggcaggttctgaagcaaaaacacctggatgattgcctgcgacatgtatctgtaagaagatttgaatcatttaatctgttttcagtaacagaaggcaaagaaagggaaactgaagaggaggttggtgcatgggtccaatatacaagcatcttctgtcctgaatacagtatctccttaaggcataatagtggatccttgaatgttgaagatgtccttaccagctttgacaatacaggaaatgtttgtcttcatcctcatcatcttaccattgaataggctgaggtgaaggaggcggaaaaggaggagtttgtcttgctgtcagaggcggaagaaaatccatgtacacagggtctcactctgttgcccaggctggagtgcagtggtgatcataactcagtgcagcctcaaactcctgaactgctcatatatttaagaaacacttcgtggcagaagattatgatactcttgcttatttattggcttaaggattaaggatccccaaagtctcagacttcagtaagtaagcctatgtcctacatgatgtctgtaaactccactccctcttagacttacatcctagaacaaagacatagggggcttcttcaactgtggccatacatttttgtcccagacccagcttcattgtgttaaaagtcttggtgttatgtgaagagtgtctttatccatccttccgtcattcagtgtagagttctaggatttttgaaataggatagattcattctgacctgcctgaattgaaagtcatattaaaatgtgggcagggaatcgggaagggaaatgtggagaaaaggaatgtgt

SEQ ID NO: 35006 - DNA, 704 bp, Homo sapiens
cggggagagcgcgcatgcctggtccggtggagggagggtgccgggcgtcacaggtcctgacagggaagaagttggcaggtcctggcaggggacgagctgcggcggtggcacctccgggtgtggaaggctccagtgagatggagtcgcgagtcgcggacgctgggaccggcgagaccgcgcgagcagcgggcgggagtccggcagttggctgcaccactcgggggcccgtagtctcggcgcccctgggagccgcccggtggaagctcctgcggcaggttctgaagcaaaaacacctggatgattgcctgcgacatgtatctgtaagaagatttgaatcatttaatctgttttcagtaacagaaggcaaagaaagggaaactgaagaggaggttggtgcatgggtccaatatacaagcatcttctgtcctgaatacagtatctccttaaggcataatagtggatccttgaatgttgaagatgtccttaccagctttgacaatacaggaaatgtttaaaggtttaagactttggaatgatactcacctgcatttgacttctggctctgaaattcatcttgagcaatttgtatcatctctatgaacctcaactgttttcatctcttagggctggctgtgttataaagaaagtacgtacatactgcatggctgagagttgatatgcaataaaagttattaattattact

SEQ ID NO: 35007 - DNA, 660 bp, Homo sapiens
aactatagattctagaagcaccaggagaagtgatgcccttgtgctcctctcactctccattagattagagggtcaccctgagagtcaacactggaacctctgttaaagctgcttcagaaaaaccaagtatctttacaactattctaagcagcacaagttggttgtgaattatagttaacaccatctttccttgtttcaaatctcatgttagtgcatctgattagttaaaccaaaatcacatctgaaactttggctgctaaggattccaggaaatacagcttctagctttccaactctataaaatagaaagtaacagaaggcaaagaaagggaaactgaagaggaggttggtgcatgggtccaatatacaagcatcttctgtcctgaatacagtatctccttaaggcataatagtggatccttgaatgttgaagatgtccttaccagctttgacaatacaggaaatgtttaaaggtttaagactttggaatgatactcacctgcatttgacttctggctctgaaattcatcttgagcaatttgtatcatctctatgaacctcaactgttttcatctcttagggctggctgtgttataaagaaagtacgtacatactgcatggctgagagttgatatgcaataaaagttattaattattact

SEQ ID NO: 35008 - DNA, 840 bp, Homo sapiens
cggggagagcgcgcatgcctggtccggtggagggagggtgccgggcgtcacaggtcctgacagggaagaagttggcaggtcctggcaggggacgagctgcggcggtggcacctccgggtgtggaaggctccagtgagatggagtcgcgagtcgcggacgctgggaccggcgagaccgcgcgagcagcgggcgggagtccggcagttggctgcaccactcgggggcccgtagtctcggcgcccctgggagccgcccggtggaagctcctgcggcaggttctgaagcaaaaacacctggatgattgcctgcgacatgtatctgtaagaagatttgaatcatttaatctgttttcagtaacagaaggcaaagaaagggaaactgaagaggaggttggtgcatgggtccaatatacaagcatcttctgtcctgaatacagtatctccttaaggcataatagtggatccttgaatgttgaagatgtccttaccagctttgacaatacaggaaatgtttacacagggtctcactctgttgcccaggctggagtgcagtggtgatcataactcagtgcagcctcaaactcctgaactgctcatatatttaagaaacacttcgtggcagaagattatgatactcttgcttatttattggcttaaggattaaggatccccaaagtctcagacttcatcagttaccaagatctattgaccatctatccactcttttctgaaccaaaggcatactctaaaagcttgcagtgactggatgagtcaaattctgtcacttcctctttacaagttgttttgtaatgattaaaccagtgatacattgtatcataca

SEQ ID NO: 35009 - DNA, 925 bp, Homo sapiens
ggttcatggttattaaacatctttttcttgtcttcgtagagaggtttgggggtgagtgaaatgcctgtagatgtgagtgttggtctccatgtttatctgccacatttgtagaaaggtgtgtgtgtgtgcgtgtgtatgtgcatgcgtgtgtgtgtgcattcatacatccactcttacctcggcacccagaggatatgcatctactgttagctgtttgggatatttacttttcatctttttcatttagtcatttaagaatacttacaaatagtgcacagacactctctcattagatttaatgagtattgatttatttctctccactgaattagtgctgtaatgaattttttttaagccaggtatggtggctcatgcctgtagtcccagctactcggaggctgaggcgggaggattgcctgggcctgggagtcagaggctgcagtgagccaggagcaagcctgtgaatagccactgcagtgcagtgggcagtgtggaatagaccccatttcaattaaacaacaaaaaaataacaacagataaaaccaagaaaaaaaagagaaacgcttttttccattgatgatggttttagagcgtggagcctcttggttcctgtgtcggcttcctgaagggttgtaccagttgtcgtgggacggttgctgatggccatgtccttcctgtcattcttagtgaagtggagcagtggccacgagctcatgagcccacacgtgtctccccgtgggaatgcatgattgctgaagtgtctgcgcagacctgtgtgcatgcccgtgtctatgcccggcccgggcacagcagatgtggtctggcctcctggcggatgacaacctggccatctagcggccttggcttattttgctaggatctgcctcattggctttgtcatctgcctgggcatattggcactcga

SEQ ID NO: 35010 - DNA, 2144 bp, Homo sapiens
ggcacgagggcgtcaccgaccggtgcggacaggaagaggctctgggctggcacatgtgtatggcggtgaggcgggcgggtacatggcgggctctgtgggactggcgttgtgcgggcagacgttggtggtgcggggcggcagccgattcctggccacctccatagcaagcagtgatgatgacagcctcttcatctatgactgcagtgctgcagaaaagaagtcacaagaaaataaaggggaggacgcgcccttggaccaggggagcggtgcgattctggcgtccaccttctccaagtctggcagctattttgctttaaccgatgacagtaagcgtctgattcttttccgtacaaaaccatggcaatgtctgagtgtcaggaccgtggcaaggaggtgtacagccctgactttcatagcctcggaggagaaggtcttggtggccgacaagtctggagacgtctactccttttcggtgctggagccacacgggtgtggccgtctagagctggggcacctgtctatgctgttagatgtggctgtgagtcctgatgaccgcttcatcctcactgccgaccgggacgagaagatccgagtcagctgggccgcggcgccccatagcatcgagtccttctgcttggggcacacagagtttgtgagccgtatctccgtggtgccaactcagcccgggctgcttctgtcctcctctggggacggcaccctgaggctctgggagtacaggagcggccgccagctgcactgctgtcacctggccagtctgcaggagctggtggacccccaggccccccagaagtttgccgcgtccaggattgcattctggtgccaggagaactgcgtggcgctcctgtgcgacggcactcctgtggtctacatcttccagctggacgcccgcagacagcagttggtgtacaggcagcagctggcgttccagcaccaagtgtgggacgtggctttcgaggagacccaggggctgtgggtgctccaggactgccaggaagcccccctggtgctctacaggcctgtgggcgaccagtggcagtctgttcctgagagcaccgtgttaaagaaagtctctggtgttcttcgtgggaactgggccatgctggaaggctctgccggcgcagacgccagcttcagcagtctctacaaggccacgttcgacaacgtgacctcctacctgaagaagaaagaggagagactgcagcagcagctagagaagaagcagcggcgccggagtcccccgcctgggcccgacgggcatgccaagaagatgagaccgggggaggcgacgctaagttgctgatcgtggcggtcagtggtgtctctcacctcaaattaggaaaagctttttaacttgttcccctgcatcctggcatgtcccttcaagaaggaaaaggtgacatcagttgtgaccagctcagaggatggggctgtcccctgggctctagaaagaacattctgtgtcaccagcacaggctcttgctgggtgcctgtgccccctttctggttgaagggaagccagaccagtggagtggaagctcttgaagcactttcttttcatgtcggaggctgcgtgtgagccggtggtggcggcagctgtctgtgtttctcctgttctcataccgcccttcgtgtccgctgcatcttcctctaggagcatctgtgggctgacgtttctggcatggtggatgttttcatgttgttccgccgtctcagcatccaggtgacgtgctgtcccgcagtagctgctcgccacacaggctgttgaaactcagcacgaatgcttgagcctgccccagccccagccgtagcccttgtgctcaggagctgctcctggagagtggctcccttgtgggaagtgagaaacacgtttcggagtcgcagggagctctgtctggcatcggtggcacagatggtgaacttgtttcaggaagtgtgagcacgggcctggctggcacccggtttacagggaggtgattgaggacgtcgttatgatttgatttgaccttggcacacactgcagagccacagggatgttgctgaatttcaatcaccgatcagcaaggatgaaccttctcaacttcctaggaatgtttagcagcaacctaatataccaggcaaaactc

SEQ ID NO: 35011 - DNA, 501 bp, Homo sapiens
tcactccttcaatttaatctgctctcttccgttatttttttagtttctatgtattttacttttaggacattccttggactttgttctacctctttaattgatgaagaaaatttggtcattgtatctggttttttttttgagacagagtgacggtctcaaaaaaaaaaaaaaaaaaaaaaagcacaccagtgtcttccatttctcttttaatcataatcatgctttaaaaaataccctcgagcatatggagcaaatttaagataattgttccttttctgctaattcattattactgtcatatctaggtctgtttctgtcgactgtggaccacttatgtgcgatccgtggaccacttgcgtgcgatctgtcggccgacgatgagcttgttcggatgtagctccatcgtaagtcgaggagcatctgtgatttgtcctctgcttatgggatatgtttttccgctactgagtctgtgtagtaaatttttgactaggaaaaaagtga

SEQ ID NO: 35012 - DNA, 664 bp, Homo sapiens
tcactccttcaatttaatctgctctcttccgttatttttttagtttctatgtattttacttttaggacattccttggactttgttctacctctttaattgatgaagaaaatttggtcattgtatctggttttttttttgagacagagcaagaatctgtcttaaaaaaaaaaaaaattagccaggtgtggtggcacatgcctgtagtcccagctgctcgggaggctgaggcgggaggatcacttgagcctgggagtttgaggctgcagcaagccgtgattgcactactgcattccagcctgggtgacagagtgacggtctcaaaaaaaaaaaaaaaaaaaaaaagcacaccagtgtcttccatttctcttttaatcataatcatgctttaaaaaataccctcgagcatatggagcaaatttaagataattgttccttttctgctaattcattattactgtcatatctaggtctgtttctgtcgactgtggaccacttatgtgcgatccgtggaccacttgcgtgcgatctgtcggccgacgatgagcttgttcggatgtagctccatcgtaagtcgaggagcatctgtgatttgtcctctgcttatgggatatgtttttccgctactgagtctgtgtagtaaatttttgactaggaaaaaagtga

SEQ ID NO: 35013 - DNA, 1525 bp, Homo sapiens
ggcacgagggcgtcaccgaccggtgcggacaggaagaggctctgggctggcacatgtgtatggcggtgaggcgggcgggtacatggcgggctctgtgggactggcgttgtgcgggcagacgttggtggtgcggggcggcagccgattcctggccacctccatagcaagcagtgatgatgacagcctcttcatctatgactgcagtgctgcagaaaagaagtcacaagaaaataaaggggaggacgcgcccttggaccaggggagcggtgcgattctggcgtccaccttctccaagtctggcagctattttgctttaaccgatgacagtaagcgtctgattcttttccgtacaaaaccatggcaatgtctgagtgtcaggaccgtggcaaggaggtgtacagccctgactttcatagcctcggaggagaaggtcttggtggccgacaagtctggagacgtctactccttttcggtgctggagccacacgggtgtggccgtctagagctggggcacctgtctatgctgttagatgtggctgtgagtcctgatgaccgcttcatcctcactgccgaccgggacgagaagatccgagtcagctgggccgcggcgccccatagcatcgagtccttctgcttggggcacacagagtttgtgagccgtatctccgtggtgccaactcagcccgggctgcttctgtcctcctctggggacggcaccctgaggctctgggagtacaggagcggccgccagctgcactgctgtcacctggccagtctgcaggagctggtggacccccaggccccccagaagtttgccgcgtccaggattgcattctggtgccaggagaactgcgtggcgctcctgtgcgacggcactcctgtggtctacatcttccagctggacgcccgcagacagcagttggtgtacaggcagcagctggcgttccagcaccaagtgtgggacgtggctttcgaggagacccaggggctgtgggtgctccaggactgccaggaagcccccctggtgctctacaggcctgtgggcgaccagtggcagtctgttcctgagagcaccgtgttaaagaaagtctctggtgttcttcgtgggaactgggccatgctggaaggctctgccggcgcagacgccagcttcagcagtctctacaaggccacgttcgacaacgtgacctcctacctgaagaagaaagaggagagactgcagcagcagctagagaagaagcagcggcgccggagtcccccgcctgggcccgacgggcatgccaagaagatgagaccgggggaggcgacgctaagttgctgatcgtggcggtctgtttctgtcgactgtggaccacttatgtgcgatccgtggaccacttgcgtgcgatctgtcggccgacgatgagcttgttcggatgtagctccatcgtaagtcgaggagcatctgtgatttgtcctctgcttatgggatatgtttttccgctactgagtctgtgtagtaaatttttgactaggaaaaaagtga

SEQ ID NO: 35014 - DNA, 1255 bp, Homo sapiens
ggcacgagggcgtcaccgaccggtgcggacaggaagaggctctgggctggcacatgtgtatggcggtgaggcgggcgggtacatggcgggctctgtgggactggcgttgtgcgggcagacgttggtggtgcggggcggcagccgattcctggccacctccatagcaagcagtgatgatgacagcctcttcatctatgactgcagtgctgcagaaaagaagtcacaagaaaataaaggggaggacgcgcccttggaccaggggagcggtgcgattctggcgtccaccttctccaagtctggcagctattttgctttaaccgatgacagtaagcgtctgattcttttccgtacaaaaccatggcaatgtctgagtgtcaggtttgtgagccgtatctccgtggtgccaactcagcccgggctgcttctgtcctcctctggggacggcaccctgaggctctgggagtacaggagcggccgccagctgcactgctgtcacctggccagtctgcaggagctggtggacccccaggccccccagaagtttgccgcgtccaggattgcattctggtgccaggagaactgcgtggcgctcctgtgcgacggcactcctgtggtctacatcttccagctggacgcccgcagacagcagttggtgtacaggcagcagctggcgttccagcaccaagtgtgggacgtggctttcgaggagacccaggggctgtgggtgctccaggactgccaggaagcccccctggtgctctacaggcctgtgggcgaccagtggcagtctgttcctgagagcaccgtgttaaagaaagtctctggtgttcttcgtgggaactgggccatgctggaaggctctgccggcgcagacgccagcttcagcagtctctacaaggccacgttcgacaacgtgacctcctacctgaagaagaaagaggagagactgcagcagcagctagagaagaagcagcggcgccggagtcccccgcctgggcccgacgggcatgccaagaagatgagaccgggggaggcgacgctaagttgctgatcgtggcggtctgtttctgtcgactgtggaccacttatgtgcgatccgtggaccacttgcgtgcgatctgtcggccgacgatgagcttgttcggatgtagctccatcgtaagtcgaggagcatctgtgatttgtcctctgcttatgggatatgtttttccgctactgagtctgtgtagtaaatttttgactaggaaaaaagtga

SEQ ID NO: 35015 - DNA, 862 bp, Homo sapiens
ggcacgagggcgtcaccgaccggtgcggacaggaagaggctctgggctggcacatgtgtatggcggtgaggcgggcgggtacatggcgggctctgtgggactggcgttgtgcgggcagacgttggtggtgcggggcggcagccgattcctggccacctccatagcaagcagtgatgatgacagcctcttcatctatgactgcagtgctgcagaaaagaagtcacaagaaaataaaggggaggacgcgcccttggaccaggggagcggtgcgattctggcgtccaccttctccaagtctggcagctattttgctttaaccgatgacagtaagcgtctgattcttttccgtacaaaaccatggcaatgtctgagtgtcaggaccgtggcaaggaggtgtacagccctgactttcatagcctcggaggagaaggtcttggtggccgacaagtctggagacgtctactccttttcggtgctggagccacacgggtgtggccgtctagagctggggcacctgtctatgctgttagatgtggctgtgagtcctgatgaccgcttcatcctcactgccgaccgggacgagaagatccgagtcagctgggccgcggcgccccatagcatcgagtccttctgcttggggcacacagaatggtgaacttgtttcaggaagtgtgagcacgggcctggctggcacccggtttacagggaggtgattgaggacgtcgttatgatttgatttgaccttggcacacactgcagagccacagggatgttgctgaatttcaatcaccgatcagcaaggatgaaccttctcaacttcctaggaatgtttagcagcaacctaatataccaggcaaaactc

SEQ ID NO: 35016 - DNA, 2639 bp, Homo sapiens
ggttcatggttattaaacatctttttcttgtcttcgtagagaggtttgggggtgagtgaaatgcctgtagatgtgagtgttggtctccatgtttatctgccacatttgtagaaaggtgtgtgtgtgtgcgtgtgtatgtgcatgcgtgtgtgtgtgcattcatacatccactcttacctcggcacccagaggatatgcatctactgttagctgtttgggatatttacttttcatctttttcatttagtcatttaagaatacttacaaatagtgcacagacactctctcattagatttaatgagtattgatttatttctctccactgaattagtgctgtaatgaattttttttaagccaggtatggtggtcatggtgcagtagtggctttctccgggcgtgcaagcagagagtgctggcggggtggaggcccagccttggtgccctggtttccattacattctttcatctttgccccgttctgttagtagccagtcctcaggtccagccagggtgtgggtcccaggaggtgggcaccgtggggagccgtcccagaaggcgccccccacggtccaccgaggactctgggagtcacgaggtaactccctgctgcagggggcccgctgtggtggccgagtcccatgttcctgccccacctggcacctgtccttgttcccccatcacaggctctgccggcgcagacgccagcttcagcagtctctacaaggccacgttcgacaacgtgacctcctacctgaagaagaaagaggagagactgcagcagcagctagagaagaagcagcggcgccggagtcccccgcctgggcccgacgggcatgccaagaagatgagaccgggggaggcgacgctaagttgctgatcgtggcggtcagtggtgtctctcacctcaaattaggaaaagctttttaacttgttcccctgcatcctggcatgtcccttcaagaaggaaaaggtgacatcagttgtgaccagctcagaggatggggctgtcccctgggctctagaaagaacattctgtgtcaccagcacaggctcttgctgggtgcctgtgccccctttctggttgaagggaagccagaccagtggagtggaagctcttgaagcactttcttttcatgtcggaggctgcgtgtgagccggtggtggcggcagctgtctgtgtttctcctgttctcataccgcccttcgtgtccgctgcatcttcctctaggagcatctgtgggctgacgtttctggcatggtggatgttttcatgttgttccgccgtctcagcatccaggtgacgtgctgtcccgcagtagctgctcgccacacaggctgttgaaactcagcacgaatgcttgagcctgccccagccccagccgtagcccttgtgctcaggagctgctcctggagagtggctcccttgtgggaagtgagaaacacgtttcggagtcgcagggagctctgtctggcatcggtggcacagatggtgaacttgtttcaggaagtgtgagcacgggcctggctggcacccggtttacagggaggtgattgaggacgtcgttatgatttgatttgaccttggcacacactgcagagccacagggatgttgctgaatttcaatcaccgatcagcaaggatgaaccttctcaacttcctaggaatgtttagcagcaacctaatataccaggcaaaactccttggtgcctgcgctgtgtgtgtgtgaggtgcgcggtgtgattgtgcgctgtgtgtgtgtgaggtgcacgctgcgtgatcgtgtgctgtgtgagtgaggtacgcacctcacaagcaaacacagcgcacgatcacgcggcgcgcaacgaagcgccgctgggtctgggtgcccggaggcagcagcgttcgggagttccgcccgctggccccgatcaccatgtcggctttcgaaacaacccttcgggacccagtggatgtaaaccccttcaggatccctctgtgacccagctgacaacgcccgagggcggctggcggaattcaaccctttctcagagacaaatgcagcgaccacaagtccgtgagaccaactcctgggtctcacagcagcggtctccagcatagtgaaccaacccagcagaccccaaggcccggagtctgcagccaggagccgtgtccggcacaggaaggactggacgggaagctgcgaacttggagcgcgagggagcgggatcgtgcagcacacttgtgagccaacttgacgtgtgaacgatgaacaaagtgggcccctgctgcctcgtggtgccctgcgaggccctgttctatcaggattctgcagagaatcctggcgataccagggggcaaagctcaaaataggcccaaggaacctgaggaagtagcaatccaggaaccaagagtcggcgacacatggctggaagggccgaggacacgataccgcgggaaaacagtccaaagggcagttggacctagggcacctcccgaacacgtgagaagtgaaattacagaccacgtagacacaccctgtgggtgagcagacgcgcaacactagtaggcgcacatgaacaggagcaaggcagacactactgaacgggaaaaacatacactgccagtagcatcgaaggaacacggggccccaagagg

SEQ ID NO: 35017 - DNA, 1047 bp, Homo sapiens
acccaggctgaagtgcagtggtgtgatctcagctcacagcagcctcaacctcccaggctcaagcagtcctcccaccttggcctcccagagtgctgggattacaggcacgagccattatgcccagcccgtctttcttcattttgattacagtgtgcgtactgtacatccgagaagtgcatgtgaaatgctggaactgggatttcagcaactgaatgcacgtgtgtgactacccacgagaagcaggacacttagcacctgctgagaagcccccacgcccatgttcccttctaggcactgcacatgcatgctggccggcctgacctcagtttccctcttgctgtggccgcttctgctccactctctgtgaggctcatccaccttgttgcctgtggttgtggattgttcattctcagtgctctgtatgccaagtactccattgtgtgaaaatcccacagcacgttcattctattatcaatgggcatttgggtagtttccacagtttggctgttaggaatagtgcagtgatgaacatgctggcacctgtcttctgttttttttttatttttagagacagggtcttgctctgttacccaggctggagtgcagtggtgtgaccttggctcgctgggcctgggagtttgaggctgcagcaagccgtgattgcactactgcattccagcctgggtgacagagtgacggtctcaaaaaaaaaaaaaaaaaaaaaaagcacaccagtgtcttccatttctcttttaatcataatcatgctttaaaaaataccctcgagcatatggagcaaatttaagataattgttccttttctgctaattcattattactgtcatatctaggtctgtttctgtcgactgtggaccacttatgtgcgatccgtggaccacttgcgtgcgatctgtcggccgacgatgagcttgttcggatgtagctccatcgtaagtcgaggagcatctgtgatttgtcctctgcttatgggatatgtttttccgctactgagtctgtgtagtaaatttttgactaggaaaaaagtga

SEQ ID NO: 35018 - DNA, 771 bp, Homo sapiens
actcccaaagtgctgggattataggtgtcagccactgcacccaatctattgtatttaattctaagcactttcttccagacggtctcactctgtcacccaggctgaagtgcagtggtgtgatctcagctcacagcagcctcaacctcccaggctcaagcagtcctcccaccttggcctcccagagtgctgggattacaggcacgagccattatgcccagcccgtctttcttcattttgattacagtgtgcgtactgtacatccgagaagtgcatgtgaaatgctggaactgggatttcagcaactgaatgcacgtgtgtgactacccacgagaagcaggacacttagcacctgctgagaagcccccacgcccatgttcccttctaggcactgcacatgcatgctggccggcctgacctcagtttccctcttgctgtggccgcttctgctccactctctgtgaggctcatccaccttgttgcctgtggttgtggattgttcattctcagtgctctgtatgccaagtactccattgtgtgaaaatcccacagcacgttcattctattatcaatgggcatttgggtagtttccacagtttggctgttaggaatagtgcagtgatgaacatgctggcacctgtcttctgttttttttttatttttagagacagggtcttgctctgttacccaggctggagtgcagtggtgtgaccttggctcgctgggcctcctgggctcaagcgatcctcccacctcagtctcctgagtagctgg

SEQ ID NO: 35019 - DNA, 1986 bp, Homo sapiens
ggcacgagggcgtcaccgaccggtgcggacaggaagaggctctgggctggcacatgtgtatggcgtgatgatgacagcctcttcatctatgactgcagtgctgcagaaaagaagtcacaagaaaataaaggggaggacgcgcccttggaccaggggagcggtgcgattctggcgtccaccttctccaagtctggcagctattttgctttaaccgatgacagaccgtggcaaggaggtgtacagccctgactttcatagcctcggaggagaaggtcttggtggccgacaagtctggagacgtctactccttttcggtgctggagccacacgggtgtggccgtctagagctggggcacctgtctatgctgttagatgtggctgtgagtcctgatgaccgcttcatcctcactgccgaccgggacgagaagatccgagtcagctgggccgcggcgccccatagcatcgagtccttctgcttggggcacacagagtttgtgagccgtatctccgtggtgccaactcagcccgggctgcttctgtcctcctctggggacggcaccctgaggctctgggagtacaggagcggccgccagctgcactgctgtcacctggccagtctgcaggagctggtggacccccaggccccccagaagtttgccgcgtccaggattgcattctggtgccaggagaactgcgtggcgctcctgtgcgacggcactcctgtggtctacatcttccagctggacgcccgcagacagcagttggtgtacaggcagcagctggcgttccagcaccaagtgtgggacgtggctttcgaggagacccaggggctgtgggtgctccaggactgccaggaagcccccctggtgctctacaggcctgtgggcgaccagtggcagtctgttcctgagagcaccgtgttaaagaaagtctctggtgttcttcgtgggaactgggccatgctggaaggctctgccggcgcagacgccagcttcagcagtctctacaaggccacgttcgacaacgtgacctcctacctgaagaagaaagaggagagactgcagcagcagctagagaagaagcagcggcgccggagtcccccgcctgggcccgacgggcatgccaagaagatgagaccgggggaggcgacgctaagttgctgatcgtggcggtcagtggtgtctctcacctcaaattaggaaaagctttttaacttgttcccctgcatcctggcatgtcccttcaagaaggaaaaggtgacatcagttgtgaccagctcagaggatggggctgtcccctgggctctagaaagaacattctgtgtcaccagcacaggctcttgctgggtgcctgtgccccctttctggttgaagggaagccagaccagtggagtggaagctcttgaagcactttcttttcatgtcggaggctgcgtgtgagccggtggtggcggcagctgtctgtgtttctcctgttctcataccgcccttcgtgtccgctgcatcttcctctaggagcatctgtgggctgacgtttctggcatggtggatgttttcatgttgttccgccgtctcagcatccaggtgacgtgctgtcccgcagtagctgctcgccacacaggctgttgaaactcagcacgaatgcttgagcctgccccagccccagccgtagcccttgtgctcaggagctgctcctggagagtggctcccttgtgggaagtgagaaacacgtttcggagtcgcagggagctctgtctggcatcggtggcacagatggtgaacttgtttcaggaagtgtgagcacgggcctggctggcacccggtttacagggaggtgattgaggacgtcgttatgatttgatttgaccttggcacacactgcagagccacagggatgttgctgaatttcaatcaccgatcagcaaggatgaaccttctcaacttcctaggaatgtttagcagcaacctaatataccaggcaaaactc

SEQ ID NO: 35020 - DNA, 3082 bp, Homo sapiens
ggcacgagggcgtcaccgaccggtgcggacaggaagaggctctgggctggcacatgtgtatggcggtgaggcgggcgggtacatggcgggctctgtgggactggcgttgtgcgggcagacgttggtggtgcggggcggcagccgattcctggccacctccatagcaagcagtgatgatgacagcctcttcatctatgactgcagtgctgcagaaaagaagtcacaagaaaataaaggggaggacgcgcccttggaccaggggagcggtgcgattctggcgtccaccttctccaagtctggcagctattttgctttaaccgatgacagtaagcgtctgattcttttccgtacaaaaccatggcaatgtctgagtgtcaggaccgtggcaaggaggtgtacagccctgactttcatagcctcggaggagaaggtcttggtggccgacaagtctggagacgtctactccttttcggtgctggagccacacgggtgtggccgtctagagctggggcacctgtctatgctgttagatgtggctgtgagtcctgatgaccgcttcatcctcactgccgaccgggacgagaagatccgagtcagctgggccgcggcgccccatagcatcgagtccttctgcttggggcacacagagtttgtgagccgtatctccgtggtgccaactcagcccgggctgcttctgtcctcctctggggacggcaccctgaggctctgggagtacaggagcggccgccagctgcactgctgtcacctggccagtctgcaggagctggtggacccccaggccccccagaagtttgccgcgtccaggattgcattctggtgccaggagaactgcgtggcgctcctgtgcgacggcactcctgtggtctacatcttccagctggacgcccgcagacagcagttggtgtacaggcagcagctggcgttccagcaccaagtgtgggacgtggctttcgaggagacccaggggctgtgggtgctccaggactgccaggaagcccccctggtgctctacaggcctgtgggcgaccagtggcagtctgttcctgagagcaccgtgttaaagaaagtctctggtgttcttcgtgggaactgggccatgctggaaggctctgccggcgcagacgccagcttcagcagtctctacaaggccacgttcgacaacgtgacctcctacctgaagaagaaagaggagagactgcagcagcagctagagaagaagcagcggcgccggagtcccccgcctgggcccgacgggcatgccaagaagatgagaccgggggaggcgacgctaagttgctgatcgtggcggtcagtggtgtctctcacctcaaattaggaaaagctttttaacttgttcccctgcatcctggcatgtcccttcaagaaggaaaaggtgacatcagttgtgaccagctcagaggatggggctgtcccctgggctctagaaagaacattctgtgtcaccagcacaggctcttgctgggtgcctgtgccccctttctggttgaagggaagccagaccagtggagtggaagctcttgaagcactttcttttcatgtcggaggctgcgtgtgagccggtggtggcggcagctgtctgtgtttctcctgttctcataccgcccttcgtgtccgctgcatcttcctctaggagcatctgtgggctgacgtttctggcatggtggatgttttcatgttgttccgccgtctcagcatccaggtgacgtgctgtcccgcagtagctgctcgccacacaggctgttgaaactcagcacgaatgcttgagcctgccccagccccagccgtagcccttgtgctcaggagctgctcctggagagtggctcccttgtgggaagtgagaaacacgtttcggagtcgcagggagctctgtctggcatcggtggcacagatggtgaacttgtttcaggaagtgtgagcacgggcctggctggcacccggtttacagggaggtgattgaggacgtcgttatgatttgatttgaccttggcacacactgcagagccacagggatgttgctgaatttcaatcaccgatcagcaaggatgaaccttctcaacttcctaggaatgtttagcagcaacctaatataccaggcaaaactccttggtgcctgcgctgtgtgtgtgtgaggtgcgcggtgtgattgtgcgctgtgtgtgtgtgaggtgcacgctgcgtgatcgtgtgctgtgtgagtgaggtacgcacctcacaagcaaacacagcgcacgatcacgcggcgcgcaacgaagcgccgctgggtctgggtgcccggaggcagcagcgttcgggagttccgcccgctggccccgatcaccatgtcggctttcgaaacaacccttcgggacccagtggatgtaaaccccttcaggatccctctgtgacccagctgacaacgcccgagggcggctggcggaattcaaccctttctcagagacaaatgcagcgaccacaagtccgtgagaccaactcctgggtctcacagcagcggtctccagcatagtgaaccaacccagcagaccccaaggcccggagtctgcagccaggagccgtgtccggcacaggaaggactggacgggaagctgcgaacttggagcgcgagggagcgggatcgtgcagcacacttgtgagccaacttgacgtgtgaacgatgaacaaagtgggcccctgctgcctcgtggtgccctgcgaggccctgttctatcaggattctgcagagaatcctggcgataccagggggcaaagctcaaaataggcccaaggaacctgaggaagtagcaatccaggaaccaagagtcggcgacacatggctggaagggccgaggacacgataccgcgggaaaacagtccaaagggcagttggacctagggcacctcccgaacacgtgagaagtgaaattacagaccacgtagacacaccctgtgggtgagcagacgcgcaacactagtaggcgcacatgaacaggagcaaggcagacactactgaacgggaaaaacatacactgccagtagcatcgaaggaacacggggccccaagagg

SEQ ID NO: 35021 - DNA, 1426 bp, Homo sapiens
ggcacgagggcgtcaccgaccggtgcggacaggaagaggctctgggctggcacatgtgtatggcggtgaggcgggcgggtacatggcgggctctgtgggactggcgttgtgcgggcagacgttggtggtgcggggcggcagccgattcctggccacctccatagcaagcagtgatgatgacagcctcttcatctatgactgcagtgctgcagaaaagaagtcacaagaaaataaaggggaggacgcgcccttggaccaggggagcggtgcgattctggcgtccaccttctccaagtctggcagctattttgctttaaccgatgacagtaagcgtctgattcttttccgtacaaaaccatggcaatgtctgagtgtcaggaccgtggcaaggaggtgtacagccctgactttcatagcctcggaggagaaggtcttggtggccgacaagtctggagacgtctactccttttcggtgctggagccacacgggtgtggccgtctagagctggggcacctgtctatgctgttagatgtggctgtgagtcctgatgaccgcttcatcctcactgccgaccgggacgagaagatccgagtcagctgggccgcggcgccccatagcatcgagtccttctgcttggggcacacagagtttgtgagccgtatctccgtggtgccaactcagcccgggctgcttctgtcctcctctgggaagtttgccgcgtccaggattgcattctggtgccaggagaactgcgtggcgctcctgtgcgacggcactcctgtggtctacatcttccagctggacgcccgcagacagcagttggtgtacaggcagcagctggcgttccagcaccaagtgtgggacgtggctttcgaggagacccaggggctgtgggtgctccaggactgccaggaagcccccctggtgctctacaggcctgtgggcgaccagtggcagtctgttcctgagagcaccgtgttaaagaaagtctctggtgttcttcgtgggaactgggccatgctggaaggctctgccggcgcagacgccagcttcagcagtctctacaaggccacgttcgacaacgtgacctcctacctgaagaagaaagaggagagactgcagcagcagctagagaagaagcagcggcgccggagtcccccgcctgggcccgacgggcatgccaagaagatgagaccgggggaggcgacgctaagttgctgatcgtggcggtctgtttctgtcgactgtggaccacttatgtgcgatccgtggaccacttgcgtgcgatctgtcggccgacgatgagcttgttcggatgtagctccatcgtaagtcgaggagcatctgtgatttgtcctctgcttatgggatatgtttttccgctactgagtctgtgtagtaaatttttgactaggaaaaaagtga

SEQ ID NO: 35022 - DNA, 284 bp, Homo sapiens
gttagcattgcttaatttttttggcaccaccttcagcagctggaaaacagagcatatggccaggtaccggtgcctgccaccgcccacgtggcctgccaggctgtcgaggaccctgcgctgctcctggaagctaatgggggtgtctttctggccttctaggaccgtggcaaggaggtgtacagccctgactttcatagcctcggaggagaaggtcttggtggccgacaagtctggagacgtctactccttttcggtgctggagccacacgggtgtggccgtctag

SEQ ID NO: 35023 - DNA, 398 bp, Homo sapiens
accggcgagggctgcaccgtctggggtgctggctgcagagcggagcccgtgggcctgcagtcctagtaatcatgctctctttcttcgtggcaagcactcctgtggtctacatcttccagctggacgcccgcagacagcagttggtgtacaggcagcagctggcgttccagcaccaagtgtgggacgtggctttcgaggagacccaggggctgtgggtgctccaggactgccaggaagcccccctggtgctctacaggcctgtgggcgaccagtggcaggtgagactcggcaccttccagatgtcctatgccctgcctttccataagcctgggggtgtggggcggcagctatgttttttgggtccatgggtaagcctctttcaactcagccacttctgg

SEQ ID NO: 35024 - DNA, 1509 bp, Homo sapiens
attgtttttccctaatcttccgtcaagtacacaaagtaactttgcgggatatttagggtactattcattcactcttcctgcgtagaagatatggaagaacgaggtttatattttcatgtggtactactgaagaaggtgcattgatacatttttaaatgtaagttgagaaaaatttataagccaaaggttcagaaaattaaactacagaatattaaatattataatgtgcccaaagctctgaatagttaaaaattaaatatttattttcttccccaagctttaggtaaggagaagaggggtcaagagttaaacttagagaccctttgtctctgagaagcatccttctaagacattctgttggagttccctcagtactattccttacaactggagtgggtagaagccttatgaaaattatactgacaacctgatctcgtttactccatgttaatcacattcctaccaacctaaatttctgccaagtcagttctctttggaggaagcccattactccataactgactggatggtccagtgtcattttgatctgcttttcagaatggaaatttataatataaatatatgttttaataccacaaacactgtggggcacttgatatttattagtggtgtatatggtccactggtttcaggccaaatctagaatttagtgatactggctcagaagaatttaagttctattcagctttcctgggtgttagaacctagattcaaaatggcttgtctttgctacttttgttccacattctctctctttacctttgccctaccttctgtttgtaaggatgattttaatattaattccaggaacacatgtttttatttcctctgctggaataggagaaagcttaatatattcccaagctgaatgttcttgaattatatctgcatttaccactgtatatgcatatagtgacagtataacctgtctatactacagtagttccagtcctaactttctgaattatttttaaagatcttctctaacaagctatgggaatttggcttcatactctttctttgcaacagcagtgttctgggtgataattttgaattgatacctgttcctttttctgggttttgttggctttttgaaaaattgtctttccttatcattggtgggaggcttggtagcaaagtaacattttttggaaaagaggacagaaaaattgaactacagcttgagaacgtattctttttttcctacttgttatgcaattgaggaatcacttttaactgttttaggtggtgtgttgtccagagtgagcaggattatgttttggatgtcaagaggatgcttagtcttaataaaattaattttaaaagcaaaaaaaaaaaaaaaaaaaaaaaaattttgggggctcgggccgaaaagttttaaaccttgtgggggcggggcccaggtaagaattggctaccggcccagggaatcgggtagaatgtgggttccacaaaacgcgggacaggtgaaacacagggtgggcacgc

SEQ ID NO: 35025 - DNA, 1210 bp, Homo sapiens
attgtttttccctaatcttccgtcaagtacacaaagtaactttgcgggatatttagggtactattcattcactcttcctgcgtagaagatatggaagaacgaggtttatattttcatgtggtactactgaagaaggtgcattgatacatttttaaatgtaagttgagaaaaatttataagccaaaggttcagaaaattaaactacagaatattaaatattataatgtgcccaaagctctgaatagttaaaaattaaatatttattttcttccccaagctttaggtaaggagaagaggggtcaagagttaaacttagagaccctttgtctctgagaagcatccttctaagacattctgttggagttccctcagtactattccttacaactggagtgggtagaagccttatgaaaattatactgacaacctgatctcgtttactccatgttaatcacattcctaccaacctaaatttctgccaagtcagttctctttggaggaagcccattactccataactgactggatggtccagtgtcattttgatctgcttttcagaatggaaatttataatataaatatatgttttaataccacaaacactgtggggcacttgatatttattagtggtgtatatggtccactggtttcaggccaaatctagaatttagtgatactggctcagaagaatttaagttctattcagctttcctgggtgttagaacctagattcaaaatggcttgtctttgctacttttgttccacattctctctctttacctttgccctaccttctgtttgtaaggatgattttaatattaattccaggaacacatgtttttatttcctctgctggaataggagaaagcttaatatattcccaagctgaatgttcttgaattatatctgcatttaccactgtatatgcatatagtgacagtataacctgtctatactacagtagttccagtcctaactttctgaattatttttaaagatcttctctaacaagctatgggaatttggcttcatactctttctttgcaacagcagtgttctgggtgataattttgaattgatacctgttcctttttctgggttttgttggctttttgacgactcctcggtccttctctttcctcggtgtcatcacgacccccggtcatagctgtgtcccgagtacaacacgacccccagtcatccctgctcc

SEQ ID NO: 35026 - DNA, 1389 bp, Homo sapiens
attgtttttccctaatcttccgtcaagtacacaaagtaactttgcgggatatttagggtactattcattcactcttcctgcgtagaagatatggaagaacgaggtttatattttcatgtggtactactgaagaaggtgcattgatacatttttaaatctttaggtaaggagaagaggggtcaagagttaaacttagagaccctttgtctctgagaagcatccttctaagacattctgttggagttccctcagtactattccttacaactggagtgggtagaagccttatgaaaattatactgacaacctgatctcgtttactccatgttaatcacattcctaccaacctaaatttctgccaagtcagttctctttggaggaagcccattactccataactgactggatggtccagtgtcattttgatctgcttttcagaatggaaatttataatataaatatatgttttaataccacaaacactgtggggcacttgatatttattagtggtgtatatggtccactggtttcaggccaaatctagaatttagtgatactggctcagaagaatttaagttctattcagctttcctgggtgttagaacctagattcaaaatggcttgtctttgctacttttgttccacattctctctctttacctttgccctaccttctgtttgtaaggatgattttaatattaattccaggaacacatgtttttatttcctctgctggaataggagaaagcttaatatattcccaagctgaatgttcttgaattatatctgcatttaccactgtatatgcatatagtgacagtataacctgtctatactacagtagttccagtcctaactttctgaattatttttaaagatcttctctaacaagctatgggaatttggcttcatactctttctttgcaacagcagtgttctgggtgataattttgaattgatacctgttcctttttctgggttttgttggctttttgaaaaattgtctttccttatcattggtgggaggcttggtagcaaagtaacattttttggaaaagaggacagaaaaattgaactacagcttgagaacgtattctttttttcctacttgttatgcaattgaggaatcacttttaactgttttaggtggtgtgttgtccagagtgagcaggattatgttttggatgtcaagaggatgcttagtcttaataaaattaattttaaaagcaaaaaaaaaaaaaaaaaaaaaaaaattttgggggctcgggccgaaaagttttaaaccttgtgggggcggggcccaggtaagaattggctaccggcccagggaatcgggtagaatgtgggttccacaaaacgcgggacaggtgaaacacagggtgggcacgc

SEQ ID NO: 35027 - DNA, 1455 bp, Homo sapiens
attgtttttccctaatcttccgtcaagtacacaaagtaactttgcgggatatttagggtactattcattcactcttcctgcgtagaagatatggaagaacgaggtttatattttcatgtggtactactgaagaaggtgcattgatacatttttaaatgtaagttgagaaaaatttataagccaaaggttcagaaaattaaactacagaatattaaatattataatgtgcccaaagctctgaatagttaaaaattaaatatttattttcttccccaagctttaggtaaggagaagaggggtcaagagttaaacttagagaccctttgtctctgagaagcatccttctaagacattctgttggagttccctcagtactattccttacaactggagtgggtagaagccttatgaaaattatactgacaacctgatctcgtttactccatgttaatcacattcctaccaacctaaatttctgccaagtcagttctctttggaggaagcccattactccataactgactggatggtccagtgtcattttgatctgcttttcagaatggaaatttataatataaatatatgttttaataccacaaacactgtggggcacttgatatttattagtggtgtatatggtccactggtttcaggccaaatctagaatttagtgatactggctcagaagaatttaagttctattcagctttcctgggtgttagaacctagattcctaccttctgtttgtaaggatgattttaatattaattccaggaacacatgtttttatttcctctgctggaataggagaaagcttaatatattcccaagctgaatgttcttgaattatatctgcatttaccactgtatatgcatatagtgacagtataacctgtctatactacagtagttccagtcctaactttctgaattatttttaaagatcttctctaacaagctatgggaatttggcttcatactctttctttgcaacagcagtgttctgggtgataattttgaattgatacctgttcctttttctgggttttgttggctttttgaaaaattgtctttccttatcattggtgggaggcttggtagcaaagtaacattttttggaaaagaggacagaaaaattgaactacagcttgagaacgtattctttttttcctacttgttatgcaattgaggaatcacttttaactgttttaggtggtgtgttgtccagagtgagcaggattatgttttggatgtcaagaggatgcttagtcttaataaaattaattttaaaagcaaaaaaaaaaaaaaaaaaaaaaaaattttgggggctcgggccgaaaagttttaaaccttgtgggggcggggcccaggtaagaattggctaccggcccagggaatcgggtagaatgtgggttccacaaaacgcgggacaggtgaaacacagggtgggcacgc

SEQ ID NO: 35028 - DNA, 596 bp, Homo sapiens
attgtttttccctaatcttccgtcaagtacacaaagtaactttgcgggatatttagggtactattcattcactcttcctgcgtagaagatatggaagaacgaggtttatattttcatgtggtactactgaagaaggtgcattgatacatttttaaatgtaagttgagaaaaatttataagccaaaggttcagaaaattaaactacagaatattaaatattataatgtgcccaaagctctgaatagttaaaaattaaatatttattttcttccccaagctttaggtaaggagaagaggggtcaagagttaaacttagagaccctttgtctctgagaagcatccttctaagacattctgttggagttccctcagtactattccttacaactggagtgggtagaagccttatgaaaattatactgacaacctgatctcgtttactccatgttaatcacattcctaccaacctaaatttctgccaagtcagttctctttggaggaagcccattactccataactgactggatggtccagtgtcattttgatctgcttttcagaatggaaatttataatataaatatatgttttaatacca

SEQ ID NO: 35029 - DNA, 425 bp, Homo sapiens
tacaactcttgaaaaacgtaaagccattcccagtcctatggtttatcaaactctgttgtcagtgactgctttcacacattaaaggcagagttgagtagttgtgacaagatactatatggcctgcaaagcctaaaatatttattaattgaccgtttatagaaaaagtttcccaaatcctggtctaggtaaccactctggacccaattacttttactggtttattttttactctttgtcttttcaaactatgttttcttccccattttaatgtctgatattaacagtgacaactttgttgaaataggttatttgctttcataatattgatttgtatgagtcctagtatcagccagtaatcaaaactgttggttatttagttgataagctgtttggcaatttcttttgtttagcagatattaatagaa

SEQ ID NO: 35030 - DNA, 1362 bp, Homo sapiens
atttacaaactcttgattggtgttagttgtgtagggcacgtgtccagaatgacaatttcatgaccagaagggtaatggaaaccatctttgagatgcatgcaaaatgccaggagatcccagcctgtgagatctgcatgaaaagtaactggatgatgaataagaggggagaaatgcattccagagcattgctgtcagtttcaagtattcaagcctggatgctgcaggaccttaatgaaattcccctgctctctgagatccatgtagctatcatgcccatgggcttctgtgggctttcctccataaaatggtgccataatgtcacaatgcctaaagtatggggatttgcctcagattcttctcctacttggtggaacaggtgcaggagctttgtaaaggtgttatgttttaggatgtgcttgcataataatacaaatagttacgtggtgtaaatttgaatcattgtaaaagacgtcttggtaagagaaactgccatttctcatatattgctggtagaaaattagagttttagtattttaaagaagtagactggaaaatgtagtaacagtaataattttcataaactttggctgagcattcttactcctatgagtctacctcccataaatagaagcagcagcatatgatatgtgtacaaaaatgtttattgtgacaatgtttgcagtaacaaaaaaaaaatggaattgagcgattaccatcaagaggtgggatctatgagtgaattgtgttccatatggtattgctgactgaaaaagaaaagctcaagaaaagcacatatatgtcttttttggaaaataataacaaaaaagtgtgcatatttgtctgtatcgtatgtgcacgtacatatcattcaatgaaagcagagaagactagtttgtcaaaatgtgttttcttttggggctgcaggtattgaggtcactaataggagtttgaggaggaaagaaggagaaggactttagaagaagaatatatatacatgtttatttatgtacatatttgtatgtatgcattgaaagagagagagaggcagacagggaaaaaaagaaaagagatatattaattttattagtaatttattaccccctcccaaattcacttaggggctcataaaaatcctggtcaatgtaggcatctttaatatttgcagagatgtagaaattctgtccagatatatgtagggaaaaatgggactgaaacacagattctgcatacatatcaccacttattagctgcattacgttgagtaagcctgtaacccctcagctcctcctcttccttagatgcaaaatggagaggacacttcctcccctgacacagctgggagaacccaatgagcttgtgttt

SEQ ID NO: 35031 - DNA, 364 bp, Homo sapiens
agcgaagtttgggttcctcagctatttagttttcaacacttggggagtagtcatttaggtaagtatttttaaggtactgtttgaggtgtctacatgagtgtgagtgtgcacaccacacctaaaatacagagagatgcctcttccacaaacttcagtttatcaaactgaaagttcttctcaactaatctgagaaccaacttgtaagaaaaaaagaatttctatttagtgttggtggccaactggaatattcttaacactaaaactcaattttacaaaactactgttttaaattcttcctcttagactcattgttttatgtttaatttctgatccaagagaattttcagcttcatttagcattttt

SEQ ID NO: 35032 - DNA, 756 bp, Homo sapiens
cacacttgtttggtaagttcctaaaaatacggctcggccacttctggggcttttgcatttagccacttttgttgcacttgccgcaggagccatctcgggagtgtacttgtttgcaggggttggttctcggcagcagccgcgaggttacttggtccagtgggcaggtcacagggcaaggagtagggaagatgcgatgcatttttttctggagggtgatctgtgtttgtaaacattttggcggaccagagggaagtccggccccgagtgctggtagactgtggaattcggctgtgtcctgaggccaccctagagaccccgcgccgcgtgagtgccggagcgctcggtggccgccgcgccgcgcgcctggagggatgctaacgtggagccggcgccgagtccgcccggcgtgcgtgcgtgtgtgggagcgcgcgagtcccctgacgcggggaccagttatgaatcgggggtgtgtgtttgcctccagagacctggcaaggtgcggagccctccagaagtgcggtcaagcggcagcggagacggcgagccaggaacctccccccgcgtccccagcttcccagcgtggcggcggaacccccggagaaagtttgcaaacttccagcgggcgcggcgaggacgccgggtcacctagggggcgggtgggcgcgcgcgcagggggctcgctctccccggtgcggagctgcagctgccacctctcccgccgggctgccggctgcagcgggtgggcgcgcgcccggg

SEQ ID NO: 35033 - DNA, 244 bp, Homo sapiens
ttggaggaaggtgggtggagagcctgctgcttgtttctcacaggtgtttgccacacaagagatcaaacttctgtttcctgttgagattggtttccatctctctccattcatctctgacactccctatctctcttaattatgtcttatactgacgtctataaccctgctcagccctctccctccagaccccctcccagcagcaactgctgttagtagagctattaagaacacaggcctgtgatct

SEQ ID NO: 35034 - DNA, 1374 bp, Homo sapiens
  misc_feature (4)..(4): n is a, c, g, or t
  misc_feature (912)..(912): n is a, c, g, or t
  misc_feature (915)..(915): n is a, c, g, or t
tggncagtttgatttcctgtaaactgaaaaggatatctaaaggctggattcaattctggttaaacattttgggcaagaatactttgtggttgatactgtgttcctcattttcgttacacaagggggcacataatatctggtttttccactgttagtgatgttaagtattgttccttgaataaggtggtaacagccagaactctccattgtgaagttagtttttgccctcatgactagtaagtaaactgtgaagtcatgctttggcgccactgtgaatgttcagttacccattgcccttttgcctaagattttagcatgcgttgatgattataaccctaatgaaatattccattcaagtgacaaaatggtgatttccccaattctatcattttctttacacttatcagttatcattcttccataaagaagaggtttcccttaggaactggggccatttggctccccttctggaagggcaatatgtatccttgattctttctctccagttaatgatttcagaatgagggattcatgttatggtcacctccaataacatcaaatgaaccttttaggaggaagattctatcttgtgagtactatattggactcatgaattattatattttcaaatatgcccacatcaattaccttacttttttaaacttattattttgagataattatagattcgtgtgaagttgtaagaaataatacagagagaacccatgtaccttttacgcagttttccctagtgggagcattttgaaaaactgtagtacaatatcacaaggatattgatgttgatgatgtcaagatgccgagtatttccgttactgtaggatctctcatgttgcccttttatttatcattctttttgatgctttgactgtccaaactttggccagtagaaangcnttcaagattcctgtgtctttttcacataatcccatgctgtttgatttcatgctttctggcagtacaaggtgtctcagagttgcccgtgctttctgcctgagacctggaatccactatttcttcaaggagcctttcctagttcgtggcatttccaaagaaaagtccaagggctaggggtactcagtgccactcagttgtcattgatcctgggctcttgcaatgcacaaaatggaaatgtttatatatttcaaattaattaaaatatcttcaactgatggggaagatcaaaattaacattatataacattcccagatttttacttaacattaatttcaaacttttgtctcttgctctgcaaatcttttttcctaacatacttatttgctttatgctatgctatacataaaaaagtttcaaaatatgattattacggcttacaataaagtcactgaatcaat

SEQ ID NO: 35035 - DNA, 458 bp, Homo sapiens
acttgaggtggggagtttgagaccagcccagccaacttggggaaaccccacctctactgaaaaaaatacaaaaattagctgggcgtcatggtgcatgcctgtagtcccagccacttgggaggctgaggcacgagaatcgcttgaacccaggaggcagaggttgtagtgagccgagatcacatcagcacactctagcctgggtgacagagcgagactgactcaaaaaataaataaaataaatatcacttacattagatatacccaaggggtggtctatagagacttggaagcagtggttattgcaacaggggcacggaagtcatctgctatgccaggatgcccaggggatactcggggtgggtggcatggtggtgctggggactcaccgcacaggacgctctgattgacgcactgccaggagtagcgctctgtcttggggctgcagccggcctcctcag

SEQ ID NO: 35036 - DNA, 265 bp, Homo sapiens
gggcacatctttgggatgtgggaggaaaccagaggaaccaaggaaaactcagacatggggaaagagtgtaaactacacagacaggggccccagccaggaatcaattttttctcatcaatgttataattgaaatgatgttactggaggccctgctctacttaactcccccaagaaccctaaaagtctcaatcccaatacatcactggctcataatggatcttgccatgtaaattgggtccagatgtggatgaggttcctcagatat

SEQ ID NO: 35037 - DNA, 130 bp, Homo sapiens
aatttttttatacatggagaatctttaaaaacggaggctttctgcttaggtactctccagattggcactccaattttgccaaatgctcctagtatctgttactctgactgaaataaatataccatgaata

SEQ ID NO: 35038 - DNA, 364 bp, Homo sapiens
tattactattatcttatttactgatattgttattgttattatcattttactgcaactggatgtctgtgaagaatacaatgagtactagaagagctgccaatgtctaggtttgtgtgaaggtgccagaattcatactctatattgcttttgcaccattagtgcaaatgtcaacacaagagaaatgcaaattattggtattacggatcatgctttgagaacacagctgcatagtaatatttgaaaacacaaatataacattgttagacagtagcagaaatgtagatatgtcagagaaaaataagtatttaaggaccaggtgaggatataaatgcttcggctatctggggcagtgaggtcggtattg

SEQ ID NO: 35039 - DNA, 409 bp, Homo sapiens
ggggctcggggcctgccagaggttcaggacctgccggggactcagggcctgctggaagttcaggacctgctggggatcagggcctgccagggatttagggtctgctgggcgggccaccttttggcctctccctcatgcttgaggccatcagtgtttcctactaatttcccattttaagcctgagaagtgacaagagagggtaaagacccagcctctgctctgtcccatgagaaatactgagggacgtgcccccatcaggcctatgcggtcatttgctgggcttcgttatacgccaaggcctgtaggcctgagaagagggagagacttcagggggcggagcggagaggaaaagcttctagtaagaatcttttcagattttcaccaggcgcggtggcttttcaccgggcac

SEQ ID NO: 35040 - DNA, 777 bp, Homo sapiens
aagactgatcaaagaaggaaggagaaagggcaggagagaggaatagccaatatcagaaaggaaaacaggtaagttacttcagattatgcagacatttaaaatatttaagagccagcctggataacatggtgaaaccctcctgtctctacacacacacacacaaattagctgagcatggtggtgtgtgcctgtagtcccagctactggagaggctaaggtaggaggattacctgagcccaggaggtagaggctgcagtgagctgtggtcatggcaccacactccagcctgggcaatggagtgagagaccgtgtctcaaaaatatgtatacatatttaagagaatattatgaataccaataaattttaaatctagttgaaatgatctttattgcagtgataggtgtatacatatgtctaatcaaattgtacactttattacatatgtgcagttttatatattaagtatgcctcattaaagttgtttttagattttgcataaaatgaacaaattctttaaaaaaaaaaaaaaactctccaaaactgacatgaaacgatcctgaacattggaatcatcctatatctagcgcatacattgagtccataattacaatctgccacaggaaatttacagaccaagatggcttcagtagtgaatttaaccaaacatttaagagtgaaataatgccagttttagacagtctcccagaaaatagaaaaaccttctaatttgttttatgaaaacagcttaaccttagatataaagaatttgccaagaac

SEQ ID NO: 35041 - DNA, 294 bp, Homo sapiens
cagaagcatcatgtgatttttgaagtaatgtcttattttgatggatgttaacattaagatctatcagtgcaagtttatcatcctctgaatgtaacacttccaaatttcattttttcagatcgttttttggtggtttagttttagccagtgctgtttaaatggagaaaaaaagaaaagttcaccatagactacctcacgttgttacttaattgtgctaggtattcacgcagttcttttgcagcctggaatctgccatagcgcttctttgggttggcacactcatccagcaaggcc

SEQ ID NO: 35042 - DNA, 1248 bp, Homo sapiens
  misc_feature (379)..(379): n is a, c, g, or t
  misc_feature (665)..(665): n is a, c, g, or t
  misc_feature (967)..(967): n is a, c, g, or t
  misc_feature (1026)..(1026): n is a, c, g, or t
gtacagctgttaactattcgcttataaataatcttttttgcctctcaacctgtctcccaggtagtgtacctgtcaccattaataactctttagccgctccctagtgatttgacctatcagttgtcgttcacagaaaagtggtgctctggcctgctattgaagcttatgcaggttctttcagctcctcagtcaccccagcagccatatacttgtaggaagttgtgttggtgggcttcacaagcaggcagctgaacacttcgtacagtttgataaaggtggcattacattttgaacaatagatgataagactcccatttagaccgcaaaacagtgccacaggggtagacaggggtctgggggagataagatgggtggtgangatgaccaacagcaaataaactttcctgtctctttgatgctaattatctctttgcacctaattatcatggcatcatcatcatcctctgatgtttgcaaactaagagttgatgtgtttgatcaggttagtgaatctgtcaggtatggcattctgcctgtttctgaagcttaagaatgagaagccagtagctatcatgcggaagatgtgaactgccccccagtcctcgtcctttagcagtgtgtcattcctctgtttggacatgtgctctcttgcttcctctcttccnctctctgttcctgaagtgtgctgcttccaacacttccccagattaattcctacctgcatttaggtctcaacctagccatcactttttcaggaaactgctactgctctctctatttggcattgactgtaccaactaaaatgcccatatggcagttttcatttatttcttattatgctctacaataactgcttgtttacttgtctttttctcctactggattgtaagttttttcatggatggtacatagtgttgtttgctatatccacgttctgggagtgtcatagaatctcaataaatttatntgaagagaatgagaatttattttttatgaactcactttccattgacatatcatggtcanatcaatggggagttcaggcaataaattatggcatatattgtctactgtatactgtgctggcaccaggggttcagataggaaaacatttcgattgctttttacccttttagtgagtgactaatggacatttctttgtctgaggatatatcttggcagtacaggatttcttcagacgtggctcaggaaatggccgagagtaaggtgaatcacaaggcaaaaaaa

SEQ ID NO: 35043 - DNA, 360 bp, Homo sapiens
gccaccgcacctggactgatagatcataaatatttttaatgatagctcgttatgcgatttttggcatgtaatttggaaggtggtaaaaaaaattagtagtacaggaacagtccaggttgagtatcccttacttgaaatgcttaagaccggaagtgttttggattttggaatttttacgattttggaatatttgcattatgttaatatatacttagcagttgagcatccctaatctgaaatttgaagtctgaaatgctcccatgagcatttccttgcagtgtcatgtcagaactcaaaaagttttcagattttggaacatttctgattttgggttttcagattctcaaactgtagtaacag

SEQ ID NO: 35044 - DNA, 226 bp, Homo sapiens
cacaatgactaatttacattcccaccagcggcatgtgaatattcccttttctctgcaagctcaccagaatctgtttttgttttgttttgttttggttcttaagagccatttgcactggtgtgagatggtatctgattttgggtttgatttgcgtttccctaatgatgagtgatgttgagcattttctcatatgcttcttggccacatgtatgtctttttttgaaaa

SEQ ID NO: 35045 - DNA, 800 bp, Homo sapiens
ggtgcctctcttgaccagctaccctcccaggggaccatgaggaagctcagaggaaagacccccgcctgctcctgtctcacggagcccacagggtcacggagggcaatggagggtcattcgctctgctggggttgccttttgcactgaagatagagaccacctttttgagtgacttgagcccaaaggcaagcgtatatcaaacgatcttctccacataacctctctgtgccatcataagaatagctgcttccgcccccggatttgctcaggcctgggaatccgctgactgaaggcctcttgttgagtgccagctctaaacaagtccctttatgcagagccacagctgtgcatgctcagccctgccgaggtcccaggccaggctttgttgcttccgttcatggaagcgcacaggatggggccgacgctgtgccggtcgtggggaaatctcactggggaagagaaaagcccaagccttgttggttacgtcagccggtccatggcggtgtcctgcggaccccagagcccccgggaagggcgcaagtcaaagagcactggaggcaccgccggcgatggacgtccaggtcccggctcctgtgctggaaagcgttgatggggagcgtcggcgctgaccacacgcgggagctgcggaagcccagcggttcacacaggcctcccttcaacgtagtcatcccctggtggtggaagcaagacgacggcccctgacgtgcagccacacacagaaaaggctgctgtgaacattttatgcttcgactttttttttcttcagagacagggtgtcg

SEQ ID NO: 35046 - DNA, 481 bp, Homo sapiens
acatcagatgtgcttcaaagaacttgaatgttagttggggagacgagttatgtgatgttggataaaatgataatatatttcctttaattgttacctaggtggaaaaccagggcctccaagttcaggggaaggagaatcactttggactttaccagttaggactccactttcagaggagatagaatttaggccagtcagtgaagaatggaaagaaagagacatagcattttagcaagagggaattatacaggataattcaaaaggcatttatatttgactaggaagtacacattttacttggctatagaaatgtctaagcactaaaaatttcctaccactcagatgaagtgatatggagaccagctcagatgggagatagaaccctcacttttccaaatgactcagtacctccttatggctcactcttgcctttgaggcacaggcattttactgtttgcgaactaaagctctggatggcaaa

SEQ ID NO: 35047 - DNA, 296 bp, Homo sapiens
tggctcaggtcttacatcttccattcctgtcaaggtaactcctcctcatgttccagctcatatctgatatatcatcttttaaaaggatgtctgcctaaacctgtagaatgggcttaagagggcttcctgtttattctcatactgtgtacaatgaaaatctactcattgatttacttctctctcccacccaactttatgttcctttaacatagaaacttttaggcatcgaagaattcttttttttacatgacacataaactctcaatgattgttgaaggaatgaaatgaggagtatt

SEQ ID NO: 35048 - DNA, 316 bp, Homo sapiens
gctgaagtgacacagagcagccccatctcaggagccttcaagacacaatagcctcccgggagctctcagggtactcagtggcaacaagatgctccacctctgggctgcccctgccctcagcctgtgccgaccctgctagccccaagtcctgcccccagcacaggccaggtactcagcagggtcatcactgttctggaaatccccttgcagggcatagaaagttctcagcgaacacccatggagtaaaacaagaggcggccttcacccttaggtggattgtaatattttagcactaaatgcaaaaagttcttttatg

SEQ ID NO: 35049 - DNA, 198 bp, Homo sapiens
gtgattgatcgtttttttcctctttacacaaaagttttagtgtcaagaccagtcatgaaagttcaaacattatatggtgtaaagagtgtaggccggcgcggtggctcacgcctgtaatcccagcactttgggaggctgaggcgggtagatcacttgaggtcaggagtttgaggccagcctggtcaacatggtgaaacc

SEQ ID NO: 35050 - DNA, 402 bp, Homo sapiens
gtccatggttttcaggatacaaaatcagcatgcaaaaatcagttgtgtttctatacagcagcaacaaacaatccaaaagggaaaccaagaaaacagtcccatttacaatagcatcagaaataataaaatacttgggaataaacttaaccaaggaggcaaatgatctgtataatgaaaactacaaatattgctgaaagaaatcaaagaagacctaaagatactctatgctcatgattggaagacttaatattgttaaaatgttcattttatccaaagagatgtacaaattaaatgcaattcctatcaaaatcccaaagacatttttgtggaaataaaaatacaatcctaaaattcatgtggaaccataaagaaccccaaatagttcaaacaaccttgagaaag

SEQ ID NO: 35051 - DNA, 3457 bp, Homo sapiens
ccaaaggcagatgataaaggaagcttttgctggggatgatgtcatcagagatttcttgaaagagaagagggaagctgtggaggcgagtaagccaaaggacgtggacctgacactacctggctggggcgagtggggtggtgtgggcctaaagcccagtgccaagaaaagacgccagtttctcattaaagcccctgagggtcctccaagaaaagataagaatttgccaaatgtgattatcagtgagaagcgcaacatccacgcagcagctcatcaggtacaagtgcttccatatccatttacccaccatcggcaatttgaaaggaccatccagacccctataggatccacatggaacacccagagggctttccaaaagctgactactcccaaggtcgtcaccaagccaggccatatcattaagcccataaaagcagaggatgtgggctaccagtcttcctcaaggtcagacctgcctgtcatacagaggaatccaaaacgaatcaccacacgtcacaataaagaagaaaaactgtaggttgtgtagctggagaagtgacagtcaggggccctgattccacttcctttggtccagttttactctgctacagggtggattccaaaactggctcagcacattgcatgtagttgagccacattttttaaaaaaagaaaatggatgaccattaattgactagcattttagaattgatcagacattagaacacagaaaaattctagtacatttaaattctaaacaatacagtggatgacccttttgaatatacctaatgatttccttaaaaaagaaattttaaacagacttgtttaatcgtgttctcaaagcatacagtcaagaggtgggactgactgatgctttataggtgtgtgtagggtggtagaggccaaggtgctgccagcaatcctttccatactaggtactggtgaaaattgtttttgtttatgctgtcagcacatttgtgtgggtctctcattgtcccttaacagtgccgcatctcagcctggaagtcagctttaagtcattcaagagaacctcaggctgtttttctgacagtgatgatatgatatacagatacatccacagggtatctattaccagcataatgcattgtaagatggcaaggtggcattttgaaagagcgctgggcaagcagttagcacatctgggcctaccttcagcttcttcatttacaaacttctgaccttttgacactaaagctgctcctttatctttctgagtctcagattcttcatctgtaatctggagttgttaattccagtccttactaccttttagagttggaatgagatggaaagtagatgaaactactttgaaaattacgacagttaagggctgggtgcggtgtctcacacctgtaatcccagcactttgggaggccgagatgggtggatcatgaggtcagcagttgagaccagcctgaacaacatggtgaaaccctgtctgtactaaaaatacaaaaaaattagctgggcctggtggcaggcacctgtaatcccagctacttgggagactgaggcaggagaattgcttgaaactggaaggcagaggttgcagtgagccaagattgtgccactgcactctagcctgggcaataagcaaaactccatctcaaaaaagaaaaaaaggacaaaagaaaattatgagagttacttaaaggtaacatcacatactaaatgtcttctataatcctatatttattaatgcattacaactctgtagattgttagttactaggccagtagctaggaattggtataaatttaatgcaccttctatcctgaataactagcatggaaaagtgaatatatgtgtgagcagatatggctataaagacctatagcttttgcactttatgcatatataatcaatcctttctagttcagtgaattgaccccatccacaggctgattcatctttgtgttaaggggcaaatgaaacggtatattatttctttgcagtctcctctcagtcattcatcaatgtggccagcttatctactcccaattatgttgttgatacatctccaagccatctgtcatcagatcaaaaagcagcaaacagagggtcagtcacaggatgttctgacacaccattgtaactttttgttagagatgatcccatttagaaaaagactggtagaaattggagtgaaaggaaccctacagattagcccagttctctcttattttcagctttacagacaagaacaatttaaatctaaagaatttagtagattccttcagtgtcacaaagctgtttcatgaaagaatcaagattataacctggatattctgactcctggcccagtgctttttcttactttgtagctacactttgaagtaagattcaaactgttatccactcaattgccttattcctgaggatgtagtgaaggaagaaaaagttttctggaattccgtaaactatattttaagcttatttcttcaaaattattttcatatatcacagatatatcattggaagatataatttgcatatatgttcattatcagtgttcctaatttggtattacatgtattctatttttttctgaatgatagcatgaaaagtgtcaaagtggtttgtccgctagcgtctgtctgcagaactttcaggatgactattaattcctctcagatgtcatttttgagtggtccaagcctgctgttttgaacccacagcagtggagatttgtattcttatttacagttgtgtactataaagtgtgtgttacataggttttgtgtaataattatttgtaaatattatttagatttgtatttagacatgatttatatctaatatagatacaaagtctgtgtctaaatattatttaaagaagtgatttttcattctcttggattctttccagtgtggtgccttttatatgcctcacatagtctccttgttctcctactaatattcccaagctccatatgccaattaaagaagaaacaaaaataaaagtttgtcttgcttgtgaaacattaagaagaggctgtcaggtttaataaactttttaatgaatatttcagacataacaaaaaactgcagagcttcgtacacttgatttaaataattcttgagggattttataaggtcatcttatagacaaaattaagagacaccagtgtggttatcaatgctttcagaatacttgtgtttatgtaaatataccccagagtccaaaactctgatatattcatatatattcacaatgagaggatgtctgtgccaaatctgtcaatcagtacaatagaaaagttaattatataactacaacacgaaacacaaatttttagaagcaaattatgtcctgtaatttacccccctccccgctgctcctctgctaactcattttcctcttttcccactctaaatgtaaggcaacccttggctttggagaagcatctgttc

SEQ ID NO: 35052 - DNA, 2906 bp, Homo sapiens
ccaaaggcagatgataaaggaagcttttgctggggatgatgtcatcagagatttcttgaaagagaagagggaagctgtggaggcgagtaagccaaaggacgtggacctgacactacctggctggggcgagtggggtggtgtgggcctaaagcccagtgccaagaaaagacgccagtttctcattaaagcccctgagggtcctccaagaaaagataagaatttgccaaatgtgattatcagtgagaagcgcaacatccacgcagcagctcatcaggtacaagtgcttccatatccatttacccaccatcggcaatttgaaaggaccatccagacccctataggatccacatggaacacccagagggctttccaaaagctgactactcccaaggtcgtcaccaagccaggccatatcattaagcccataaaagcagaggatgtgggctaccagtcttcctcaaggtcagacctgcctgtcatacagaggaatccaaaacgaatcaccacacgtcacaataaagaagaaaaactgtaggttgtgtagctggagaagtgacagtcaggggccctgattccacttcctttggtccagttttactctgctacagggtggattccaaaactggctcagcacattgcatgtagttgagccacattttttaaaaaaagaaaatggatgaccattaattgactagcattttagaattgatcagacattagaacacagaaaaattctagtacatttaaattctaaacaatacagtggatgacccttttgaatatacctaatgatttccttaaaaaagaaattttaaacagacttgtttaatcgtgttctcaaagcatacagtcaagaggtgggactgactgatgctttataggtgtgtgtagggtggtagaggccaaggtgctgccagcaatcctttccatactaggtactggtgaaaattgtttttgtttatgctgtcagcacatttgtgtgggtctctcattgtcccttaacagtgccgcatctcagcctggaagtcagctttaagtcattcaagagaacctcaggctgtttttctgacagtgatgatatgatatacagatacatccacagggtatctattaccagcataatgcattgtaagatggcaaggtggcattttgaaagagcgctgggcaagcagttagcacatctgggcctaccttcagcttcttcatttacaaacttctgaccttttgacactaaagctgctcctttatctttctgagtctcagattcttcatctgtaatctggagttgttaattccagtccttactaccttttagagttggaatgagatggaaagtagatgaaactactttgaaaattacgacagttaagggctgggtgcggtgtctcacacctgtaatcccagcactttgggaggccgagatgggtggatcatgaggtcagcagttgagaccagcctgaacaacatggtgaaaccctgtctgtactaaaaatacaaaaaaattagctgggcctggtggcaggcacctgtaatcccagctacttgggagactgaggcaggagaattgcttgaaactggaaggcagaggttgcagtgagccaagattgtgccactgcactctagcctgggcaataagcaaaactccatctcaaaaaagaaaaaaaggacaaaagaaaattatgagagttacttaaaggtaacatcacatactaaatgtcttctataatcctatatttattaatgcattacaactctgtagattgttagttactaggccagtagctaggaattggtataaatttaatgcaccttctatcctgaataactagcatggaaaagtgaatatatgtgtgagcagatatggctataaagacctatagcttttgcactttatgcatatataatcaatcctttctagttcagtgaattgaccccatccacaggctgattcatctttgtgttaaggggcaaatgaaacggtatattatttctttgcagtctcctctcagtcattcatcaatgtggccagcttatctactcccaattatgttgttgatacatctccaagccatctgtcatcagatcaaaaagcagcaaacagagggtcagtcacaggatgttctgacacaccattgtaactttttgttagagatgatcccatttagaaaaagactggtagaaattggagtgaaaggaaccctacagattagcccagttctctcttattttcagctttacagacaagaacaatttaaatctaaagaatttagtagattccttcagtgtcacaaagctgtttcatgaaagaatcaagattataacctggatattctgactcctggcccagtgctttttcttactttgtagctacactttgaagtaagattcaaactgttatccactcaattgccttattcctgaggatgtagtgaaggaagaaaaagttttctggaattccgtaaactatattttaagcttatttcttcaaaattattttcatatatcacagatatatcattggaagatataatttgcatatatgttcattatcagtgttcctaatttggtattacatgtattctatttttttctgaatgatagcatgaaaagtgtcaaagtggtttgtccgctagcgtctgtctgcagaactttcaggatgactattaattcctctcagatgtcatttttgagtggtccaagcctgctgttttgaacccacagcagtggagatttgtattcttatttacagttgtgtactataaagtgtgtgttacataggttttgtgcaaacatcacttgccctcacgtgctaccctgtctcccaatatccctctattcccacaccttctccccaatatcatctcccacacttcttccacatctccttcacctgcctacaccccctc

SEQ ID NO: 35053 - DNA, 2913 bp, Homo sapiens
  misc_feature (2826)..(2826): n is a, c, g, or t
  misc_feature (2839)..(2839): n is a, c, g, or t
ccaaaggcagatgataaaggaagcttttgctggggatgatgtcatcagagatttcttgaaagagaagagggaagctgtggaggcgagtaagccaaaggacgtggacctgacactacctggctggggcgagtggggtggtgtgggcctaaagcccagtgccaagaaaagacgccagtttctcattaaagcccctgagggtcctccaagaaaagataagaatttgccaaatgtgattatcagtgagaagcgcaacatccacgcagcagctcatcaggtacaagtgcttccatatccatttacccaccatcggcaatttgaaaggaccatccagacccctataggatccacatggaacacccagagggctttccaaaagctgactactcccaaggtcgtcaccaagccaggccatatcattaagcccataaaagcagaggatgtgggctaccagtcttcctcaaggtcagacctgcctgtcatacagaggaatccaaaacgaatcaccacacgtcacaataaagaagaaaaactgtaggttgtgtagctggagaagtgacagtcaggggccctgattccacttcctttggtccagttttactctgctacagggtggattccaaaactggctcagcacattgcatgtagttgagccacattttttaaaaaaagaaaatggatgaccattaattgactagcattttagaattgatcagacattagaacacagaaaaattctagtacatttaaattctaaacaatacagtggatgacccttttgaatatacctaatgatttccttaaaaaagaaattttaaacagacttgtttaatcgtgttctcaaagcatacagtcaagaggtgggactgactgatgctttataggtgtgtgtagggtggtagaggccaaggtgctgccagcaatcctttccatactaggtactggtgaaaattgtttttgtttatgctgtcagcacatttgtgtgggtctctcattgtcccttaacagtgccgcatctcagcctggaagtcagctttaagtcattcaagagaacctcaggctgtttttctgacagtgatgatatgatatacagatacatccacagggtatctattaccagcataatgcattgtaagatggcaaggtggcattttgaaagagcgctgggcaagcagttagcacatctgggcctaccttcagcttcttcatttacaaacttctgaccttttgacactaaagctgctcctttatctttctgagtctcagattcttcatctgtaatctggagttgttaattccagtccttactaccttttagagttggaatgagatggaaagtagatgaaactactttgaaaattacgacagttaagggctgggtgcggtgtctcacacctgtaatcccagcactttgggaggccgagatgggtggatcatgaggtcagcagttgagaccagcctgaacaacatggtgaaaccctgtctgtactaaaaatacaaaaaaattagctgggcctggtggcaggcacctgtaatcccagctacttgggagactgaggcaggagaattgcttgaaactggaaggcagaggttgcagtgagccaagattgtgccactgcactctagcctgggcaataagcaaaactccatctcaaaaaagaaaaaaaggacaaaagaaaattatgagagttacttaaaggtaacatcacatactaaatgtcttctataatcctatatttattaatgcattacaactctgtagattgttagttactaggccagtagctaggaattggtataaatttaatgcaccttctatcctgaataactagcatggaaaagtgaatatatgtgtgagcagatatggctataaagacctatagcttttgcactttatgcatatataatcaatcctttctagttcagtgaattgaccccatccacaggctgattcatctttgtgttaaggggcaaatgaaacggtatattatttctttgcagtctcctctcagtcattcatcaatgtggccagcttatctactcccaattatgttgttgatacatctccaagccatctgtcatcagatcaaaaagcagcaaacagagggtcagtcacaggatgttctgacacaccattgtaactttttgttagagatgatcccatttagaaaaagactggtagaaattggagtgaaaggaaccctacagattagcccagttctctcttattttcagctttacagacaagaacaatttaaatctaaagaatttagtagattccttcagtgtcacaaagctgtttcatgaaagaatcaagattataacctggatattctgactcctggcccagtgctttttcttactttgtagctacactttgaagtaagattcaaactgttatccactcaattgccttattcctgaggatgtagtgaaggaagaaaaagttttctggaattccgtaaactatattttaagcttatttcttcaaaattattttcatatatcacagatatatcattggaagatataatttgcatatatgttcattatcagtgttcctaatttggtattacatgtattctatttttttctgaatgatagcatgaaaagtgtcaaagtggtttgtccgctagcgtctgtctgcagaactttcaggatgactattaattcctctcagatgtcatttttgagtggtccaagcctgctgttttgaacccacagcagtggagatttgtattcttatttacagttgtgtactataaagccgtgtggtttaccattagagggtttttgcgctcaaactacactctactctcctcggtaaanagtcggttgggtntggggagggaggcgggtgtggggggggcgtggggaggggtcgaagggggggggtgggggccggggggggtcctc

SEQ ID NO: 35054 - DNA, 569 bp, Homo sapiens
ctcagtttatctgttggggggtggtgtatgaattagtgtatctgtaattgtatgaatacggagtattcttatctttgtatgtgatggtgtgcttctattttaaatttatttttaactatagataggcttgctaggttggtcattccacagcttggtcttctttccgtttttgaagtaaaggtaactcactaatggtcctcagtaaacagagtgatggggcaagctgacttatatttcaattgttctgagaattgaacaactctactaatgtttcctttccaacttcaaacatacctgttcagtttcttcaacatcctgataggagctgatctcctcagaactctcccctctcatcagacagaggacttgggcatgctctaatctcttactgttaattattctttttagttttaaagccctttaaagtaatctttctgtaattagattgttgagtagattgtctttagtaatatggtggtcttaaattttgtgtggattttcagattgttaaatggttgcagaggctttcattcatgaagttcaagtttactatatcatggtatgtcagg

SEQ ID NO: 35055 - DNA, 436 bp, Homo sapiens
gctttctcagctgggttgtcagccttggctcaccctagctgagtgctggtgcaggtgggctgtggaggaccctagatttctgtggtgctggaatcttttgaaaactaacataatctttgtgatgagaaaaaacaacattaaagctatggagctggacatggtggcacacacctgtaatcccagcaccttgggaggccaaggcaggagaattgtttgagcccagtagttcgagaccagcctggtcaaaatagtgagaccctgtctctacaaaaaatttaaaaattagctggaggtggtaacgcacacctatagtgccagctatcgggaggttgaggtgggaggatcatttgagcccaggagatcaaggctgcagtgagccctgtttgcaccattgctttccagcctgggcaacagagccagaccatgtctcaaaaaa

SEQ ID NO: 35056 - DNA, 458 bp, Homo sapiens
gcccataattttatgagtctaacataattgttgtaaatttggtaaactttccagtctttttctattatttttagatgaactagatattattttgtcttattttatttagttttttcacttaacattatgagaggaatatatttctgtactatgaaataatatgcccaagttatcaaatctgacaatggccagtttcctagataattgtgccgtagttcatttatttcttctatttttaaaattctgggtgtttgcttgcttacttgcttgtatggttttatggtcactataaaacaatgctatagtaaacatatgaaagcatgttaatatttctcttctttggaatttattaccatgccaaatgtttgagttttatgtaggtaatgatttagatggtgaaccatttcactaccacatattcattttgaaaaggtacttttttagtatacttgtgaaaa

SEQ ID NO: 35057 - DNA, 242 bp, Homo sapiens
gccagaaaagccaaggcaggaggatcacttgaggccaggagctcgagatcaacctgggtaacatagggagaccccgactctacaaaaaaatagaaacattggccaggtgtgacagcgcatacctatagtcctaggtgcttgggggtctgaggcaggaggatcgcttaagcctgcagtgagctaggattgcaccactgcactccagccaggataaaggagttagatcctgccaaaaaaaaaaa

SEQ ID NO: 35058 - DNA, 506 bp, Homo sapiens
gattttttttttaatctcttaaaatctgtgacagagaatattgggattttccatcctgccatttgtttcccatatttgttataagtaatgagcacttcttatttgtcaggccctgcattggcgctggggaagacacaacagtgcgcagaaaccaaccagcctctaattgcaaaaaacttcacagcccagtgaggaggctgacattaatccaaggatcacacaatgcaactacaaaatgtgctaaggaggcaagcgtctggtgctaggagagtgtgtaatttgatatagtctgagaggtcagggtatggatgtgtaagccaatgaggagaacagcctgtgcaaaagccctggactgtgtctggtaccaggacttagccagttagggcgagcagagcaagggaggggtgggcggtggagctgagactggagaggcaagacgtgccagaccatgaggcttttgcaacatttagcccctaggccccacccacaaagattccgattcaact

SEQ ID NO: 35059 - DNA, 564 bp, Homo sapiens
gggaaagacagatggtcaacacactaataaatatataacttgtcaagtgccatgaagaaacataaagtgaggtcaaaggagtggatgactgatggtgttttttagcagggtggttaggaaaaagactttgctgatgaaatggtatttgaacacacataaaagaaagaggggccaaaccatgcagacatatggtggaagaacattccaacaagcatagggaacagaggagggcagagagggagaaaagaggagatacatgggcaagatctcatgagaccttgctagtacagatttctttctgaatgcactttttgtttcttcgatgaggccaatgagatgaggatctactagagggtttggaacacaggaagtacatgatcttctttgtattttagatggatcattctgaatgctgtggggagactagactccaaggagtcaagagtgtaaataagaaacccatttaggaggtgaggatagagagagaagtagagaagcaggggaggaggtggtgagcagggcacagattcaggatgaactcggaaatcagagctgcagcatttg

SEQ ID NO: 35060 - DNA, 446 bp, Homo sapiens
gagggaacttgacaggtacagtctgtctcccacaaagcttatggctgagtttttaaaatataattcaagcttttcaggaatacagtcaatccataaagcaatagggagaaacatttccaatatcaagaggcactgatgaatgaatgtgtgaataactaaattttgtaactttttttgtagacataaaaataagcattcactgtgtcatccttaaataaaatcattggcagagtgtagcctataaatgtctggaaatacctcaccaaaggctagaagacattttgccagaaggaagtaatgtttacatttctatattttgtttctttttcctctacatatgcattttgtcctatgtctatgtctccttcttaataggctttgacatgaacccaaagcaaatgtttcctattattttatctatttattgaatatacattgttttctga

SEQ ID NO: 35061 - DNA, 397 bp, Homo sapiens
tatttttgagaagctcatggtcttcccaaagtaatgctggctctggactcctgtaggacacactgctggggtcactgttcccctctgggccagccctcaccttgggacctacagctgctgatctctgtctctagcctctccctgcttaagtccagttgtggaacattcacccacgatgcagaccttatggggcctgggacacccgtcatctgcagattcaagggggatctgacctcaatctgctgtcaggacatgctgggtgctaccctacatcactgccagagccacctcaaggtgcacattcacctttctttgcctggtagcgcccctcatctgcacacctacctacctggggaagcctcattcatctgtcaggaccagccccagcatcgcctcc

SEQ ID NO: 35062 - DNA, 383 bp, Homo sapiens
gttaggcttttgttaaacccaagtcagttaagctgtagtagaagttttctttgaaggcaggctgttagggagaacagagagctctgggcatatttcagaatggttaccttctcatgcttctgctggaaacataaaggtatttttctccagtcttcacagtgagaatctggtggaattcctggaggtaaaactcaacaaaagtgtaagtgtgagggttcccccctgccctgaacccttggagttttgaacactgaagctagtctacactgagcctccagcagtttttcagttaagtcttcctacctgtattggctccatctttgatcttctgctcttgggcttctgcttcttgtaagctgtgactctgtttccacctgtctgtc

SEQ ID NO: 35063 - DNA, 326 bp, Homo sapiens
cacatacacaaaaaatgacactgggtacattctattagtaaaagaaaaaaaaatacatatatatatatgtatgtataaaacaattgataaatattcaaagtgatgggtatcctaaataccttgatttgatccttatacgttgtatgaatgtatcaatatattgcttgtgctccataaatatgtataatttgtatcgataaaaactaaaaaaaaagctcatgagaaatctaatgtatagcaggaggactatagttagtaatactctattgtatactagaaatttgtcaggaaagtaggttttaagtactcttaccctaaacaaaaaa

SEQ ID NO: 35064 - DNA, 453 bp, Homo sapiens
agccagtgtacccagcctcttgtgtttatttaaaaagaaatactggcgtttgtcgaatgatggagtcttattttcaaacttttgtattaaatatattttcgctttcaccagatcagtaaatcagtgtatcagatgagtcttgctggaagtctgatgtagtttgtgtatagttttagacccaaatttatatgcagagataacgcaggaaaagataattaagtctatctaagattcagtgggattagtaagccttaaaaaaaaaaaaagaccaaatctgtttattgataggttatagaaaagcaaaatacttccttaaattaggcactttttgataggcttaaataaatgatgtataactgttcatgatgttctgatattaaatgaattgtacattcccaggatgaccttgagccctttttctagaccctagtaattaacctgattgctcattac

SEQ ID NO: 35065 - DNA, 1043 bp, Homo sapiens
tgaatgtgggagaaaatcggagagaagcgataggagttagaacatctggatgtgtctgcagcctgctgtcagcccaattgggccagggggtcccaaagacgcatattctcaccccacctccacctgcttcctgatcacatcccagtcaccagcggcagtttcctggatagtgagggagaacaactgcaagttgagagaggcagaggggtggaagggacctgaagctggcctggagaaaagcataggcccaggagagcctgccctgggacagcgcctgtctcccacacagcagcacttggcccagcaaggacctcctcccttggccctggcacatcccactcctgccctttcataagccccctggggaaagcactccagtcttctctgttccaggctgggcagatagggtcctatggggcacagccagggtcctatgggcatagccagggccctatgggtcctctggaagcaagaaagggggccatggaagcagcccagacagctggggttcactcagagaggacccaagtcccagtcccttcctttcagtcaaaacacggatatctttgcctcaggtcacagggccactggggccctgtcatcaaagatgagattcctgaagcctggcattgactggtcccctaagaacagatgttgggatggagaatggggattcatttgggtttcagtaaaacaggggggtctggacaagagcgggtgggctacttggtatccacacacacgcactcacacaggagccaacccattgcagctgaacaagcagagaaactcagtctggaaaggcccctcctgcctgctgaagtcactgagaccctgccacacctctcctcgccactgtcaccactcagggcaccactgtacagtgcaacaagtcaggagacctaggtcctactcctgacacttgctaattagctctatgactctgggcaaatcgcatatctgggcctcagtttcctcatctgtaaaaatgacagcaaactcgtaatgctcaataaatgtttaaataacaactgaaggaggcc

SEQ ID NO: 35066 - DNA, 184 bp, Homo sapiens
gcgtgacctcatagctactcacaataataaaattacacatgaaagcaggaattggctaactctaggcctatgggccagatccagccagttgcgtttttgtaaatagagtttttttgaaacaccagtcaccagccacattcttttacttatgtcttgtctatggccgttttcaagccacaatagc

SEQ ID NO: 35067 - DNA, 548 bp, Homo sapiens
  misc_feature (527)..(527): n is a, c, g, or t
gatcaattcaaggagaatagttttgggacagtctcccaaaccaagcacggtgcctctctaagggctttttcctaacaatctataattttccttcttttatctttcagaaaacatccttgtgtgtgctccagtagcctccattccaggtctacgcatgattatctgggtctatgaatgcctgggacttcatccttgtgctacaagtcacaatctcaacaggacacatacagagataaaatgctcaaccagcaacccaaagaaaaaactgaaagtgaagtggccagggccatgatgttgctctgctatcctctatcacacatcatcagaaataccctcacctctgtagtccttgattcactcccaatttaaaatgtttccatggattcccactgtatttacatccaagacctactccaccacactctttgctgcaccttctacacactagaatttcttaggaggatctccccgcaaaaatccaatttggtcccaggatgtggttaggctctgagatctcactctttcanttccatctgtgatggcatgag

SEQ ID NO: 35068 - DNA, 362 bp, Homo sapiens
accttcttgaagatcctactgagttattttagagtcttttttagagttgctctattattttaattttaactgcagtgatttcatgctgaccttgtaggctggctttcctcatgtgattttccttatgaatttttgaaatttgtaggcttatcttgaatagcccatttttttctctctgcactcatctctccatatttaatagttctgtgtgttcttttgccagttcttccagagtccccagttctgagccaagatttactgagataatcttgaggctcatacatcatggtgatatcaggactatcacagattcagtcatgcatttgggggcagcttggctcagccactggtcataggctgtg

SEQ ID NO: 35069 - DNA, 368 bp, Homo sapiens
aagatgttattaagatgtaacagtggagatttcattagtcctgcaaagtgtggtatttcttggctgtcgtgtgagtcctgtggactcaccaattatcattaatccagcctctttctactcaaagttcacacttaaaaggaaagctctgtaaaagggaggaagacgtgaagaaggagcacgcccggcagtactgagtgcacgttattagtcagtgctgcccttttgctgtatttttcgtaaaatatttattaaatttgggtgtcattgtgacaagaagaaatgcagttaagtgtgacctttttttttccccaaacatgttaggttttaagaacctttgagctattgtcagatataaccagaaaaaaata

SEQ ID NO: 35070 - DNA, 510 bp, Homo sapiens
tttttttaaaatttcttttttaatttatatatatatttttgagatagagtctcgctctgtcacccatgctggagtgcagtggcacacccttgactcaccacaacctctgcctcctgggttcaagaaattctcctccctcagcctcccgagtggctgggattacaggctcccaccaccactcctggctaatttttgtatttttagtagagacagggtttcactatgttggcctgactggtcttgaactcctgatctcaggtgacctgcccgttttggcctcccaaagtgctggaattacaggtgtaagccactgtgcccagcctctctgctcaattttaggggtttatgtgattagattaggtccactcagataatccaaaataatcaacccattttacagtttgtcacctaattacatcacggggtccctttcgctgtgttttgcaacatatttcaggttctagggcttacacatgagcattttatggagctattataccgcctattgaa

SEQ ID NO: 35071 - DNA, 456 bp, Homo sapiens
aaaaaaaagcaaccccacaaggttcagtcccggagcatcctctagggtctgtgccacctgacagaagtacagggctccatcctgccccaccccaccccctgcctgggatccagtgtgaggcccagactctgtccctccccctgggccaccgggcctggcacacacagttggcattgggaacataaaggatggatttgaaccccctcctgggctgctccttcgagacctggagacctgtctcaagacccagctccaggcagacagacatcgtttcctccacaatcccacccactctggggacatctgcagggcctcaccgatggggcatgggaggcctggcggctcccaggaagccaccctcagccctcactgccctgagctcttcacctccactctcagacctgagcccagcccacccttactgatggggcatccctcttgttcacccttccttcc

SEQ ID NO: 35072 - DNA, 437 bp, Homo sapiens
ttttttccagacacaagcattttgagtaagagagtcaggaatatgtctaacatgcaaatgacaagaaaccccatggccagagtggagaaagtaaattaaggagtattggctagatagtgtaaactttagaatgacagtccgaggcaagagtttggaacttttgttgccatggacctctttggcagtaacgaagccttagaattatgttttcaaatgtgagaaataaagtatttaggattacaaaggaaaccgataatattgaaatacagttgttaaaacattaagctcttctttactgatgcatgaaataacaagatttagcagttattctaattaccataatttccaagtagtgatcaatgaaaaagatatcttgtgtccaggcacggtggctcacgcctgtaatcccagcactttaggaggctgagatgggcgga

SEQ ID NO: 35073 - DNA, 1007 bp, Homo sapiens
ccactggtgaggaatctcagccttcaggacaaccagactaaatcattcatgccatctcccatgacagcatcatgtggaccagggagcctaccttatggtgaactcatggctgggagatctgaggtccagacatgacaggaaaaggaaaaagaccaggagctctgcctaagtagcccccctgtgtgaatcactctaccctccaccctcatcttcagttcgtgatgggtattgtcttgtgaaaactgaaagctgggctgggacacaggcaagagagtctctgactcacaaatctccatcgtgggctctctggcctttctgatattcttttcacacatcaattctgggccaagacacatccatgctcatcaagaaggcattgataggagaatcaggtagcctccagagagacaggaagcagataaacaccctcatgttggcctcctaagcccagaggagaaaaaaaaaagttggaggggaagaagttcaagaagccacactagaagccactgattaccatcacctcggcacctgtcctccatctgcccctctttcaagtgaggaccagactcaggggacagcacctgcacctccccctctgtccatgcactgtgtagggagcctccttctgctctcatctcaaggtggctgctccgccaggtcagccgtatcactgctgagagtcttccctgggtcctggtcacagggtctgggatcagcagcaacctggctttgattcagctctgaccctgccccttcaggacacaaagcccattattaaagggataactgaactctcctagttcactcaaccttagattttccttctcagtgtccttctagaaagtgccgcctctactaaatgatttcatgttatttcctcaggtctagagctatttgatttccaaaattctatactcttctgttctcattcccggtcatggctcattttccctcagcagctaatgatgctaatcatgtatctaccccccattgtcacaaaaaagaga

SEQ ID NO: 35074 - DNA, 282 bp, Homo sapiens
tcttttttttataatagctatcctgacaggtgtgaggggatatttcatactggttttgatctgcattttcccgacgattagtgacgttgaacaatttttcatatacctcttggctattggtttgtgtttttttgagaaatgtctaagtctttagcccattttaattggcttattagtttttttgtttttgccattgagttgtggggggttattttatattttggaatcaaccatacttcctctattcaacatagcattggaagtcccagccagaataagtgg

SEQ ID NO: 35075 - DNA, 532 bp, Homo sapiens
ccccggccaccatttttgcaacctactaacgactttctatggatggatgcagttggtcatttcattcataccatccgctgaaatcctaatgccactgttatggaattggcatcattatctctactttacaggaaagaaaattaagactcaggggagaaatgggagttgcccagaatttcctgcttgtacatgtgccctgtcggcttctttctccagagactggggctctagaaggtaaaggacctgttcacgatcgcccagctcactggagccagagctgtctggttatagcaatggccatgggagaagtctgcgtccagagcaaacacaaagggctcagtagcaggttggatttgaatcctttttttttttctttttttttggagatggagtctcgctctgtccaagcaggaagaggccaggcgaggtggctcacccctgtaatcccagcactttgtgaaactaaggcgggcagatcacttgagatcaggagttcgagaccagcctggccaacatggcaaaaccccatctc

SEQ ID NO: 35076 - DNA, 453 bp, Homo sapiens
cagaagaattgcttgaacccgggaggcggaggttgcaatgagccaagatcgcaccattgcactccagcccgggtgacagtacgagactcggtctcaaaacaacaacaacaacaacaacaacaacaacaacaaagaattgaaattgtatatatttaaagtgtactgtgtgagttttgaaatacatatactataaccgagccacatctctctctccaaataaatctttaaacaatttctggtgaagggttggtgcctgacagtatcctagggggtaaaaaatgatagcatctgaagttaaaagtaaattaattcttacatcttaccaggaaaattatcacagcaaatactatatttttccttaataactctattgtttatttccattcatttcttagaagggaaatggcatttcactacaaaataatttggttaataaagaagtttcaagatatc

SEQ ID NO: 35077 - DNA, 511 bp, Homo sapiens
aacagcaggtaaaacatgaaccaacctacttagcaagttagatcaagaatctattgattgccaagtctctttgagtcctgcaacacacttcctctctgtcccttctgttaaagcaaactaaatatggcccaagaaggaccccatacttctatatttcagtccctgtggacgaactgtaacctagcttaataggcagacaagattgagaacctaatttagtagtatgtgcctgtaacaatagctgagtcttggccaatcccagcagccatgcttcaaccactcatagactgctgagtgttcaaactgtgttcaaagaaggcaaatgccaacctgtaaccaatccaactgtttctgtacctcacttcagatttctgcatgtcacttcccttttttgtgtctataaatttgttctgaccaccagacatccctggagtctctctgaatctgctgattctgggggctgcccaattcacgaattgttcattgctcaattaaactccttgaaattcaa

SEQ ID NO: 35078 - DNA, 220 bp, Homo sapiens
ttgtttttttttggtcgatttagctagagatttgccaattttgttctctttcaaggaaccacctttttgttgctttgattttctctgtttttctgtaatctctcccacttattttcactataaacttcattattttttccttctgcttgctttgggttttattttctcttaattttgtgtttcttataatgaaagactaggatatttatttgagatgagt

SEQ ID NO: 35079 - DNA, 732 bp, Homo sapiens
gataaaaatatcatttatccatcttattctatggtaattgtcataaaaatatagctctagtttaaattaataattggtctagcaattggaaaaatagcaaatcattttatttaattagatcttttcatgaaaactgatttgaagaaatcttaaaatatgcttcatatttcaggaaatgataagatactttaagctttgcctattgattttctactggaggatggtagactggggaagggtaactttaatgtgaaacttccatataaaatgtgttaatgtattctctgagatcccacccatagaaaatagactattttaattctatgcccttttctattttcttctaaacagggaatctggtgtcactaggttactgcagtttaagacagattgcctttgtccaacctttccgtgtttgccaagtaaatagtaaataactggacagtatctttgtgattaaaatgatcttccaaaatagtttcctccacaagatactccaatatgtttctgcatatttaagtaagctagactgtgtctctaggataatttattttagacacctgaagagttcataaagtgctacagagtgaaattattatttgagttgtatcatgtatcaaattccatatgaaactgcttttcttctaagactgaaccaggaagaaattgaatacctgaacagaccaataatgagctccaaaactgaatcagtaataagtagcctacccacaa

SEQ ID NO: 35080 - DNA, 1039 bp, Homo sapiens
atttttgccatcatttttttaattaaagaaaaaatttccagaagaggaaaaaaaaactacaaaaaacaaaacattgaaggttgatattttatgtggaagaacatttgaattgaattcagaatttttctgaaggtgtagatactttttttttttttttaacagaaaacctgatgtcaagaggtgggcaatagaaatggaaacaaattgtcttcctcaataattaagctactttctctttttcccttcttgttttaatctagtgggttttttattttattttttcttagaaatatgtaggtaaggtttatcttgaatcttaattgccttaattttaaggacgtcaaaggctctcgaggcaagctgtcaacgtcttgttgaaaacaaaaatcaagaaagaattgaaatactgtgccggctttcactggcacagaagtttaagactatgagtttttagggtgaagaaaaaactgtacagtttaaatgaaaatgtttttcttcatttgaagaaaatttgttgataaaccatggcaactgcaagaattggaaaaatgctgggacttttcatgaactttgtcttaagtgttgacatgaatcattctaaaaggctaaaacattttacagtaaagttattaaggttggtttaaaaacaactgcattagaaataatgcgtgtttggggggcagaatgcagatttttttaatttacaaagcgtgatcgctagcaaaagcattagtgctttttatctgcagtcttttttatgagctttacaaagtttttagtcagctttgcttgtcacattgcaaaacctagcttaagagcattaaaaaaaaaaacttaagtagataggagcttatggtcaaaaagtgcaaaaaaaaaaaacaaaaaaaaagcaatagatagagaaattgttgacaatttctgtagtctttcctagttgtgatcaaattcagcctatggatggcctattttataccaaagatgaagtgacaccctattacagtccagaagatagaggttgttttcgtttcttttcttttta

SEQ ID NO: 35081 - DNA, 681 bp, Homo sapiens
tggcgaagcgggccccagtcactgagccgccgccgaggattcagcagcctcccccttgagccccctcgcttcccgacgttccgttcccccctgcccgccttctcccgccaccgccgccgccgccttccgcaggccgtttccaccgaggaaaaggaatcgtatcgtatgtccgctatccagaacctccactctttcgacccctttgctgatgcaagtaagggtgatgacctgcttcctgctggcactgaggattatatccatataagaattcaacagagaaacggcaggaagacccttactactgtccaagggatcgctgatgattacgataaaaagaaactagtgaaggcgtttaagaaaaagtttgcctgcaatggtactgtaattgagcatccggaatatggagaagtaattcagctacagggtgaccaacgcaagaacatatgccagttcctcgtagagattggactggctaaggacgatcagctgaaggttcatgggttttaagtgcttgtggctcactgaagcttaagtgaggatttccttgcaatgagtagaatttcccttctctcccttgtcacaggtttaaaaacctcacagcttgtataatgtaaccatttggggtccgcttttaacttggactagtgtaactccttcatgcaataaactgaaaagagccat

SEQ ID NO: 35082 - DNA, 555 bp, Homo sapiens
ctccgactaaagggcggggacgaaaaggaatcgtatcgtatgtccgctatccagaacctccactctttcgacccctttgctgatgcaagtaagggtgatgacctgcttcctgctggcactgaggattatatccatataagaattcaacagagaaacggcaggaagacccttactactgtccaagggatcgctgatgattacgataaaaagaaactagtgaaggcgtttaagaaaaagtttgcctgcaatggtactgtaattgagcatccggaatatggagaagtaattcagctacagggtgaccaacgcaagaacatatgccagttcctcgtagagattggactggctaaggacgatcagctgaaggttcatgggttttaagtgcttgtggctcactgaagcttaagtgaggatttccttgcaatgagtagaatttcccttctctcccttgtcacaggtttaaaaacctcacagcttgtataatgtaaccatttggggtccgcttttaacttggactagtgtaactccttcatgcaataaactgaaaagagccat

SEQ ID NO: 35083 - DNA, 774 bp, Homo sapiens
agcgggggttgcatcagctgggtggggcaccgcctggcagcccggactcccccgacatgtgatcggcttcccaggagggcgggaggcccgggcgttccccgagcctggggaagctggccgtcccggactgacctgctcggggagagccagcaaaggacacattcggcctggcccaagccctgacgatttcagtgttgttttctgcacgcgcaaaacacctggggaccgaggggatggcagtggcatcctatctttgacagctctgaacgagcttaaccttttttttcagacccctttgctgatgcaagtaagggtgatgacctgcttcctgctggcactgaggattatatccatataagaattcaacagagaaacggcaggaagacccttactactgtccaagggatcgctgatgattacgataaaaagaaactagtgaaggcgtttaagaaaaagtttgcctgcaatggtactgtaattgagcatccggaatatggagaagtaattcagctacagggtgaccaacgcaagaacatatgccagttcctcgtagagattggactggctaaggacgatcagctgaaggttcatgggttttaagtgcttgtggctcactgaagcttaagtgaggatttccttgcaatgagtagaatttcccttctctcccttgtcacaggtttaaaaacctcacagcttgtataatgtaaccatttggggtccgcttttaacttggactagtgtaactccttcatgcaataaactgaaaagagccat

SEQ ID NO: 35084 - DNA, 629 bp, Homo sapiens
tggcgaagcgggccccagtcactgagccgccgccgaggattcagcagcctcccccttgagccccctcgcttcccgacgttccgttcccccctgcccgccttctcccgccaccgccgccgccgccttccgcaggccgtttccaccgaggaaaaggaatcgtatcgtatgtccgctatccagaacctccactctttcgacccctttgctgatgcaagtaagggtgatgacctgcttcctgctggcactgaggattatatccatataagaattcaacagagaaacggcaggaagacccttactactgtccaagggatcgctgatgattacgataaaaagaaactagtgaaggcgtttaagaaattcagctacagggtgaccaacgcaagaacatatgccagttcctcgtagagattggactggctaaggacgatcagctgaaggttcatgggttttaagtgcttgtggctcactgaagcttaagtgaggatttccttgcaatgagtagaatttcccttctctcccttgtcacaggtttaaaaacctcacagcttgtataatgtaaccatttggggtccgcttttaacttggactagtgtaactccttcatgcaataaactgaaaagagccat

SEQ ID NO: 35085 - DNA, 366 bp, Homo sapiens
aagagacactgggaaaccatgtctagcacttacagcctcgaatgttcctgctgtcctacattcaaagacattactctgtacatattaaccttcactattcagatgaactacaactggaactggatctaggatatagggaaatgaaggaaagggggcgttggaatccagtagacatgggttggaacccaaactccagcaattgacagctgtatgcatggacatatttattgtttctccttaaaaagatttcctttttatttaaaggacttgaaatgccttttagttgtgcctgtaaagactgtgaatcttgcatttgcctgtgatccttagcagtagggtaagcccacatctggcatatgtgctggc

SEQ ID NO: 35086 - DNA, 240 bp, Homo sapiens
ccatctggagacagaggcatacagggagagtaccatgtgatgatgaaggcagaggttggagttatgcagctgcaagccaaggaatgcctaaggttgcctccaagccgccaaaagctaggaagaggaaaagaagggtttccctacaggcttcagaggaaacatggcactacagacatcttgattcagacccagccttcagaactgtgagacaataaatttctgatgttttaagccacccac

SEQ ID NO: 35087 - DNA, 1080 bp, Homo sapiens
  misc_feature (839)..(839): n is a, c, g, or t
  misc_feature (892)..(892): n is a, c, g, or t
  misc_feature (1080)..(1080): n is a, c, g, or t
ccgaggattcaagcagcctgccccttgaggccccctcgcttccctgacgttcctgttcccccacgtgcccagcgttctcccgccacgccgcgcggcttccgcaggccgtttccacgaggaaaaggaatcgtatcgtatgtccgtatccagaactccactctttcgaccctttgctgatgcaagtaagggtgatgacctgcttcctgctggcactgaggattatatccatataagaattcaacagagaaacggcaggaagacccttactactgtccaagggatcgctgatgattacgataaaaagaaactagtgaaggcgtttaagaaaaagtttgcctgcaatggtactgtaattgagcatccggaatatggagaagtaattcagctacagggtgaccaacgcaagaacatatgccagttcctcgtagagattggactggctaaggacgatcagctgaaggttcatgggttttaagtgcttgtggctcactgaagcttaagtgaggatttccttgcaatgagtagaatttcccttctctcccttgtcacaggtttaaaaacctcacagcttgtataatgtaaccatttggggtccgcttttaacttggactagtgtaactccttcatgcaataaactgaaaagagccatgctgtctagtcttgaagtccctcatttaaacagaggtcaagcaataggcgcctggcagtgtcaagcctgaaaccaagcaataccgtcatgtttcagccaagcccagagccctaagattacaaacaactatggccggaacctcctcagctctccctctgcagagttccctaccctaagagaatgttaccanctgaacagtcctcggtgaatctgagaggagaggatggggtaaggcagaagcancagctgtactactagaagggagctttggtggtagaccccctggtgtctccaacctgactaggtggaccagagctcaaagaggccctctttaccgtaggcgaggtgataggacatctggtttgccacaaaggtctgttccgccagactttcctagtaggattgtccactcaaatgtggggccacttttn

SEQ ID NO: 35088 - DNA, 1226 bp, Homo sapiens
  misc_feature (985)..(985): n is a, c, g, or t
  misc_feature (1038)..(1038): n is a, c, g, or t
  misc_feature (1226)..(1226): n is a, c, g, or t
ccgaggattcaagcagcctgccccttgaggccccctcgcttccctgacgttcctgttcccccacgtgcccagcgttctcccgccacgccgcgcggcttccgcaggccgtttccacgaggaaaaggaatcgtatcgtatgtccgtatccagaactccactctttcgaccctttgctgatgcaagtaagggtgatgacctgcttcctgctggcactgaggattatatccatataagaattcaacagagaaacggcaggaagacccttactactgtccaagggatcgctgatgattacgataaaaagaaactagtgaaggcgtttaagaaagtaggtcttcagtgagattttgggaaagtcataatggatttgtccacaagggggtgccagctgtgttgtatgtattgttagcggaaggggtgataaatgcgttcatgctcttgctaggcctaattcgttttcctttgtgcttgcagaagtttgcctgcaatggtactgtaattgagcatccggaatatggagaagtaattcagctacagggtgaccaacgcaagaacatatgccagttcctcgtagagattggactggctaaggacgatcagctgaaggttcatgggttttaagtgcttgtggctcactgaagcttaagtgaggatttccttgcaatgagtagaatttcccttctctcccttgtcacaggtttaaaaacctcacagcttgtataatgtaaccatttggggtccgcttttaacttggactagtgtaactccttcatgcaataaactgaaaagagccatgctgtctagtcttgaagtccctcatttaaacagaggtcaagcaataggcgcctggcagtgtcaagcctgaaaccaagcaataccgtcatgtttcagccaagcccagagccctaagattacaaacaactatggccggaacctcctcagctctccctctgcagagttccctaccctaagagaatgttaccanctgaacagtcctcggtgaatctgagaggagaggatggggtaaggcagaagcancagctgtactactagaagggagctttggtggtagaccccctggtgtctccaacctgactaggtggaccagagctcaaagaggccctctttaccgtaggcgaggtgataggacatctggtttgccacaaaggtctgttccgccagactttcctagtaggattgtccactcaaatgtggggccacttttn

SEQ ID NO: 35089 - DNA, 341 bp, Homo sapiens
gctggaggcagtgtgagcaacaaagacctgtgtgtccaggaggggcaaggtgacgaaaggtactcactcacccaaagaggagacttttaccctcgttaggaaagagggcaatgggtgtgttggaactggctcctaccagctctcaaatgttaaattttcagggattcagggagccagttgttaaatacagttattattaaaatttaaaatacaaagttgcaattaagtaaattatactgagaaaggtaatactcacaactcatcacttatattgatgatctacgttcttgagatgatgttctgcatctatatggcagaagtactactacacaatggtgtgc

SEQ ID NO: 35090 - DNA, 310 bp, Homo sapiens
taccttttcttttaaaagtattttatttatttttgacaaatggttatagggaatggatctagacttcaaacagcaaattaatggaaaattaatggaaatacagaggcttttagctttagttaaaatatattgtgttactcagacctttagtttgcaggtaaaaagagataacggtctattatattaatattccttcctggccgggtgcggtggctcacacttgtaatcccagcaccttgggaggccgaggcaggcggattgctttgagctcaggagttccagatcagcctgggcaacacggtgaaacccc

SEQ ID NO: 35091 - DNA, 659 bp, Homo sapiens
gaagaatgcagtatctgaaataaaatatatattggatgggattaatagcagataagacacacatcagtgggcttgaatagataacaatagtgactatccaaaatgaagcacagggtggaaggactaaagaaaaaaacagcatcagtgagctgtgggaaatatcgagtggcctaagacgtgtaattagaatcctaggagaagggaggggcaacagaaaatattataagaaataatgacttttatttattttttatttcaacagtttttgggaaacaggtggtgtttggttacatgaataagttctttagtggtgatttctgagactttggtgcacccatcacccaagcagtgtacactgtactcaatgtgtagtcttttatacctcataccactttcaccctttccccaagtccccaaagtccattgtatcattcttacacctttacatcctcacaaatttagctcccacttatgagtgagaatatatgacgtttggttttccattccagagttatttcagttagaataagtctccagttccatccaggttgctgcgaatgacattaagaaataatgactttaaacctctgttctctgtttagtagaaactataaacctgtagatgatggtaagaagtcaacctaaagtagaagaaatat

SEQ ID NO: 35092 - DNA, 593 bp, Homo sapiens
gcccaagataagaaatggcaaaaagcacagtcgtgtttttccagtctgatgggaagtcaaggaacaaagcaatctagggtactggtgagtgttactgagttaagggagcacacttgtctcatttctcagcctgacataggtgacttgtctggtgctctgcagatgctgagtagcacagtatctggcacagaagggtcaggcaataaagatttatttcactggattaaaaaaaaggcattctttaatttttatgatggactctttcatccacattcagctctgacacgtaggagtcacttttctttctttcctacatttgttctgtcgatctgatttaaaaaaaaacaagatgttttcggaatcatccctgtggagagataaggtggtgatggcaatgggaaaatgcaaagtagaaattagaaacaaatacatgaatatatttgcagtagcatttgaggaactgggaacgtttagtgactgtgtgtgtgagtgtgtgtgtgtgtgtgtgttttcttctaagcacaagtgctgatgttctgagatgaggtagtgcatcatgaatcatacacagaaaggatttatgaaccaaaaaa

SEQ ID NO: 35093 - DNA, 499 bp, Homo sapiens
gctgcaaggtaaacctcccttcgtttctgattttattagagaaacagttcttgtgttatgctctgggtaagaactactcagttgttggaagcccatcccacagcctcacctgctggaaatcagtcacctcttcttttcctccctttatacaaatagagcacttttgcccctggttggataatgatgttcctcataacaggttaagtcaatggttaagtcagtgatgaggggtaggaaactatttttattgggcatccactacgcactcaccccacttaatcctatttaacttagtatttgtcaaaggatcagaggaacagctctgactatgggaggcagaattactgggctctgctaaaaaatgtggtagagcatgctgggccttcaggcctagactggagtcctcgcactgctactaactgagaagctttgagcatgtaacttcacctctctgagactcaatgtcctcgtctgcaaaatggctttgagcagcagctat

SEQ ID NO: 35094 - DNA, 131 bp, Homo sapiens
aacctacccctaggagtgggagaagaccacaaccaaagaagcaaatggacacacggactatcagatgaaaggcagctacacaggaaaataaagcagtgcagcaggattggaggtgcttgtggtgagaggag

SEQ ID NO: 35095 - DNA, 388 bp, Homo sapiens
aaaaaggttttttttccacgctctgcagacttggtttttaaccccagaggctcggggcgatctggggcgggtagcacggagccgcatcgccacctagtgaccacacgacggcaccgtccttgcccaacgccccgtttccatctcctgctgtctggagcctcctgcttttgctttggagagaaatccagaggtgactttgcagctcagcaggtgcggcgcctgcaccgtcttttttaccccttcccgtttcccaccttccggtctgcaaagggttgtttactttaggatttttttagggagaggtggtatttaaaatatacgtaatgaaaacattttattactatctttaaataaaaacaatctgaatagcttaacaaaacaaatatag

SEQ ID NO: 35096 - DNA, 212 bp, Homo sapiens
gcctgtcgattattttaaaaagctcttaattccctgatatctatataattgggtgcatattaatgcagatggaggtgttagtttgtatcattttgttatacatgggactattcattattaattcatattaccattatttattattatttataagtgtgtgacatgaggtttatgtgtttcatactctttaatacattactgaaaaaaaaaca

SEQ ID NO: 35097 - DNA, 346 bp, Homo sapiens
agtgagaacatgcagaatttggttttccgttcctgcattagtttgctaaggataatggcctccagctccatccatgttcctgcaaaggacatgatattgttcttttttatggtatagtagccattttcaaaaagacaggaacaagcttttctttcttctaacatttggaagttttatattcgttcttttttcttccattttgttttgtttttttagagacagggtcttgctctattgactgggctggagtttaatggtaccatcctggctcactgcaacatcaaacttttggggtcaagcaatcctctgcctcagccttccaagcagctgggactacaggcatgta

SEQ ID NO: 35098 - DNA, 598 bp, Homo sapiens
tagcctggtctctatactatgtggtatgcttagtttggtgttttaaaaaatcatgtgtttttgaagcactgtggctgactttcaggagcaccattctaagtttatttgcatgacaaggtggtcatctagggttgtgccaaatttctgacctggtacttagtagtttttttttttttttcctgagatgtgtatcagaaaggaggtgaatgttgtaaatgacattgaccattgtccgatgtatttttagagtagatcattcccaaactttagtactttattttaagttgacaaactacttgtgatagagaacacagctgaccacagtatactctgagttttcacttatatctgctttgagaatgcctgtgtttattttgtagggttcctccttgcctgattttactgaaataattaagccaatgggtgctggtacgtgagagctttgggaggccaaggtaggaggatcccttgagtccaggagttcaagaccagcatggccaacatagaaagagtctatgaggccgaggtgggaaaatttcttgaggccaagagttcaagaccagcatggccaacatagagagattctatctctaaaaaa

SEQ ID NO: 35099 - DNA, 1185 bp, Homo sapiens
gtcgctggaaggctgcgtgctggtcgcgcccagctgcgtcaccccaggaactggggtctgtgggccagtgtggccgtctctacgaagactggcacgacccctaaagttaggtcggaagacctgtgggcagcttgagcgccgaggagtgccctgaacgctcaactcgccctggaaacgtttttccgtacagcaacatggcggcgcccatggactcttagaaaaggagaaagctttttctctgtggactggaaggggcatttttcatgatcactatttagatgggtgctgttttcatgaggagagtctgggaaggcggcgtccgcttttctgacaagggaagaggctactttgtccttttaaggattcaatgacttcctgacttggaggatgtggacctagtggctagacccaaggaccaaagcaagaagtcgtggggggcccaggaagacaggaggatcacattgggattccagacataagatcaggttttaaccccctttggccaaattttggctgaaaatgttgaattatcaactctgaaattaaaaagaaagtttatattaaaacattgcaattttccttagaatttctgtatatattaacatcatgaatgataaattctcttcaatgtgcatgtcaggtttttgtacttgtatatcaaatctatctgtgtgtatgaagtgtatgtttattgaaatacaagatatttaagaagctgatctggaaagttggattttcattctagttcctaattcccagaggcttttttaaaggaagggaatgtctgtggtacaccagttgtcagctgggtggttactggatcatctttcttttatcaacaagataaactatcaacttcaccagcatcatgaaccttgttgccgtaaaaaggagttcactacttctgttcactttgagtctcttcaaatggattctgtgtcctcctctggagtctgtgctgcatttattgcttctgactcttccactaagccagagaatgatgatggaggaaattatgaaatgttcacacgaaaatttgtttttcgacctgaactgtttgatgtcaccaaaccttatataactccagctgttcataaagaatgccagcaaagtaatgaaaaggaagatctgatgaatggtgttaaaaaagaaatctccatttctattattgggaaggtagaaagt

SEQ ID NO: 35100 - DNA, 587 bp, Homo sapiens
tgctcgaattcaagcttctaacgatgtacggggacatgtcaggtttttgtacttgtatatcaaatctatctgtgtgtatgaagtgtatgtttattgaaatacaagatatttaagaagctgatctggaaagttggattttcattctagttcctaattcccagaggcttttttaaaggaagggaatgtctgtggtacaccagttgtcagctgggtggttactggatcatctttcttttatcaacaagataaactatcaacttcaccagcatcatgaaccttgttgccgtaaaaaggagttcactacttctgttcactttgagtctcttcaaatggattctgtgtcctcctctggagtctgtgctgcatttattgcttctgactcttccactaagccagagaatgatgatggaggaaattatgaaatgttcacacgaaaatttgtttttcgacctgaactgtttgatgtcaccaaaccttatataactccagctgttcataaagaatgccagcaaagtaatgaaaaggaagatctgatgaatggtgttaaaaaagaaatctccatttctattattgggaaggtagaaagt

SEQ ID NO: 35101 - DNA, 1331 bp, Homo sapiens
aaatttatatccctaaaatttttagaaatctctcaaaatctttccaaatgttctggtatctttgaaaaatgtaaatagtttatttatagagaaccctacctctgaggttgactcaaaggttaaagaaggctcatcagtctatccttctgcctccatatatcctgaacatcaaactatcccaggaaaaccatctagagtagtttgtttcaaaatattagccacagaccacctacatcacaataactcagggagcttatagaagtgaagattcctgaatataaacatagtaataattcaacctactgaatggaaatctctgctgaaatccacagttttcataagctccccagatgattcctgtgtacattaaatctagaaaccattagtttgagatctctcaaaaataaaaataaaaattgctttcagagagtagcccatgaaatttcccattcttcaaggacaaattccttctgttcagccttggtcctccaactgcagtttacaatttttgttcttctcctgtaaagaatgtcaatggttatcaccttcaatagtttcaatatgtcccccaaagttatgtgtttgaaacttgcaatagtattgggagatggggcctaatgaggtgattaggtgaagtctctgccctcatgaaaagattaatcccattatctcaggagtgtgttggttataaaagcaagtttggctccctcttttcctcacacactctttttcccttctgccttcacctttgccgtgggtggacacagcaagaaggccctcatcagatgctggccccttggtcttgaatttcctagcctctacaactaagccaaataaatttctgtttattataaataacccagtctcagatattctgttacagaaacacaaaatggactaagacaccacccttttccaaaatctctccttgtgatggctccctttactaacctttcttttagctattccctttatgatagtttcttaattttttctatcaaaagctaaatatggcacacttgttctttacagaaaaataaagatattttaaacaaaatactagggccatggtatgtaataaaatttgaaacaataatttcaaataataaagattgaaaatgcttaacccagaaaaaaaacaaaaaaagaaaaaaaacaagaaaaaataagagaaacaaatagaacaataaagcagcaaaaacaacagaatcatacacaaacaagaggggggggggcgataaatatgttacacggaggggacacaatagtgtgcgacacgccagggtttgagaaagagggcagccccaaagagggggattatatagaaggcg

SEQ ID NO: 35102 - DNA, 462 bp, Homo sapiens
ttttctctgccttagaaaacttggtggtcacagaaggataggaggatactggcagcttggaaggctgaaggaagaggcttcatgggagaaagagacctaaggaatctctagtccctaggtacctggaaatccatacacatccccctgaccaaccaaagtcccagttaggaaaacatggatattgcctacaatatgcgcccctaaacccctgcccccagcgccttctccctctgcccggaccacagaccgttccaggtgtcccagagccacttgggaccatgtgaactcaatgaacaagtgagcaggttcttcttgtgggtttcaaatgaatgtatggcaggaccatcttcagacctgttgagacctgttgaaaatctcaacatcctgctaagttatactgccaggaaagagactggcccaactggatggctgtggccccttcggtagaactttctgtcactc

SEQ ID NO: 35103 - DNA, 505 bp, Homo sapiens
gtgcgatcttggctcactgcaacgtctgcctcctggttcaagtgattttcgtgcctcagcctcccaagttgagtagctgggaccacagtcacacgccaccatgcccagctaattttgtatttttagtagagacagggtttcaccatattggccaggctgggcttgaactcctggcctaaaagtgatccacccacctcagcctctcaaataaactcctttaagttacttattttgcactgtgatagggtctagtgtccttacattttatgcatgcaaaatccaaaaacctgaatattttcaaagcactgaatagttgacaaatgtacataatgatatgatattaaacattctagtaaaaattttagagtaatgtatttttgtcagtaaaattacacagcttgaagaaatattattctcttacatttttatgaaatgagacaaaatagttacctttttaaagtaatttatagtgtcaacagtttatatttattaaagtatttatact

SEQ ID NO: 35104 - DNA, 358 bp, Homo sapiens
ggcaggagaattgcttgaacccgggaggcagaggttgcagtgagctgagatcgcactactgtactccagcctgggcaacagagcgagacttcatctcaaaaaaaaagatgcctggcacttcatgaggaatagtattcatcattattatttgctttatgaaggtacaataccagaaggcatagtttttttttatcctttttttcacctaacagccatcacaagacatttcccctgtggcatcgtggagtggctgtgtcatgactcccacttgccgcatctgagtggacactttggatgcagccattagtttgatgttattaaaaatgccatgatgggcatgaagctttcatcttttggc

SEQ ID NO: 35105 - DNA, 341 bp, Homo sapiens
tttttttttaatttcaggccactgtcttctagatttgattcaacataaatgttttgataaaattagcacatggataatactatgtgtttcttactgcatcccatcagcaggttcactattggtgatcttaagtttgagtgtgtggcatggtggtgacctctagattgctccacttaaaggtacattctttccttcgtaagtaatctgtgctgtgatacttttaagaccatgtgaatgttctgttcattacaccattcaccagacggttttagtagccactgatgatccatgtttgaatcaattattatccagagtattgcaacaggatcattttctaatta

SEQ ID NO: 35106 - DNA, 508 bp, Homo sapiens
acagggctcggggagggcatcgcccttgggggttgtggggactgagagctgtccactcccctcactctctgggcagtgtcagggtttctcagatgggccagtcttcaatttaggtgaggattattagtaggacacctgcagactgttgtctggggggtctctagggactgggaatccaggaactgagttcagagcccttggggaagaaggaattgtagaaaacaatcagatagcactacttgacttacagttccttatgatttgtagtcacttctgacattattgttgctaaaacttttctcatactttttgtttggcaaacctcctcaagggggctttaagctggaggaggttaccagctctgtctcagtctacacccacatccctgcccccagtaatcctcagatgcaggaccttcccagtgcctgtgacaactaccactgcaggggtgtcccgggggctgcagactcgtggggcatgtggggttctggattccgcagcagcctag

SEQ ID NO: 35107 - DNA, 1606 bp, Homo sapiens
gttaaaattgccatttatttcatcaatactttgatttcccttaacctctgtgatacaagagttttctgatttggggttatatggactactttaggagttgaagtatttcctacacaatttttacatgaaagatcttgactaaggtgataccccatgacacatcctttgcattcaggtttatgttttggctgtggagatccctaactacttgatggctccgggttcttatttaatggtcgtcatttagccaatacatttttattaagagctggctatattcaaggacttagaagcaagattaggatgattgtgaccctttgttttggcctatataggggacttcaaatattaacttatcttagccttagatcatttgcatttatctattacaatatcatttcttttaaaatggcaatgccatattgttgattcctgttatttgtatgcccagattcctccatgtttgtagctagctagttgcttctatcagtgcaacttatttttaccaccctattctaattgttcttcacttttatttaatcattattttaaatatttggattcatttttatatttatgcatgccatttagtttgctcctaaaaatagtgatactggttttagttttttacttactaaatcagtatagccaaatgtccatcttcctagtggtaatatgcgatcagaatttctgagattatttatgtgactatttttggaaaagtttcttttgataaaacatggatttattatatgaaattcttcttgcactgtattacaatatatgctatgatatcccttttatttttttcaacttaaatatgatgttttatattgttttagacttacgaatcgtgtttttcagaatcataagggaatatctatctcctccctcactttccttttatatatattgaaaagtctatgaaattcaagtctagcatttgaattctctatgctatcattgcatttacctaattatttacttttaaattttagctattttcataaaaacagttttgagatgaaggaaacttacacaataaaaggaagatcaataagcaggaaaattagtaactgacagggaatatgaatgaatactcagtatacgtttcggtatgcttgttttctgataaattacttaattttcatttcataggccaaattttaaacaccagttaataaagttatcctaaaagagtctctaatttgaaaagtttttctaacctaggaagactcattttagacccaactgaccagtcaaatatgagtaatttataatatctgtattaaatattgagaagattaataaagttaaaagtttacagttgaatctttttttatcatggtaaaatatacataaaattgatcattttaaccattttttaagtgtacagttcagtgccattaagtacattcacattgttgtgtaaccatcaccaccatccatctccaggatgttctcatcttcccggactgaagcctgtacccattaaatggtaatgccccattccccctcctccccagtccttggtgaccactgttctactttctgtctctataaatttgatgtttctcagtacctcataaaagtgaactcatacaat

SEQ ID NO: 35108 - DNA, 585 bp, Homo sapiens
cagtgtgaattctttcatgtactcgtaaaaaactgggaaaaatgaatgcctttccacaatctttgcatttataaggtctatctccgttgtgtgttatcatgtgtgttagaacacttgtgtgggaaatgaaggctttcccacattcccttacatgcatagggtttctctccagtgtgagttctttcgtgtactcgaatagaactggaacaactgaaggctttcccacattgtttacattcatagggcttttctccagtgtgaatcctttcatgaactcgaagcgaactggaacaactaagagcttttccacattgcttacattcatagggtttttctccaatgtgagtccgctcatgtctttgaaagggctggtgatatatgaaggtttttccacattgtttacatttatagggtttttctccagtgtgactcctttcatgtctttgaaaggatttgagataactaaaggctttctcacactccttacatttatatggcttctcaaatagctcgtatccagtgtgagacctcatgtgtctagtaagggatgagagactctgtgaaggctaaagaagatagtacact

SEQ ID NO: 35109 - DNA, 461 bp, Homo sapiens
agcacttcgggaggccgaggtgggtggatcacttgaggtcaggagtttgagactagcctggccaccatagtgagaacctgcctctaataaaaatataaaaattagccaggcatagtggtgcacacctgtaacccagctatttgggaggctgaggcaggagaatcacttgaacccagctgcagagtttgcagtaagctgagattgcaccactgcactccagcctgggtgacagagcaagactctgtctcaaaacaaacaaacaaaattaaacccagagagttgtaatagtttcccagggccgccaaaacaaatcatcacaaattgggtggtttgagacaacagaaattgattctcttgcagttctggaggccagaagtcccaggtcaaggtcaggctcttggggatgatccctccttgcctcttccagcctctggtggctccaggcgtttcttggctcaggg

SEQ ID NO: 35110 - DNA, 435 bp, Homo sapiens
agagctgccgatactactactaaattcgcgcccggctgcacaaggattggtcaatacctgatatgatcccttccagtggggttgcagggaatcttttatttgatgttgttttcagttaacaaaatctccaggttgtaggccatggtctctgttacctttatctccctggagctcattgcgaaaggaatcctttattaatttggaatttatggtaggaagttttgtgagaccttggcaataatggaggatatcacctttaagaagtacaggttcataagctcttttatctagccacataggccttcttgttattatttcaaagaaagagacttgacgttttatgagtggggtggattgtaggttgagcagaactaatgggagaggtgctggctagagaaagttaaaaatttctgttagctttgcattgagcttttt

SEQ ID NO: 35111 - DNA, 331 bp, Homo sapiens
gacatgtgatttacttatatgacaaatctgtacatgtatccctaaatctaaaataaaagtttttttaaaaagacctatgtttaacttctgaaaaagtttttttctgcttgatttagcctattatcattaaagcttttaaataatgtatttggtatttccttcagtgagtttttcagttccactgtttttgtttggttctttaaaaaaaaaaatctatctccttggtaaatttcttgttcacttcctagactgattttttgagttctttgtttttcaggtttgtcttgcatctcaatgagcttctttaaaatcagtattttgaattattaac

SEQ ID NO: 35112 - DNA, 500 bp, Homo sapiens
ttctctctggtccttcatcctagaatttgcatccggtgtttctaacttctgctcagaaaccgtgaaaataatatattcatttaccgattgattcatccaaacaataattgggtacacactacataccaggtatcgggaataaagagcaatgaaaagcaagtcccttgtcctcaaggagcttagtttaacttaaaagtgttctcctatttaaggccagtgagtggctcacaccagtaatcccagcacgttaggaggctgaggcaggagaatcatttgaggccaggaatttgagaccagcctgggcaacaaagtgagacattgtttctacaaaaaaaattttttttaaaacttagcctggcacagtggtgcgtgcctgtggtccagctacccagaagactgaggcaggaggatcacttgggcccgggagttcgaggctgcagtgagctatgactgtgctactgcactccagcccgagcgacagaacaagaccccatctctta

SEQ ID NO: 35113 - DNA, 400 bp, Homo sapiens
aactagggcaattttgccccagaggatgactggcaatgtccataggcattttgggctgtcacaactggggattggtggcaggaatgctactaaatgtagtagggtacacaggacagcccctccacaccaaagtaagctggcctaaaatgtcgatattgtagaggcttagacactgtaatctaatatatcatcaaatgttatggattccacctctaaaatacagcttaaatccatcaatttctcttcatcttaactactagcatttcctaattcaagtaccattgcctctcacttgaaatactacagtacaacttccctacatccatgcttgctcaacttcaatctactctccatagtgcagtgaaaataaactttttaactcatctgtcccctgcattaa

SEQ ID NO: 35114 - DNA, 392 bp, Homo sapiens
cctttttacagataaggaaaccgaggctagagagtgtaagccccttgctcaaggtcagccagctcataaatggcaaagctgggtgggattcaaacccaggagtccagctcctaacactgctattaaccttcctgcttcctgtctctcctgctcagggcaggggctcagtagatacttgtctactaaagggatgcatggaggaataaaaataagaatagtcacatttattaagcatttgttacctgccagcctttgaccttcacacggctcccctccataatccttgccaaacgtccaatatcatggaaactgctagtgctccattttgcagacgggggcgcaaggacctggggaagtggagtggttggcccaggaggtttggagcctgggtc

SEQ ID NO: 35115 - DNA, 792 bp, Homo sapiens
tttttttttaagtcatgttctgctctggttgaagtggggagcagtgcctgtctgcccaggccctgcgggcactcccatggagatccagagccacctctctggaacccctaggtctccacagtgcagtctgtaagctaaggcaccccagcttctgtcctcagcttgagccaagtgtgtagtgtggccttgactccaagcccagccctggctgagcctctgggagtgggaacaggcagtcctccctctgccctccccacacctgcccagcctgggctccctttgtgagggtcattgtctggctgggctgcaggtgtgctcaacagcgcccggtctctccacagggtgcctattccgccttcgtgtacagctatgctgtggagaagcccctgtctgtgggacacaaggtggctggctacctccccagcctcttctggggcttcatcacactgggccggctcctctccattcccatatcctcaagaatgaagccggccaccatggttttcatcaacgtggtaagcagctgaatagcctcctctctcttctgagagacccaggagaagccgcctcctcctggccctaccccaggacgtttgcccaggcctacattctgccagcaggatgggaactcaggagtagagggaagagaggagagagaggatgacgaggaaggggtgggagcctgggaggtggagcctacctgggtgaccatgaaaagtcccttcccctctctgggctgctgatcttatacccttaaaacataaaaggaaaggtctgtaggaggtgctggct

SEQ ID NO: 35116 - DNA, 324 bp, Homo sapiens
ccatttttaaatagttgctaaaagcaaaagttattactggtgaaaagtccagaaaaaggacactatgtgacaccaagttcagctctcaccacatgtcagatcttgtaaatgttttcttacaagtcactggcatcttaggcaaattcaatctattataatagtcaatctgttgtctatttgaacattcatcaaaaaatcatggtcagtattctcaaattcttagttgcatatgatcagtttccttcaaccaggagttcttcaagggtaaaggtttatattgtatttattttttcttattaataaatgtgtcttccttctaatgcc

SEQ ID NO: 35117 - DNA, 364 bp, Homo sapiens
atgacaggtgaaatcaagtttattttttatagtctgaaagtcaaaggaaagtgagccagaagaaacctaagtattttctgaaaaggcctaaaaggtgatcaacatgggcctccattagttaaataacattttcacaatggcattgagtaagcacagctatttgtcatttctgttttgaaaaataagtgatactgttgtaagtaaagctttttctttaactcttttgacaaagtttgatgtggtaagatgtgttgaactttttgttgttgttgttttgagacagggtttcattattttgcccaggctagagtgcagtgatataatcatgcctcactgcagcctcaacctccctaggctcaggtga

SEQ ID NO: 35118 - DNA, 319 bp, Homo sapiens
ataagatgtgatgtggaacagacatgtttttgaggactggggaccttcagcctgtagaaggggtgagggggtggtggaatagctgcccctaaataaaaactcacttgtggaaaagaggtgagacttattttgtgtggctttgggtaccaaaactaaaactaaaagtggtttgaagcactaagagacagattcttcagcagaaagaataactggactgggtgcggtaatcccagcactttgggaggccgaggcgggtggatctcttgagctcaggagttcgagaccagcctgggtaacatggcaaaaccctttctttacc

SEQ ID NO: 35119 - DNA, 424 bp, Homo sapiens
gccaaaaaaaccctcagtcttactctcctgagaggtactactctatctccttcccttcttagccaaacttgttggaagttttctttgttcagtctccctttcccaagctctttcatttctcaatctaccacaaaatagccagtagaattgctggatactacttttcctcaacttatgccgccctcagcagcatttaaacttgcaacactctcctgttccctagccttctgcaagagcacacgtgcgtctcatctcaggcttttctttctgtatttctggaccgttctccattatttcctgtgtaagctccttttcaaacttcaagtgttgcagtgccctgtcgtcctaaaccctcttttcttccgtgctgtcttcctgggcaatctcaattggtcccatggctttagttatctatatgttttca

SEQ ID NO: 35120 - DNA, 322 bp, Homo sapiens
cacagtgctccccacttccccatcgattgccccatcctcatcccaggcctcagctcacacaggaagtgatggcagagtcacttcctatccaggcacctctgacctatcacctccacaccccacccgtcggaggctgatctccccacgagaaggcatcagactcacccctgtccagggagggtgcctggagagtgagccactctcaaagtcactcagacctgggctcacctggtggctctgccagtcctacctgttgacagtgaaatgttcccaaaatatctggtcaaaatctgcaaacattggagcactgagacctacctcc

SEQ ID NO: 35121 - DNA, 206 bp, Homo sapiens
atttgcctctgtatctctgaaggattttatggatttagctcttatatatagatgcttaatccattttagttaaattttgtatataatgtaaggtaagaatctaatttcattcttttgtatgtggaaatccagttgtctcattattatttgttgaaaagacaaatggtcattcttaaatggagatagttttattccttcccttctaa

SEQ ID NO: 35122 - DNA, 307 bp, Homo sapiens
tttttttaaactagtttcaacagctctgaggcttaataaaaacttgcacaaaaatgtaaatcaactagagaagcttatattcttgatttgtggtaaagaagaaaaaaataaaaaaatctgcaaaaatgcattttcttatttgcatatattttgtcccttctacagggacagaaattgaataaaaccaatcttcaaagaaaaatagaataaaaatatgtagacccaaataatgcaggagccaataaattcaacagagtttcctctttgcagagttagtgtttccacacagacaaagcttctaagtgta

SEQ ID NO: 35123 - DNA, 391 bp, Homo sapiens
accaaatgagcactccaaacagtaagagtttttgaagtatacgctttcttctgagaaatgaacgtgtcccagaggagggtgccttcagatggaccttaagagagatgtggccatcccctgagtcatacaagttttccagatgtcctttcaaaatctctgtcctttccaccgtctctgtcctcacacatagaggaacttttctcacgggaaggttgcgatgaagagcataaacccaggagtcaggcacgttgtagctttgagtacgactctgttccagatctgtaatctttggcaaatggaactcacctgcaacgatacctacttaaatatagttgtgtgatgattaaataataaatatgaaagtaaataacatagggctttgaagttcaag

SEQ ID NO: 35124 - DNA, 357 bp, Homo sapiens
ttttgtagtgagtttgtgatcccaagattttattttccttttacaatcacatggaatggcacccatttatttagaattgtttctctactgtctcctcacctgctggagactgtgagcagctttatgtctctgtgcctggcaaagcacctggcacccaccatcatataggaaataataaatgtccgctgtcctggagtcccaggggcccagaggagagtgttgtcttgctggcattctgtcccaggttgtgctcaggctgttgcattgagagtcagttctgctggccgtggactggtctctaagtatctgctagagtcttctttataacccccagtgtgagcaatacaatacactctg

SEQ ID NO: 35125 - DNA, 762 bp, Homo sapiens
tctcgtcttgacctcttcctcttgaccttgagtcccttgagtagggggactctgtgttggtcaacttctattttcaacctcaaagaaagttggagaggactcctgcatatgctgtaaagggtgtcctctcagatttactgatcgaaatagacaggggcagttggctgtgcatcaatgcagaatgacaaacagcatgtcagggcatttgtgatgccaatagtggcctttgaaagtctactttgtgcaacctaacacattgactaggcctgtgacctgacccactcctagagaaaggggaaaaactcagagcttgcctgccaggtaacatttctgcctcctccttgctccagtctgctctgagagccagcgaagtctctctcaccagcctatcatttgtctgactcaggcttttgtctgggctgaaggctattacattttgaggagaatgacatttctctgggacccctgggggtctgtatactgagtgactgcccagtgagccgggaaagcaaagtgtggttaatactttggccggaaatacgacagaaaagtgatgaaacaagtctccatcttgctccttgctcctcttccctttctcttctcccacacctttgctctgctcttccactcttcaccctaaatcagcaaccttcaagtgatgatgacaaaaccataattcaggagcacgtggtcttcagagaacttcaaagaaaatgagcaaaggtaaaggggtgtggtggggaattggatctgaaaaaaaaa

SEQ ID NO: 35126 - DNA, 171 bp, Homo sapiens
tctccctgggagaccaaaagccttcatacatctcaagttgggggacaaaaaagggggaagggggggcacgaaggcttttggtctccctgggagtgggtggaggcagccagggcttacctgtacactgacttgagaccagttgaataaaagtgcacaccttaaaaaaaaaaa

SEQ ID NO: 35127 - DNA, 771 bp, Homo sapiens
tctccctgggagaccaaaagccttcatacatctcaagttgggggacaaaaaagggggaagggggggcacgaaggcttttggtctccctgggagtgggtggaggcagccagggcttacctgtacactgacttgagaccagttgaataaaagtgcacaccttaaaaaaaaaaaaaaaaaacaaaaacaaaacaacttgtgttggggggcgcctgtgggcccttggagaaaaggctttttctagagaaccacatttgcgcgttgtgggggcgcgcggggtggcccccaagtgagagggtacaagggtgggcacacactgtggggcacaaatacggctggtgggtccccccataaaggaggagagagaatccccctgggggggccaatctgagaacacaaaaggagcgcggcacgagaggaggaaatctccatcaaccccaacaatattatagaagacaaaaacgcgcgcctccacgggggggggacaaacaccacggaggaagcgacggtgttctctgatgagagaccacaaaatatgattcttcacaagatatgttggggagcgctcttcttctgaggaggaggaggagccatcacatataataacgcgggagggggaaccttccttatatattcaaccaacgcgagggcgaagcagctgatccaccaaaagagccgcagcaggaagccgctctgcgtaagacttcatatatctcaaacaaatttattataagagacgccacacgacgtggcctcgtcgttgggtcggaatca

SEQ ID NO: 35128 - DNA, 471 bp, Homo sapiens
agacagacagacagagacagacataccaactgatctccatatgtaccttatttagatcccaattcaaatgaattaactagtaaaatctgggcatttggagatttgaaccctgattggaaatggggcaaaattaggggagagttgttaaatttttctaggtccaataataactttgtgtttttattttaaaagcacctattggctgggcgcggtggctcatgcctgtaatgccagcactttgggaggccgaggcggtgaatcacttgaggtcaggagttcgagaccagcctggccaacatgatgaaacccccatctctactaaaaatacaaaaattagctgggaatggtggcgcacgcctgtaatcccagacaggagaattgctctaaccagggaggtagaggttgcaggtgagctgaaattgcaccagtgcactccagcctgggtaacagaatgagactctgtctcaaaaa

SEQ ID NO: 35129 - DNA, 653 bp, Homo sapiens
aattctccatgattgaagctgttgtctcaactgccctgggcagagtctggggaaagttaggagcagggaggtgttatctgagcaggccctagtcctactggtgtcttgagatgaatgttctattcgggaaccccacagtgagttcactttagagcatcattttagcttatttttaggattagaaataattagttgtgccttctgagcaccctttgacactctcaagaggcgtttctcacacgtttaaattgtgtgatctgtgtttagtttctccctgccccatacatgttgatatgttttggttcagatgtcacctgtatacttagtattactttccatagcagttttcacctgtggacaggttaacatggtgtgaatggtagaaggagccggtctggttttcctagacaagtctgtaaaacaaggcgtgggttagctaatcagtgaagtcttctaggttctgggattataactgacccttaggggcccttccatgctgaagtgtgcagggttggttttgaggctgccactgagtgccaaggtctgccaacatcagcacagttgtctgccaagcatgaggagtcaggggtgcatcctccatcatggaaaggcttgggggagaccacacctgtgttcctcttaagtattttgga

SEQ ID NO: 35130 - DNA, 289 bp, Homo sapiens
gcacccccaccccagccaccacctgcacccggcccaggtctcctgcctccgactctcctttttgggtccctcggagtcgtcctggcctcgggcagcccaggctgggcacaggaggcagcgccaagtcaccaggcacaaggcatggggtggggggcagcgattctggctgtggcggacagaggaggatccctgcatccctggcccacctccacccacaaccgacaccctcgccgaaggcctccctgcgcctcagtctccccaacaacaacatgatgtcagaaggcctgag

SEQ ID NO: 35131 - DNA, 596 bp, Homo sapiens
ctcattataaatgagaaacttataaattataaatatacactcattataaatgaagattgcttggtaatggactaatggataattgtttctgcttctttaggatgttctaaatttttcccaagttttgtacattaagcacaaaattataacaggaaaataaagaaaagaatttaaaataaacatgcaaccaaattttaaacagataagtatatcgtattagataggaatcaccatactgggtcagtcacccctcctccaaatttttctttattcttttttttttattatactttaagttttagggtacatgtgcacaacgtcagcgttttgttacatatgtatacatgtgccatgttggtgtgctgtacccattaactcgtcatttaccattaggtatatctcctaatgctatccctcccccctccccccaccccacaataggccctggtgtgtgatgttccccttcctgtgtccatgtgatctcattgttcgattcccacctatgagtgagaatacgtggtgtttggttttttgtccttgtattagtttgctgagaatgatggtttccagcttcatccatgtccctacaaaggaca

SEQ ID NO: 35132 - DNA, 305 bp, Homo sapiens
gaggcattcacacattggacagctatgaggacatgtcctaagtaaacaaatctatgtaccaaaaaactgtgattcacagtatgactctaatagggaaaactgatcatctgaaagcccaacagtggattaataaaatggtcatctaatcacaatgctgaaatgatggacagccatttgaattgatgtttacaaaaacgtttttagggccgggcgcggtggcccacacctgtaatcccagcattttgggaggccaaggcgggtggattaccggaggttgggagttcgagaccagcctgaccaacatg

SEQ ID NO: 35133 - DNA, 262 bp, Homo sapiens
ttttttttttgcaatggaaatgtacggggtattcttagggatactgtccatttttaagaaaagtccattaccaagatataacaaattacataaagttaactatcatatgatatttataaagcatactacacatatatacaagtttagaaaaccaatcgactgtgaatgaactgttgagaagtgaggaaaacacgtattgagtactgaggtcaagaaagagtacattgcagttctagaggtcttatatgtatttcattgtgct

SEQ ID NO: 35134 - DNA, 502 bp, Homo sapiens
tattttctaatatcttaagcagttcagacagtgacttgcttgagtcatcttctgaagctttaaaaacaattgatgaattggccttcaagatagacctaaatagcacatcacatgtgaatattacaactcggaacttggctctcagcgtatcatccctgttaccagggacaaatgcaatttcaaattttagcattggtcttccaagcaataatgaatcgtatttccaggtaatgagccagtggtttctttcattttaattaattagttagacatataaaaacttgctgatcacttagcagttgctgcttccaagaggtcttggtccatgaagtggcaaggtctgaatgttggctaagtttaactagagcagtagccataaagtattgtgggagctcagagtgggtatgctttcataatctgggtgacaggggtggtcagcttaccttctacaagaggggttactggagctaagcatgagtaggggccaccatacttggggtga

SEQ ID NO: 35135 - DNA, 4570 bp, Homo sapiens
taaaacccaaatgagatctacagctctgtctgtaggggtttatccaggagttgcagtgactactgtagatacaaagggaagtcctggtactggctaatttgaacttgcaattgttcactcgcctaactatacatgtggaataaagttattaccattcaattatgattacttgaccaatatatctgtgtgtgtgtgacagatggattttgagagtggacaagtggatccactggcatctgtaattttgcctccaaacttacttgagaatttaagtccagaagattctgtattagttagaagagcacagtttactttcttcaacaaaactggacttttccaggatgtaggaccccaaagaaaaactttagtgagttatgtgatggcgtgcagtattggaaacattactatccagaatctgaaggatcctgttcaaataaaaatcaaacatacaagaactcaggaagtgcatcatcccatctgtgccttctgggatctgaacaaaaacaaaagttttggaggatggaacacgtcaggatgtgttgcacacagagattcagatgcaagtgagacagtctgcctgtgtaaccacttcacacactttggagttctgatggaccttccaagaagtgcctcacagttagatgcaagaaacactaaagtcctcactttcatcagctatattgggtgtggaatatctgctattttttcagcagcaactctcctgacatatgttgcttttgagaaattgcgaagggattatccctccaaaatcttgatgaacctgagcacagccctgctgttcctgaatctcctcttcctcctagatggctggatcacctccttcaatgtggatggactttgcattgctgttgcagtcctgttgcatttcttccttctggcaacctttacctggatggggctagaagcaattcacatgtacattgctctagttaaagtatttaacacttacattcgccgatacattctaaaattctgcatcattggctggggtttgcctgccttagtggtgtcagttgttctagcgagcagaaacaacaatgaagtctatggaaaagaaagttatgggaaagaaaaaggtgatgaattctgttggattcaagatccagtcatattttatgtgacctgtgctgggtattttggagtcatgttttttctgaacattgccatgttcattgtggtaatggtgcagatctgtgggaggaatggcaagagaagcaaccggaccctgagagaagaagtgttaaggaacctgcgcagtgtggttagcttgacctttctgttgggcatgacatggggttttgcattctttgcctggggacccttaaatatccccttcatgtacctcttctccatcttcaattcattacaaggcttatttatattcatcttccactgtgctatgaaggagaatgttcagaaacagtggcggcggcatctctgctgtggtagatttcggttagcagataactcagattggagtaagacagctaccaatatcatcaagaaaagttctgataatctaggaaaatctttgtcttcaagctccattggttccaactcaacctatcttacatccaaatctaaatccagctctaccacctatttcaaaaggaatagccacacagacagtgcttccatggacaagtccttgtcaaaactggcccatgctgatggagatcaaacatcaatcatccctgtccatcaggtcattgataaggtcaagggttattgcaatgctcattcagacaacttctataaaaatattatcatgtcagacaccttcagccacagcacaaagttttaatgtctttaagaaaaagaaatcaatctgcagaaatgtgaagatttgcaagcagtgtaaactgcaactagtgatgtaaatgtgctattacctaggtaactgcatatatataaggaatgtattttgttaagaaggcttttgtgaaattcagaatttttctttttaatatatttcttccatggaagagttgtcatcactaaaacttcagtactgagagtaacatgactcagtagccacagaagctatgatttgtaaaatatataattgaatcagagtaatcataatgcaggggagacattcaaattagagacaagggagaagcaatgctgaggaagaccctagatagagctcattttactccacctaatcgttatatctggatatacccattttctgcatcttctttctcaacaataaaaaatgtaactattttgaatgcccacaaatcccattccagtgttactttctgtgaatgcagtaccatattctcattttcaatgacatttcaaccacaggcagaaaagactgtttactccttgacccaaagattaaaaaggattttttattattttaaatattacaccttcagaaccataacatgcttaagaaaactttcccaaaatgttgacctagttaaatgaggctatataaatttctaatattttacttattctattcaaggcatagggccaaagcattaagtataatttaatcccatacattcgagttaagtttagtgttgatgttccatcattctggacctcccaggagttgtttaagaatgaatctcttacacctctactttgcccctctactgtatattaagcccataggcttgtgggaggaaggagaatttccattaggcaagctgtatgcagtggaattttccttttaggagacacacaattaagactctctggttctgtccttgctttggagactttaagacatttcctaaagcacaaataaaagcctcgtatttccccattgagagttttgttccaaggaatatgaagtgagacatatgggtgagtcataataatcaaaataatttatgaagagctgggtctgcaatagctagtctaaaaactacttgtgtgtcagtcctctggttatagtatataagagcctgaggaggtctggcaagatagatggtgtattatttatggatcaggctgctgcatacaaaccttgcatactattatgcagcttacctaactctcagactattctgagtaatgcttgcttgctaatgaatgtataggagaccacattgtaattgttcttagatgatggagtccatgcagtttcttagaaatcggtctcagtgcatgctgtgctttttcacatttgctctgggttatctgggaagtatcaggttctgggaggcaacagcattaagtgataagaaaaggagacattctggcaaagccaatctgcttaaaggcaaagtccagaacctggaacctagaggcctttctctctgcacgaaaaacaggtagtttgcagtctgagatatgggagagcttttaggctacacagcaacccaagggacctctcaccttttgctgagcttcaatcaggaagctatttgcctggctccagcagatgatgagataatgaggtagtgggttttttattactgttccattttgcaacatcctgcaacaccatcctgggagacaagagcattacccagcttggctttcacgggggagggttgtattcagtaaaaaagaatagtaaatataaggtcactgagattctaagtaagatagtaaatctaaggtcactgagccaaatccttttcaataggcatatattaacaggctgcttattttggcggaggttacatatggatgaaaatgaatcttagtcactgaatattcatatacatttcccccaaaaccttagacattcatagtagattttaattagttagctttctaactagtcagatttctgcccaaagtgcttagtcaatagtaattaagatatagcttcaaaaatggctttgcttttgatttctactcatattcgtatggctccagaaaaatatttttttcatatttgacaatgtcagctccactttagaaattttcaataaccagatgagaaaaaaattaagaaattgctcaagggaaacatttgtaaatggatttgaaagattgagccaaattctgttgtcagttctaagcatgcagttctcacctccatttagtcccccatcagaacagaggtcaggaatttagctggggagcctaaatttagttcagcttacctttgagaatagcatcaattcagactctcttttcattatgttttcttttctttttccctctttttaaactacattgtgttagagtcatagtctaggatcctgagagattttccattcttgtcaccattcacttgcattgtaaagattttctttgtctgttgttggcatagattcttttgtacatatttatttatttgtgtttatatatgtcaattggtttcctttcttagcttgatattgcctagctttgttgttttaattaactttctattagagagactgtatatattttttctaaatactttgtgaaatcatttttggtagcaatatctttgaatatgatgaataaaagtgactgtgagtgcaaatagaattagcagtaagaagctactctagctaatttgccattttacttaaatggaaaatgtttttcaaataaatacttatgttgttcatgttccaagtta

SEQ ID NO: 35136 - DNA, 4616 bp, Homo sapiens
taaaacccaaatgagatctacagctctgtctgtaggggtttatccaggagttgcagtgactactgtagatacaaagggaagtcctggtactggctaatttgaacttgcaattgttcactcgcctaactatacatgtggaataaagttattaccattcaattatgattacttgaccaatatatctgtgtgtgtgtgacagatggattttgagagtggacaagtggatccactggcatctgtaattttgcctccaaacttacttgagaatttaagtccagaagattctgtattagttagaagagcacagtttactttcttcaacaaaactggacttttccaggatgtaggaccccaaagaaaaactttagtgagttatgtgatggcgtgcagtattggaaacattactatccagaatctgaaggatcctgttcaaataaaaatcaaacatacaagaactcaggaagtgcatcatcccatctgtgccttctgggatctgaacaaaaacaaaagttttggaggatggaacacgtcaggatgtgttgcacacagagattcagatgcaagtgagacagtctgcctgtgtaaccacttcacacactttggagttctgatggaccttccaagaagtgcctcacagttagatgcaagaaacactaaagtcctcactttcatcagctatattgggtgtggaatatctgctattttttcagcagcaactctcctgacatatgttgcttttgagaaattgcgaagggattatccctccaaaatcttgatgaacctgagcacagccctgctgttcctgaatctcctcttcctcctagatggctggatcacctccttcaatgtggatggactttgcattgctgttgcagtcctgttgcatttcttccttctggcaacctttacctggatggggctagaagcaattcacatgtacattgctctagttaaagtatttaacacttacattcgccgatacattctaaaattctgcatcattggctggggtttgcctgccttagtggtgtcagttgttctagcgagcagaaacaacaatgaagtctatggaaaagaaagttatgggaaagaaaaaggtgatgaattctgttggattcaagatccagtcatattttatgtgacctgtgctgggtattttggagtcatgttttttctgaacattgccatgttcattgtggtaatggtgcagatctgtgggaggaatggcaagagaagcaaccggaccctgagagaagaagtgttaaggaacctgcgcagtgtggttagcttgacctttctgttgggcatgacatggggttttgcattctttgcctggggacccttaaatatccccttcatgtacctcttctccatcttcaattcattacaaggcttatttatattcatcttccactgtgctatgaaggagaatgttcagaaacagtggcggcggcatctctgctgtggtagatttcggttagcagataactcagattggagtaagacagctaccaatatcatcaagaaaagttctgataatctaggaaaatctttgtcttcaagctccattggttccaactcaacctatcttacatccaaatctaaatccagctctaccacctatttcaaaaggaatagccacacagataatgtctcctatgagcattccttcaacaaaagtggatcactcagacagtgcttccatggacaagtccttgtcaaaactggcccatgctgatggagatcaaacatcaatcatccctgtccatcaggtcattgataaggtcaagggttattgcaatgctcattcagacaacttctataaaaatattatcatgtcagacaccttcagccacagcacaaagttttaatgtctttaagaaaaagaaatcaatctgcagaaatgtgaagatttgcaagcagtgtaaactgcaactagtgatgtaaatgtgctattacctaggtaactgcatatatataaggaatgtattttgttaagaaggcttttgtgaaattcagaatttttctttttaatatatttcttccatggaagagttgtcatcactaaaacttcagtactgagagtaacatgactcagtagccacagaagctatgatttgtaaaatatataattgaatcagagtaatcataatgcaggggagacattcaaattagagacaagggagaagcaatgctgaggaagaccctagatagagctcattttactccacctaatcgttatatctggatatacccattttctgcatcttctttctcaacaataaaaaatgtaactattttgaatgcccacaaatcccattccagtgttactttctgtgaatgcagtaccatattctcattttcaatgacatttcaaccacaggcagaaaagactgtttactccttgacccaaagattaaaaaggattttttattattttaaatattacaccttcagaaccataacatgcttaagaaaactttcccaaaatgttgacctagttaaatgaggctatataaatttctaatattttacttattctattcaaggcatagggccaaagcattaagtataatttaatcccatacattcgagttaagtttagtgttgatgttccatcattctggacctcccaggagttgtttaagaatgaatctcttacacctctactttgcccctctactgtatattaagcccataggcttgtgggaggaaggagaatttccattaggcaagctgtatgcagtggaattttccttttaggagacacacaattaagactctctggttctgtccttgctttggagactttaagacatttcctaaagcacaaataaaagcctcgtatttccccattgagagttttgttccaaggaatatgaagtgagacatatgggtgagtcataataatcaaaataatttatgaagagctgggtctgcaatagctagtctaaaaactacttgtgtgtcagtcctctggttatagtatataagagcctgaggaggtctggcaagatagatggtgtattatttatggatcaggctgctgcatacaaaccttgcatactattatgcagcttacctaactctcagactattctgagtaatgcttgcttgctaatgaatgtataggagaccacattgtaattgttcttagatgatggagtccatgcagtttcttagaaatcggtctcagtgcatgctgtgctttttcacatttgctctgggttatctgggaagtatcaggttctgggaggcaacagcattaagtgataagaaaaggagacattctggcaaagccaatctgcttaaaggcaaagtccagaacctggaacctagaggcctttctctctgcacgaaaaacaggtagtttgcagtctgagatatgggagagcttttaggctacacagcaacccaagggacctctcaccttttgctgagcttcaatcaggaagctatttgcctggctccagcagatgatgagataatgaggtagtgggttttttattactgttccattttgcaacatcctgcaacaccatcctgggagacaagagcattacccagcttggctttcacgggggagggttgtattcagtaaaaaagaatagtaaatataaggtcactgagattctaagtaagatagtaaatctaaggtcactgagccaaatccttttcaataggcatatattaacaggctgcttattttggcggaggttacatatggatgaaaatgaatcttagtcactgaatattcatatacatttcccccaaaaccttagacattcatagtagattttaattagttagctttctaactagtcagatttctgcccaaagtgcttagtcaatagtaattaagatatagcttcaaaaatggctttgcttttgatttctactcatattcgtatggctccagaaaaatatttttttcatatttgacaatgtcagctccactttagaaattttcaataaccagatgagaaaaaaattaagaaattgctcaagggaaacatttgtaaatggatttgaaagattgagccaaattctgttgtcagttctaagcatgcagttctcacctccatttagtcccccatcagaacagaggtcaggaatttagctggggagcctaaatttagttcagcttacctttgagaatagcatcaattcagactctcttttcattatgttttcttttctttttccctctttttaaactacattgtgttagagtcatagtctaggatcctgagagattttccattcttgtcaccattcacttgcattgtaaagattttctttgtctgttgttggcatagattcttttgtacatatttatttatttgtgtttatatatgtcaattggtttcctttcttagcttgatattgcctagctttgttgttttaattaactttctattagagagactgtatatattttttctaaatactttgtgaaatcatttttggtagcaatatctttgaatatgatgaataaaagtgactgtgagtgcaaatagaattagcagtaagaagctactctagctaatttgccattttacttaaatggaaaatgtttttcaaataaatacttatgttgttcatgttccaagtta

SEQ ID NO: 35137 - DNA, 4103 bp, Homo sapiens
  misc_feature (3)..(4): n is a, c, g, or t
  misc_feature (8)..(8): n is a, c, g, or t
  misc_feature (11)..(11): n is a, c, g, or t
  misc_feature (17)..(18): n is a, c, g, or t
ttnnttgngtnactttnnagctttaaaaacaattgatgaattggccttcaagatagacctaaatagcacatcacatgtgaatattacaactcggaacttggctctcagcgtatcatccctgttaccagggacaaatgcaatttcaaattttagcattggtcttccaagcaataatgaatcgtatttccagatggattttgagagtggacaagtggatccactggcatctgtaattttgcctccaaacttacttgagaatttaagtccagaagattctgtattagttagaagagcacagtttactttcttcaacaaaactggacttttccaggatgtaggaccccaaagaaaaactttagtgagttatgtgatggcgtgcagtattggaaacattactatccagaatctgaaggatcctgttcaaataaaaatcaaacatacaagaactcaggaagtgcatcatcccatctgtgccttctgggatctgaacaaaaacaaaagttttggaggatggaacacgtcaggatgtgttgcacacagagattcagatgcaagtgagacagtctgcctgtgtaaccacttcacacactttggagttctgatggaccttccaagaagtgcctcacagttagatgcaagaaacactaaagtcctcactttcatcagctatattgggtgtggaatatctgctattttttcagcagcaactctcctgacatatgttgcttttgagaaattgcgaagggattatccctccaaaatcttgatgaacctgagcacagccctgctgttcctgaatctcctcttcctcctagatggctggatcacctccttcaatgtggatggactttgcattgctgttgcagtcctgttgcatttcttccttctggcaacctttacctggatggggctagaagcaattcacatgtacattgctctagttaaagtatttaacacttacattcgccgatacattctaaaattctgcatcattggctggggtttgcctgccttagtggtgtcagttgttctagcgagcagaaacaacaatgaagtctatggaaaagaaagttatgggaaagaaaaaggtgatgaattctgttggattcaagatccagtcatattttatgtgacctgtgctgggtattttggagtcatgttttttctgaacattgccatgttcattgtggtaatggtgcagatctgtgggaggaatggcaagagaagcaaccggaccctgagagaagaagtgttaaggaacctgcgcagtgtggttagcttgacctttctgttgggcatgacatggggttttgcattctttgcctggggacccttaaatatccccttcatgtacctcttctccatcttcaattcattacaaggcttatttatattcatcttccactgtgctatgaaggagaatgttcagaaacagtggcggcggcatctctgctgtggtagatttcggttagcagataactcagattggagtaagacagctaccaatatcatcaagaaaagttctgataatctaggaaaatctttgtcttcaagctccattggttccaactcaacctatcttacatccaaatctaaatccagctctaccacctatttcaaaaggaatagccacacagataatgtctcctatgagcattccttcaacaaaagtggatcactcagacagtgcttccatggacaagtccttgtcaaaactggcccatgctgatggagatcaaacatcaatcatccctgtccatcaggtcattgataaggtcaagggttattgcaatgctcattcagacaacttctataaaaatattatcatgtcagacaccttcagccacagcacaaagttttaatgtctttaagaaaaagaaatcaatctgcagaaatgtgaagatttgcaagcagtgtaaactgcaactagtgatgtaaatgtgctattacctaggtaactgcatatatataaggaatgtattttgttaagaaggcttttgtgaaattcagaatttttctttttaatatatttcttccatggaagagttgtcatcactaaaacttcagtactgagagtaacatgactcagtagccacagaagctatgatttgtaaaatatataattgaatcagagtaatcataatgcaggggagacattcaaattagagacaagggagaagcaatgctgaggaagaccctagatagagctcattttactccacctaatcgttatatctggatatacccattttctgcatcttctttctcaacaataaactgtccttgctttggagactttaagacatttcctaaagcacaaataaaagcctcgtatttccccattgagagttttgttccaaggaatatgaagtgagacatatgggtgagtcataataatcaaaataatttatgaagagctgggtctgcaatagctagtctaaaaactacttgtgtgtcagtcctctggttatagtatataagagcctgaggaggtctggcaagatagatggtgtattatttatggatcaggctgctgcatacaaaccttgcatactattatgcagcttacctaactctcagactattctgagtaatgcttgcttgctaatgaatgtataggagaccacattgtaattgttcttagatgatggagtccatgcagtttcttagaaatcggtctcagtgcatgctgtgctttttcacatttgctctgggttatctgggaagtatcaggttctgggaggcaacagcattaagtgataagaaaaggagacattctggcaaagccaatctgcttaaaggcaaagtccagaacctggaacctagaggcctttctctctgcacgaaaaacaggtagtttgcagtctgagatatgggagagcttttaggctacacagcaacccaagggacctctcaccttttgctgagcttcaatcaggaagctatttgcctggctccagcagatgatgagataatgaggtagtgggttttttattactgttccattttgcaacatcctgcaacaccatcctgggagacaagagcattacccagcttggctttcacgggggagggttgtattcagtaaaaaagaatagtaaatataaggtcactgagattctaagtaagatagtaaatctaaggtcactgagccaaatccttttcaataggcatatattaacaggctgcttattttggcggaggttacatatggatgaaaatgaatcttagtcactgaatattcatatacatttcccccaaaaccttagacattcatagtagattttaattagttagctttctaactagtcagatttctgcccaaagtgcttagtcaatagtaattaagatatagcttcaaaaatggctttgcttttgatttctactcatattcgtatggctccagaaaaatatttttttcatatttgacaatgtcagctccactttagaaattttcaataaccagatgagaaaaaaattaagaaattgctcaagggaaacatttgtaaatggatttgaaagattgagccaaattctgttgtcagttctaagcatgcagttctcacctccatttagtcccccatcagaacagaggtcaggaatttagctggggagcctaaatttagttcagcttacctttgagaatagcatcaattcagactctcttttcattatgttttcttttctttttccctctttttaaactacattgtgttagagtcatagtctaggatcctgagagattttccattcttgtcaccattcacttgcattgtaaagattttctttgtctgttgttggcatagattcttttgtacatatttatttatttgtgtttatatatgtcaattggtttcctttcttagcttgatattgcctagctttgttgttttaattaactttctattagagagactgtatatattttttctaaatactttgtgaaatcatttttggtagcaatatctttgaatatgatgaataaaagtgactgtgagtgcaaatagaattagcagtaagaagctactctagctaatttgccattttacttaaatggaaaatgtttttcaaataaatacttatgttgttcatgttccaagtta

SEQ ID NO: 35138 - DNA, 4635 bp, Homo sapiens
  misc_feature (3)..(4): n is a, c, g, or t
  misc_feature (8)..(8): n is a, c, g, or t
  misc_feature (11)..(11): n is a, c, g, or t
  misc_feature (17)..(18): n is a, c, g, or t
ttnnttgngtnactttnnagctttaaaaacaattgatgaattggccttcaagatagacctaaatagcacatcacatgtgaatattacaactcggaacttggctctcagcgtatcatccctgttaccagggacaaatgcaatttcaaattttagcattggtcttccaagcaataatgaatcgtatttccagatggattttgagagtggacaagtggatccactggcatctgtaattttgcctccaaacttacttgagaatttaagtccagaagattctgtattagttagaagagcacagtttactttcttcaacaaaactggacttttccaggatgtaggaccccaaagaaaaactttagtgagttatgtgatggcgtgcagtattggaaacattactatccagaatctgaaggatcctgttcaaataaaaatcaaacatacaagaactcaggaagtgcatcatcccatctgtgccttctgggatctgaacaaaaacaaaagttttggaggatggaacacgtcaggatgtgttgcacacagagattcagatgcaagtgagacagtctgcctgtgtaaccacttcacacactttggagttctgatggaccttccaagaagtgcctcacagttagatgcaagaaacactaaagtcctcactttcatcagctatattgggtgtggaatatctgctattttttcagcagcaactctcctgacatatgttgcttttgagaaattgcgaagggattatccctccaaaatcttgatgaacctgagcacagccctgctgttcctgaatctcctcttcctcctagatggctggatcacctccttcaatgtggatggactttgcattgctgttgcagtcctgttgcatttcttccttctggcaacctttacctggatggggctagaagcaattcacatgtacattgctctagttaaagtatttaacacttacattcgccgatacattctaaaattctgcatcattggctggggtttgcctgccttagtggtgtcagttgttctagcgagcagaaacaacaatgaagtctatggaaaagaaagttatgggaaagaaaaaggtgatgaattctgttggattcaagatccagtcatattttatgtgacctgtgctgggtattttggagtcatgttttttctgaacattgccatgttcattgtggtaatggtgcagatctgtgggaggaatggcaagagaagcaaccggaccctgagagaagaagtgttaaggaacctgcgcagtgtggttagcttgacctttctgttgggcatgacatggggttttgcattctttgcctggggacccttaaatatccccttcatgtacctcttctccatcttcaattcattacaaggcttatttatattcatcttccactgtgctatgaaggagaatgttcagaaacagtggcggcggcatctctgctgtggtagatttcggttagcagataactcagattggagtaagacagctaccaatatcatcaagaaaagttctgataatctaggaaaatctttgtcttcaagctccattggttccaactcaacctatcttacatccaaatctaaatccagctctaccacctatttcaaaaggaatagccacacagataatgtctcctatgagcattccttcaacaaaagtggatcactcagacagtgcttccatggacaagtccttgtcaaaactggcccatgctgatggagatcaaacatcaatcatccctgtccatcaggtcattgataaggtcaagggttattgcaatgctcattcagacaacttctataaaaatattatcatgtcagacaccttcagccacagcacaaagttttaatgtctttaagaaaaagaaatcaatctgcagaaatgtgaagatttgcaagcagtgtaaactgcaactagtgatgtaaatgtgctattacctaggtaactgcatatatataaggaatgtattttgttaagaaggcttttgtgaaattcagaatttttctttttaatatatttcttccatggaagagttgtcatcactaaaacttcagtactgagagtaacatgactcagtagccacagaagctatgatttgtaaaatatataattgaatcagagtaatcataatgcaggggagacattcaaattagagacaagggagaagcaatgctgaggaagaccctagatagagctcattttactccacctaatcgttatatctggatatacccattttctgcatcttctttctcaacaataaactgtccttgctttggagactttaagacatttcctaaagcacaaataaaagcctcgtatttccccattgagagttttgttccaaggaatatgaagtgagacatatgggtgagtcataataatcaaaataatttatgaagagctgggtctgcaatagctagtctaaaaactacttgtgtgtcagtcctctggttatagtatataagagcctgaggaggtctggcaagatagatggtgtattatttatggatcaggctgctgcatacaaaccttgcatactattatgcagcttacctaactctcagactattctgagtaatgcttgcttgctaatgaatgtataggagaccacattgtaattgttcttagatgatggagtccatgcagtttcttagaaatcggtctcagtgcatgctgtgctttttcacatttgctctgggttatctgggaagtatcaggttctgggaggcaacagcattaagtgataagaaaaggagacattctggcaaagccaatctgcttaaaggcaaagtccagaacctggaacctagaggcctttctctctgcacgaaaaacaggtagtttgcagtctgagatatgggagagcttttaggctacacagcaacccaagggacctctcaccttttgctgagcttcaatcaggaagctatttgcctggctccagcagatgatgagataatgaggtagtgggttttttattactgttccattttgcaacatcctgcaacaccatcctgggagacaagagcattacccagcttggctttcacgggggagggttgtattcagtaaaaaagaatagtaaatataaggtcactgagattctaagtaagatagtaaatctaaggtcactgagccaaatccttttcaataggcatatattaacaggctgcttattttggcggaggttacatatggatgaaaatgaatcttagtcactgaatattcatatacatttcccccaaaaccttagacattcatagtagattttaattagttagctttctaactagtcagatttctgcccaaagtgcttagtcaatagtaattaagatatagcttcaaaaatggctttgcttttgatttctactcatattcgtatggctccagaaaaatatttttttcatatttgacaatgtcagctccactttagaaattttcaataaccagatgagaaaaaaattaagaaattgctcaagggaaacatttgtaaatggatttgaaagattgagccaaattctgttgtcagttctaagcatgcagttctcacctccatttagtcccccatcagaacagaggtcaggaatttagctggggagcctaaatttagttcagcttacctttgagaatagcatcaattcagactctcttttcattatgttttcttttctttttccctctttttaaactacattgtgttagagtcatagtctaggatcctgagagattttccattcttgtcaccattcacttgcattgtaaagattttctttgtctgttgttggcatagattcttttgtacatatttatttatttgtgtttatatatgtcaattggtttcctttcttagcttgatattgcctagctttgttgttttaattaactttctattagagagactgtatatattttttctaaatactttgtgaaatcatttttggtagcaatatctttgaatatgatgaataaaagtgactgtgagtgcaaatagaattagcagtaagaagctactctagctaatttgccattttacttaaatggaaaatgtttttcaaataaatacttatgttgttcatgttccaagttaaaaaaaaaagaaaaaaaaaacaaaaaaaaaaaacacaaaaacaaaggaagacagacgacaaagaaaaccaacacccccacaacaacagccccgaggcaccgggcgcagcacgccagcaaagacagacacccgacccgcgaagaccggcacagccaaggaaccatcgcgacccacccagggagcagacagcgctaggaaccgcacgctagcgagacgcaccaaccgaagcagagcacacgtcggccacaccgactcgcacggccaaggcgcgcaaccacacaaccccgcatcgcggccccgagccccacgcccaccctcaggaacaaccatcatagcaacaacgcagccaaaaagtgatacgaccgtcccaagcatcgcccagacacgccacaccgcaccaagccaaccctaccagcgaaagagatgatcactgcgaagaaacacaaaaccaagaacacagaacaacaaggcaacgagggaaaaaaatagccataccacgaaggacacaacggaagcaagaagacaaaccgag

SEQ ID NO: 35139 - DNA, 1252 bp, Homo sapiens
ggtgcggtggctcacgcatgtaatcccagcactttgggaggctgaggtgagcagatcacgagctcaggagtttgagaccagcctggcaaatatggtgaagccccgcctctattaaaaatacaaaaattagccaggggtggtggcatgcgcctgtaatcccagctactcagcagattgaggcaggagacaagagcattacccagcttggctttcacgggggagggttgtattcagtaaaaaagaatagtaaatataaggtcactgagattctaagtaagatagtaaatctaaggtcactgagccaaatccttttcaataggcatatattaacaggctgcttattttggcggaggttacatatggatgaaaatgaatcttagtcactgaatattcatatacatttcccccaaaaccttagacattcatagtagattttaattagttagctttctaactagtcagatttctgcccaaagtgcttagtcaatagtaattaagatatagcttcaaaaatggctttgcttttgatttctactcatattcgtatggctccagaaaaatatttttttcatatttgacaatgtcagctccactttagaaattttcaataaccagatgagaaaaaaattaagaaattgctcaagggaaacatttgtaaatggatttgaaagattgagccaaattctgttgtcagttctaagcatgcagttctcacctccatttagtcccccatcagaacagaggtcaggaatttagctggggagcctaaatttagttcagcttacctttgagaatagcatcaattcagactctcttttcattatgttttcttttctttttccctctttttaaactacattgtgttagagtcatagtctaggatcctgagagattttccattcttgtcaccattcacttgcattgtaaagattttctttgtctgttgttggcatagattcttttgtacatatttatttatttgtgtttatatatgtcaattggtttcctttcttagcttgatattgcctagctttgttgttttaattaactttctattagagagactgtatatattttttctaaatactttgtgaaatcatttttggtagcaatatctttgaatatgatgaataaaagtgactgtgagtgcaaatagaattagcagtaagaagctactctagctaatttgccattttacttaaatggaaaatgtttttcaaataaatacttatgttgttcatgttccaagtta

SEQ ID NO: 35140 - DNA, 1417 bp, Homo sapiens
taaaacccaaatgagatctacagctctgtctgtaggggtttatccaggagttgcagtgactactgtagatacaaagggaagtcctggtactggctaatttgaacttgcaattgttcactcgcctaactatacatgtggaataaagttattaccattcaattatgattacttgaccaatatatctgtgtgtgtgtgacagatggattttgagagtggacaagtggatccactggcatctgtaattttgcctccaaacttacttgagaatttaagtccagaagattctgtattagttagaagagcacagtttactttcttcaacaaaactggacttttccaggatgtaggaccccaaagaaaaactttagtgagttatgtgatggcgtgcagtattggaaacattactatccagaatctgaaggatcctgttcaaataaaaatcaaacatacaagaactcaggaagtgcatcatcccatctgtgccttctgggatctgaacaaaaacaaaagttttggaggatggaacacgtcaggatgtgttgcacacagagattcagatgcaagtgagacagtctgcctgtgtaaccacttcacacactttggagttctgatggaccttccaagaagtgcctcacagttagatgcaagaaacactaaagtcctcactttcatcagctatattgggtgtggaatatctgctattttttcagcagcaactctcctgacatatgttgcttttgagaaattgcgaagggattatccctccaaaatcttgatgaacctgagcacagccctgctgttcctgaatctcctcttcctcctagatggctggatcacctccttcaatgtggatggactttgcattgctgttgcagtcctgttgcatttcttccttctggcaacctttacctggatggggctagaagcaattcacatgtacattgctctagttaaagtatttaacacttacattcgccgatacattctaaaattctgcatcattggctggggtttgcctgccttagtggtgtcagttgttctagcgagcagaaacaacaatgaagtctatggaaaagaaagttatgggaaagaaaaaggtgatgaattctgttggattcaagatccagtcatattttatgtgacctgtgctgggtattttggagtcatgttttttctgaacattgccatgttcattgtggtaatggtgcagatctgtgggaggaatggcaagagaagcaaccggaccctgagagaagaagtgttaaggaacctgcgcagtgtggttagcttgacctttctgttgggcatgacatggggttttgcattctttgcctggggacccttaaatatccccttcatgtacctcttctccatcttcaattcattacaaggtaagataaattgtacatgaatagtc

SEQ ID NO: 35141 - DNA, 104 bp, Homo sapiens
catttattgaaaatctttttcatataaattttttttcatgtttcaagaaggaagttaccgaattctgtaaccatctaaacatgtaaaaaaaggatactatgtta

SEQ ID NO: 35142 - DNA, 144 bp, Homo sapiens
gtctccaggaatagaatatgtacagcagaaaactaaatttctctgattttatattcatatatgtatctgtttaatgtatttttggcaatgcaatcatgtcattccagctcccctgcaacccatgcctaaggtaagtccccacac

SEQ ID NO: 35143 - DNA, 640 bp, Homo sapiens
ggaggaggcgtccgctgggctcagatccccgactccagccccggttccccggcgcctgggctgcgcggagtccctgtcccgcgtcccggacccctacgcgcagcctccacgcgctccgagctggagaagccgccagcccgccctcccagggcgtgtcgcccgctttctgtttctttgtgcggggcatgtgaaatgtgtggggccagaattgtctccctaaagaacagttaggtgagagttcacatcacaagttgcttctgtgctgctccccagccagggtccgaccggccaggctccggtgaactccaggcaactccagccttgcccagggacttgctcgctccgctgggcgccgcaaaggcacacagatgcgagggaatcctgcggcctggatcctttggggatttgtaattcctcgctgctggttttctcttttaaaccatcacgttttcttgctgagaggaaatcatctgtgatgaaagtctttgtagatgcttggaaacattgctgggcctctctctgccctcttcctctgccgttggacttttgcaataaaaactaccatttgattttaccaaaaaacgtaatgtacatccctcttacccccaccctgccgcggtctgattcttagagtctgtca

SEQ ID NO: 35144 - DNA, 1139 bp, Homo sapiens
taggaatatatacttttcagaccatttcagttaaaacagtaatgatattaatggaatctgtcttattaaggtagtgaatcaactcaacaagaagctaagagtcacagtctgtgattttgagtcacctagacagttttccagagtcatcactaaccttgtcttaagacatagcgtgttgtcttcatttatcttaaactatatcacagaatccctgagataaaattagtcatattatcattatacagccatatgctacctacgtcaagactcttctcttcatctgatcatatgatgtgtaatatgtttatttaataaaatataatccatgctaagtaaagcataacatctatgacttttacatcaatattctgagtagcaaaatgcgaagtcagatatttattactatgcatatacaaatctgtaacaaataaaacgtttccatgtggtagattgtcttttttacaactttattgaggtaaattttacttaaaaatttcacatggtaggttttggaaaaaaaaatactttttaaaaacaaaagattaactcttctgtgtggtacatgaaaaactaactaaaaccaaaaacaaaaggcagcctgggcgacatggtgagaccccaactctacaaaaaattcttttaaaactcagcctcccaagtagctgggattacaggcacgcgttgccatgcccagctaatttttatatttttggtagagatggggtttcaccatgttggccaggatggtctcaatctcctgactttgtgatctgcccaccttggcctcccaaagtgctgggattacaggtgtgagccactgcacccagcctgttttcagtttttaatatttcttttctctcattacctacttttttaagggaagatggatatcacaaatatcctagcaagaacctgtcaatagacaggtttccaaaaggaagagtcatgatcctactgcataaatctaaatgaatgatttaattttagttaaattcttctgaatataatctgctgtaaaatggggatcattcttgaagtgaacctcttaatctaaatacttcctgtttttgtttcctcttgttaaatactccccttcatgatcttcactgaagaaataagagaatacaaaaatatatggg

SEQ ID NO: 35145 - DNA, 908 bp, Homo sapiens
  misc_feature (874)..(874): n is a, c, g, or t
  misc_feature (885)..(885): n is a, c, g, or t
taggaatatatacttttcagaccatttcagttaaaacagtaatgatattaatggaatctgtcttattaaggtagtgaatcaactcaacaagaagctaagagtcacagtctgtgattttgagtcacctagacagttttccagagtcatcactaaccttgtcttaagacatagcgtgttgtcttcatttatcttaaactatatcacagaatccctgagataaaattagtcatattatcattatacagccatatgctacctacgtcaagactcttctcttcatctgatcatatgatgtgtaatatgtttatttaataaaatataatccatgctaagtaaagcataacatctatgacttttacatcaatattctgagtagcaaaatgcgaagtcagatatttattactatgcatatacaaatctgtaacaaataaaacgtttccatgtggtagattgtcttttttacaactttattgaggtaaattttacttaaaaatttcacatggtaggttttggaaaaaaaaatactttttaaaaacaaaagattaactcttctgtgtggtacatgaaaaactaactaaaaccaaaaacaaaaggcagcctgggcgacatggtgagaccccaactctacaaaaaattcttttaaaacttagcctagcatggtggcgtgcatatgtggtcctcagcctcccaagtagctgggattacaggcacgcgttgccatgcccagctaatttttatatttttggtagagatggggtttcaccatgttggccaggatggtctcaatctcctgactttgtgatcccagcaccttgggaggctgaggtgggaggatcatttgaggccaggagtttgagacctgcctgggcaacanatatgggaacncttcctttttcccagggggggaa

SEQ ID NO: 35146 - DNA, 304 bp, Homo sapiens
gagagtctagtatttaaatcaagcttaaattatgaaggatggactgaggattcaataccaaggggacaggagaaaaggggctatatcttgattcatgatgagtcattccaaaagcacttgaattgtctatgctgtagaaatgtcccttagctacagcaattctaaataatataagataaaataaaatcatgccttgcaaaatgccctgcaatcattcattcaatcatctcaataaagcttctatactctcagtttactcttctgtaaaatggaaaaatcatccccacaaagtattataggtatt

SEQ ID NO: 35147 - DNA, 284 bp, Homo sapiens
tttttttctgactcatgccatagtccaattcaataaaccctcttctgagtataaatctagaattgctagacaatgtacagaaacaagaagtcaagttatctgcctccatcccccatatacaaatatagtgcagcaaagctgggataaacagagcttccacaatgctgcaatattgtgagagagacggttatgggtgtcattgtctatggatgtgggggtacatttcctcattattcctaattttgctcctggaaagaactcccttgtctcttctctgattcatg

SEQ ID NO: 35148 - DNA, 429 bp, Homo sapiens
ttgcggtgacccgagatcacgccattgcactccagcctgggcaacagaacaagactccgtctcaaaaaaaaaaaaaaaaaattctacagaacttggtgtctcattggatgtgggcactgagggaaagggaagagtcaagaatgattctcaggtctctggcttgggtgctggagagatagataggtgttaccattctctaagtatgggtatatatcagataatcaggaggaacagaatgcgggggtcagggatcaggaaagaatgaggaactcaatttgggggttttgagttgaagtacctctaaggcatccaagtgtagatgactggtaaggcagctcagtaagagaagtctggactaaagatagagaatggatggtcattagtatgcccagggagggtatatacagtgggaaaaaaatgcatgacaga

SEQ ID NO: 35149 - DNA, 505 bp, Homo sapiens
gttccttttccccccatatggttaataaatttctttaaaataaccattttctgagtaacaagtgacatggctaatttgctgcttattagattatcttcttatatacacaaatagctgaaactcctaagtggataggttaaggagctatacagccatccagggccagtgtgacagtgaagctagaattgctcaaaaagaagacatcctctccaacctcccccaaaatttaaagcacagagaggtgactgacaagaaaaaagaagagaatgagaagcacaggaaggtgggaggcagccatttcagccagacagggaaaagctggaagaactggaattgtagaggactccccaacctgctattcccttcctttcagaagggaggaacatgcccccagtgcttttaaagatttgtgttcctactggaaacctcccctgtgtgtggtgtttattattagccatgttgtgtctgaaagtccgaagctttccctgtcactggctttctctgt

SEQ ID NO: 35150 - DNA, 416 bp, Homo sapiens
ccctgtatgtgtgtgtcctttacatgctaattcatctctgtgtgggcaccacctccctgttcccagattgcagaaaattctgttgagcgaagccagagaaaaggctgttgaggttttgggaggaggctgaagagaaaattggaaaggttgatgaggagggacaatgatgaccacaatgcagagagacagtgaaaggcccaagcttgaatcctctatcagacgagcctgatatggggcacctcctccccaacctctccacccttcagagacaaactccatgctgccttctccatgaaggctccttagagcaatctgtgctcaaactttaatgtgcataagcatcactaggaaagcttctgaaaaatataaattcctgaaatctagcctaagagattcctattcaatagatgtgggtt

SEQ ID NO: 35151 - DNA, 441 bp, Homo sapiens
agacctcatctgctgccatcttaagccccgtttcttcaatgtcgtggctccaggatcatcttcttgagatgccttctcagaccactgcatgcccacacttccccagtaccccttgtcaggggtatgggagtggagacttcactgtagctctctcatactgcattatggtttcaaagagtccatctttcccacgtagactgtgaacacaacaggatacaggcaccaagatttcttggtggagtttgatgcacataataactgcttagcaatgcttgttttgtgaatggtcacaggcttagatttatggaaagacctcaccattccaatattggtaatcattatatgtggtctaaagaggcgggcagatcacgagttcaggagatcgaggctatcttggctaacacagtgaaaccctgtctctactaaaaatacataaaaaaa

SEQ ID NO: 35152 - DNA, 316 bp, Homo sapiens
ggacaccagcaaggttaaacggttttcccagttcacgcaggccgggagtgatgagtggccacatgcctctgggattctttgctctgtatcacagtaccttggaaagcagcctaatgacgaggcatcagttttatttttatttagttttattttttgacctgccacttcaggaggcaccagttttaaatagcttcaaggtattataactctgtagggcatgaaggagttaatatactagacagaatacccagtttataccagggaatcgcttgaacccaggaggcagaggttgcagtgagcaagctgcactccagcc

SEQ ID NO: 35153 - DNA, 386 bp, Homo sapiens
tttttttttaggaattctccagatcagaaggaattggcagtaaggcctctgtcagctgcaccctgaataatctttggctgctattttatttaaggagagctaaactgtttcaattacgcaacaatatataccattctctactaaaacaattttaggaaatgaaaatgtaggcaatgggatgatatagtctgctctatatgaatgtctttcattataggtattttaatttaacttaaaatgatcaaggaaccagtcatctttcctttgtatttcaaatgcatacaaaattaaagataccgagttttttgatgcagagttcatgagacattgacttaattagttggtaggcaacttttactgaaccatctaattcctggttcagaaca

SEQ ID NO: 35154 - DNA, 386 bp, Homo sapiens
caaatgactactgagagacttcaaggaaattaaccttataatttccttaattcttcattttactgttagtcatggtaacatttgctaatttgtacatgtacagatgcttcatgttgatcccatcttagcaaagcttcagatttccgcatactacagaaccatctatgccctttacttccaaaatctgccctccctcaaaattagttgactaattaaataaattaagcaaaatgagaggcccggtgtagtggtgtgtacctgtagtcccagctactcagggaagacagctgcaggtttatcacttgagtccaggagttcaaggttacagtgagctatgatcacaccactggactccagcctgggcaatggagtgagaccctctctcc

SEQ ID NO: 35155 - DNA, 372 bp, Homo sapiens
tgctgttgttgttgaggcagggtctcactctgtcacctggcctggaatgctgtggtgcaatcacagctcactgcagatttgatctcctgggctcaagctatcctgctgcctcagcctcctgagtggctaggaccacaggcatgcaccaccacacccgacgacctttttatttttactagagataaggtctcactatgttgcccaggctggtctcaaacttttaggctcaagtgatccgcctgccttcgtctccctaagtgctgggattataagcaaagctgctacacctggccttagccaattcttttactaaactcttcatttctgacacatgccaaatttctatggcgtgtgtcagaaatgaagagctta

SEQ ID NO: 35156 - DNA, 489 bp, Homo sapiens
agagtcctcattctgcttcatgtgacatcagcaagactgaactctcctctgcttgctgtgctctgttcttgctggtttgtaagtggcagcaatcataagaggcaggaacacagcttcccatttgtttttcaggtttaagctgtggttttggaaatgacaggaagtaggaaaatgaagcttttggctggcctttgaagaaactggaagtagaggtgacagaatacatgcggattgctctggacctttttggaaaatcactcttttgcccaacacagttggcaaccatcctgggaccgataaaattcctttgcacttcatcagaatttaactttggcttaatctgtcaaagtcacaaccacatctctcaagagtaccatttggccacaagtcaaatacattatcacaaacacattagatgttcctgaatagcattcctaacccatagctgatgtccacattcatcgagcaagatcaaataccaaaagaaaa

SEQ ID NO: 35157 - DNA, 382 bp, Homo sapiens
gacaacaccaagtaagacaggagctgaggacatctcccatgctctgggccatcctattggccatccgaattttccagcactgtgtgaaagcctttgcctagaatgtactagtgtttctagtttccgatgagctgctgtggaggtaactgtctctgtgccctctactgtcagatctgctcaactgtgtagctgtcagtatttctccgttttcctggagcagagggtctgtgaagcatgcttccctgatacaccaggaccatccaacccatggaagcttgttgagacctcagcgcccttggctgctgggccagcttttcctcccaaacctgccctcagagcattttacattatagaaacaaaacaaaaccaaaaaaactgcagg

SEQ ID NO: 35158 - DNA, 507 bp, Homo sapiens
cccagggcacttgatgggaggggtaatgaagcctggaatgttcagcctgcgatgagatggctcagaggctatgggtggaggacggggcagagcttttcaaaatttgaagggtggtcatttaaagcaagggcaggcaagctttttctataaaggggcagacattttagactttgtgggcctcatggtttctgtcacgaccactcaactgagttgcggcatggaagcagccacagacaatgtgggagccaatgggttagacgtgtgccaataaaacaccgtttacagagataggtggcaggcctgctcagccctactctgagctagacccttgctcctcacaatgtggtcctcggaccaacagcatcagcatcacttgggggcatgtgagaaatgcaaaatctcaggcccagccgggtgtggtggctcacacctgtagtcccagcactttgggatgctgaggcgggcggatcatctgaggtcaggagtttgaaactagcctggccaaca

SEQ ID NO: 35159 - DNA, 828 bp, Homo sapiens
accacacctggctaatttttgtatttttagtagagacggggtttcaccatgtcggcgaggctggtcttgaactcttgatctcaggtgatctgcctgccttggcctcccgaagtgctgggattacaggcatgagccattgcacctagccctctataatcctttaaatgcttgtttatggtatcttagaatatttcaaatttatcttgtatgttctctgcctcatcctggagtcaactgtttgtctaaggaggagccattctcttgaagtggagaatagtattatagaaaccaatatcttggcactagctgtatttattgctgccaggatattgttgttttcagccctcttagtgggcagaacaagtagatctatgtgtatttatttattagacatatttattgtctatatctctgcctacacatatatataaccatgaattttaccacaaatgccaccattttgatccaacatcataggattcattttagcccttttcctttccttatttgtagctctcgtctctgacagtgagaatcttggttctcatccttaatatagttactcatttgcttaatctccctgaaagcttggcccagacatggaatccagcaaaggataaggtgaagggaattcttaaagagaaatcttgggataatagctgtgtaggcattcaccagttagtccagattggtgagtgaagacagggctccaaaggggtgttgtcaagaaataaacaaccaatagatagcctgatgtgttgagacttacacatgtagtagaagtttggaggtgaattagtgatacatatacagaaaaccaaacaagca

SEQ ID NO: 35160 - DNA, 495 bp, Homo sapiens
accacacctggctaatttttgtatttttagtagagacggggtttcaccatgtcggcgaggctggtcttgaactcttgatctcaggtgatctgcctgccttggcctcccgaagtgctgggattacaggcatgagccattgcacctagccctctataatcctttaaatgcttgtttatggtatcttagaatatttcaaatttatcttgtatgttctctgcctcatcctggagtcaactgtttgtctaaggaggagccattctcttgaagtggagaatagtattatagaaaccaatatcttggcactagctgtatttattgctgccaggatattgttgttttcagccctcttagtgggcagaacaagtagatctatgtgtatttatttattagacatatttattgtctatatctctgcctacacatatatataaccatgcatggtgataactgatgccatgcgtcttagactgtttcactgagtaagagctgtttccg

SEQ ID NO: 35161 - DNA, 536 bp, Homo sapiens
tataacaagtgaagtaagaaaagacatttgatgtgtgaaatatccagtggctattttggctggataatactggagaggcaaatctcaaacactcctctcctagctattcctattagaagtctaataccagaatatcagaaaaagggattggaatcaattggaacaaaaactagtaaaaatggtgagacaaccccaaatgaaaaggtagcagccagttttcatctctttttagaataacataaacgaaggtgactcagattgcaatcgaagaggttgagctcagacttcagggagaacttccgactactgagacactcgaggagtttggggaaattcccttctctgaagctttttaacaagagaccaagtggccaacaatgcatcttcggttaggtggttctcagggacagaggcatggacagaatgacctttcagaggtcccttcttgcctgtgctcactctatcttgttactaagccagttcacaacagcaccacctgcttgcttctcacacacagaggctgctttcagttacct

SEQ ID NO: 35162 - DNA, 274 bp, Homo sapiens
aagggaacttttctatcaagtaataatttattagtgatcacgatgatgaaatgggtcttacatatactatagctcttctactttcacactcatcatcttactagtaatcaggatgtctacataaagtaggagaaagcaggtaaactacacattttaaaaaccaaaaagaaagagaagattatatctcctcttatgtcaatactagtaatttgtaggaataagaactattaacacacttcttgaaaaaaattgaaatgagctttttaacataatt

SEQ ID NO: 35163 - DNA, 326 bp, Homo sapiens
  misc_feature (81)..(81): n is a, c, g, or t
gggcctaaatttttgtatttttggcttctttttgagatggagtcttgctccgtcgctgaggctcaaagggcaagtggtgcngatcttggctgttggggactctgcccctgggagagagaaatgcgaaacgtatttctgggagctggaagctgtttcctccatttagtctctggatgttttctaggtgaccacagcctcttataggcctgtcctggggcagagcggccaccttgaggtccatcagtcagtctgatcatctctgtagaacctcgaacctctcgcctcgcctcgcctgacgccgtttcctgccctttatctctcccttc

SEQ ID NO: 35164 - DNA, 255 bp, Homo sapiens
cttagtgtggaaaaaattgtgtaaaaatagtggtcaaaaagcatatggtttattggtcaattatcactgcataacaaccacaaaatctcagaggcatatggctgaaagcatttatttcttgttcatgcgtctgcacatccattaaggtttggctgatcgaggcttggttcatcttggcttggctctgacctctgagtccaagcagacacaactgctccagggcctggctggtggggatgtgtgtagaactcttcc

SEQ ID NO: 35165 - DNA, 739 bp, Homo sapiens
gggaggagtgcgggagcgcgccagagactggcgggcagctccgcccgcggccgggatgcactaggcaaagccagctgggctcctgagtccggtgggtacttggagaacttattacgtctagctggaggattgtaaatgcaccaatcagcatgctgtgtctagctcaagattttctccatccccttattttgggccagtggctgtcattacatatgagatgagtctcttgaagactacagatgagagcagtcatgatggcctgcactccacacaatgcaacagagtgaaggagcaggttctggttctttggtgtagtcctgaagcttcctaagaaagttcacatcaggtgatggataggagcaaccctgtaaaaccagccttagactatttttcaaacaggctggtgaattaccagatctccgtcaagtgcagtaaccagttcaagttggaagtgtgtcttttgaatgcagaaaacaaagtcgtggacaaccaggctgggacccagggccagctgaaggtgctgggtgccaacctctggtggccgtacctgatgcacgaacaccccgcctacctgtactcgtgggaggatggtgattgctcacaccaaagccttggacccctcccagcctgtgacctttgtgaccaactccacctacgcagcagacaagggggctctgtatgtggatgtgatccgtgtgaacagctactactcttggtatcgcaactacgggcacctgga

SEQ ID NO: 35166 - DNA, 779 bp, Homo sapiens
gggaggagtgcgggagcgcgccagagactggcgggcagctccgcccgcggccgggatgcactaggcaaagccagctgggctcctgagtccggtgggtacttggagaacttattacgtctagctggaggattgtaaatgcaccaatcagcatgctgtgtctagctcaagagagcagtcatgatggcctgcactccacacaatgcaacagagtgaaggagcaggttctggttctttggtgtagtcctgaagcttcctaagaaagttcacatcaggtgatggataggagcaaccctgtaaaaccagccttagactatttttcaaacactgcgcagaataccacatttcccagcattccttgcatctggatgtagctgtattaaaataagccgtgggaaacttctgagatggctccttaagtgcagttgactcattagggagggctggtgaattaccagatctccgtcaagtgcagtaaccagttcaagttggaagtgtgtcttttgaatgcagaaaacaaagtcgtggacaaccaggctgggacccagggccagctgaaggtgctgggtgccaacctctggtggccgtacctgatgcacgaacaccccgcctacctgtactcgtgggaggatggtgattgctcacaccaaagccttggacccctcccagcctgtgacctttgtgaccaactccacctacgcagcagacaagggggctctgtatgtggatgtgatccgtgtgaacagctactactcttggtatcgcaactacgggcacctgga

SEQ ID NO: 35167 - DNA, 665 bp, Homo sapiens
gggaggagtgcgggagcgcgccagagactggcgggcagctccgcccgcggccgggatgcactaggcaaagccagctgggctcctgagtccggtgggtacttggagaacttattacgtctagctggaggattgtaaatgcaccaatcagcatgctgtgtctagctcaagagagcagtcatgatggcctgcactccacacaatgcaacagagtgaaggagcaggttctggttctttggtgtagtcctgaagcttcctaagaaagttcacatcaggtgatggataggagcaaccctgtaaaaccagccttagactatttttcaaacaggctggtgaattaccagatctccgtcaagtgcagtaaccagttcaagttggaagtgtgtcttttgaatgcagaaaacaaagtcgtggacaaccaggctgggacccagggccagctgaaggtgctgggtgccaacctctggtggccgtacctgatgcacgaacaccccgcctacctgtactcgtgggaggatggtgattgctcacaccaaagccttggacccctcccagcctgtgacctttgtgaccaactccacctacgcagcagacaagggggctctgtatgtggatgtgatccgtgtgaacagctactactcttggtatcgcaactacgggcacctgga

SEQ ID NO: 35168 - DNA, 596 bp, Homo sapiens
  misc_feature (131)..(131): n is a, c, g, or t
  misc_feature (138)..(138): n is a, c, g, or t
  misc_feature (221)..(221): n is a, c, g, or t
gtgattgctcacaccaaagccttggacccctcccagcctgtgacctttgtgaccaactccacctacgcagcagacaagggggctctgtatgtggatgtgatccgtgtgaacagctactactcttggtatcncaactangggcacctggagttgattcagctgcagtggccgcccagtttgagaattggtgtaagacatcacaatcccattattcagagcgngtatggagtggaaacgcttgtagggtttcaccagggctggtgaattaccagatctccgtcaagtgcagtaaccagttcaagttggaagtgtgtcttttgaatgcagaaaacaaagtcgtggacaaccaggctgggacccagggccagctgaaggtgctgggtgccaacctctggtggccgtacctgatgcacgaacaccccgcctacctgtactcgtgggaggatggtgattgctcacaccaaagccttggacccctcccagcctgtgacctttgtgaccaactccacctacgcagcagacaagggggctctgtatgtggatgtgatccgtgtgaacagctactactcttggtatcgcaactacgggcacctgga

SEQ ID NO: 35169 - DNA, 535 bp, Homo sapiens
ctatcttaccaccactgaagctcatcacggaccccatactgaaagtacctggactttatgtgcatgaacaatccctgactttatgatgatggagaaggtggttcagggaaggctgcctggcttgattctgtagctgccggcccagaactgagctccttctcttccccgtacacagctgcttttggccctcttgacggttgtaccaccttctttcacttgtccccagtcctcttcatacccactctcttactggtccttaacagatggtcaccaaattcattctgccccctgactctcacttcagtgggtctctcttttccaaccctgaggcagtaccccgattctaatgcctgtcccctttagcccactgcttgcagaggccccgccatagtgcccagctgatcctggaacctatttttctctccctgatgtggctgttgctgtgtcttaggctgctgagagcatattgtcacatgatcaaaaagagaacatttaggatttcacaaccctgaaattatagtaagcctgttaattt

SEQ ID NO: 35170 - DNA, 402 bp, Homo sapiens
ggggacagcttggatggatgggggcagaacgaggagaggaatggggggagcatgtgggcccaagtgtctgttttgctgattgctccttttgctttcaaggagattaaactatttttagtctgcgctactgctggtgagacgccggaggaagcctttccatcgctgagatcttctggaagctgccaagtgtggtcttcagctcgattctgggagcctcccagagcaggcgggaggggtgtcaccatctgggggctgtggggacaggctggtgtgtgcttgctccctgaggtccttgttgcgctggcctccctgagccgtgtggccctggcctgcagagaacagtaatctgatgcacccgatgtttgtaacgctgtgtttaaaaaaagtaatttattttctaat

SEQ ID NO: 35171 - DNA, 418 bp, Homo sapiens
aataaaagaaatactctaaaactttatagttaacagagaaacaaaaatacaacaacaggaaagctatagtagagagaaagagacgtgtaaagatgtctataaagaaaaagatgagaaatcctttataaaagtaggggccaggtgcggtggctcacgcctgtattcccagtactttggaaggccgaggtgggccgatcacaaggtcaggagatcgagaccatcctggctaacacgtgaaaccccgtctctactaaaaatacaaaaaaattagcagggcgtggtagcgggctcctgtggtcccagctagcagaaaggctcacgcaggaaaatggcgtgaacccgcgaggcggagcttgcagtgagccaagatggcgccgctgcactccagcctgagctacagagcgagactccttctaaa

SEQ ID NO: 35172 - DNA, 2054 bp, Homo sapiens
  misc_feature (239)..(239): n is a, c, g, or t
  misc_feature (561)..(561): n is a, c, g, or t
  misc_feature (635)..(635): n is a, c, g, or t
  misc_feature (695)..(695): n is a, c, g, or t
  misc_feature (970)..(970): n is a, c, g, or t
  misc_feature (1194)..(1194): n is a, c, g, or t
  misc_feature (1262)..(1262): n is a, c, g, or t
tattcaataaggactgttatttctagtatagagaggagggctcctaggcctggctaagcagtttaagataaaatgcaaaatgacccaattcaggatgattatagttggtttaaatttggttgctgaggcacaaacaaaagtgttggattctgtagtttttgttgtgattacagaacacatgcagtatcttccagaaccctttgataaagctgaagtaaggatgggctcacatggcccangtgagtaagaagctgtgttgacagagtggacgataccttcaattatggcttaacaaaaaatgcctgaaaatggaataacttagaaggaactcttcctttaaaggatttaatggcaggtgcagtggcttacgcctgtaatcccagcactttgggagcctgaggcagaagatggcttgagcccaggagtttgaggcagcggtgagccataatcataccactgcacttaagcctgggcaacacaatgagaccctgtctcctgtctttaaaaaaaagagacagagacctacctgtatgctaggagcatccttctcactgtaggtcngatgtggtggttctgttttaaatttgctgaattgtgactttttttctttttcttttttttttttttttttttgnttttttttgaggcagggtctcactctgtcgcccaggctggagtgcagtggtgtgatctcngctcacttcaacctccacctcctgggttcaagcgattctcctgcctcagcctcctgagtagctgggattacaggcgtgcaccaccatgcctggctaatttttgtatttttagtagagatggggtttcacaatgttgcccaggttggtctcgaaccgctgaccttaagcgatccgcctgccttggcctccccaaggtgctggaattacaggcatgagccaccgcgcccggctgacttttttttttctttctttctttttgagacagagttttgctnagtctcccaggctggagtgcaatggcaacaacatggctcgctgcagcctcaatctgctgtgctcaggtattcctcctgcctcagcctcctgagtagctgggactacaggcgcatgccaccacacctggctattgtggattttaagaaattttttttgtagagacagggtcttactatgttgcccaggttgttcttgaactcttgggctccagagagcctcccanctcagcctcccaaagtgctgagattataggcgtgagccaccacacttagcctattgtgactttttagngtctctaatactttcttttagggcactaaaaacttaatcttagatccagttggtattcatttgggtgaatgaagtggtagggacctaccttaattttttttccaggtttttgtgattgaataagttccagatactcaaagcgacctagatcagtgatgaaatttttgactgcatttggacctatttctgggatctccttttactgatttctctgtatattcatgagcaaccttaaattattttagactatttaattattatgttctattttctggaaagttttgtccttcactgttctttttcaaaattttcctgattgttatttcataaatattttttcacagaatcaactggttttgaacctcaatttacttataggttaatttagagagaattgacttttaaaattatattaaaggccaggcatggtagctcatgcttataatcctggcattttggggggctgaggcagatggatcacatgatcccaggatttgagactggcctgggcaacatagtgagatctcatctcttaaaaaaaaaaaaaaaaattaagcctttctgcctaagatagaatactcctttaaacattttttattatatatataaatataaatatttatatttgtattataataaggcatatattataaatatatatttatataaaaatttttatataaatatatatatacactttttgagatggagcctcactctgttgcccaggctggagtgcagtggtgtagtcttggctcactgcaacctccgcctcccgggatcaagcgattg

SEQ ID NO: 35173 - DNA, 374 bp, Homo sapiens
gatttcaaactttacatttttactccctagtttgactctgtttttgcgtctgtagcaaattcacctcagtattcctagtaacttatctatatctgttctttagtctctttgagcctttctggttccctcattaattagtggggttaaaatgaaattttctacatgagtttattttatatttgaataagagtcaagactttaccttattgaaaattatcttttaacaggggaaacaattgtagaagcaagagaaatacaaaaccacatatatagtgggcaataaaggattatagaattatatgctttgaaaatcttagttttgttgcctcctctgtacctggaaacatgaacaataatttggttgtgaaagttct

SEQ ID NO: 35174 - DNA, 348 bp, Homo sapiens
acaaagtgcagaccatgcttcatgtggtcacttgtggaccagggtcagccagactgctgaggaaactggcctgatttcaggtcaaagtgtctgtcccttagctggacaggacacgggctgctttggagaactgccccccacctcctgctaatcccttgggactgggatatctgggattcctatcctcccaactggttctggagtcagttcaatattgccagaccacagctgggcgtggtggctcatgcctgtaattccagtactttgggaagtgaaggcgggtagatcacttgagcccaggagttctgcaccagcctggacaacgtggtgaaactccatctctacaga

SEQ ID NO: 35175 - DNA, 602 bp, Homo sapiens
tttacatcctctatatattatgactattccaaactcattcattttatagaaatggtcaaaggaaaaagccttatgtacagccttatttgaagagaaagttctttgtctgagtcaggaacatcctgttatccagctgctacatcccctttcagtgtgaattccactccttaccaaatcacttagaaaacactttgacaagttttaaactcaaacactgaatattttatgaagcatgtgtaaagaaagaaaccaaaatttggtgcaggtatttagtaatgggtagaacctgttaatatctgagtcatatataatggggccaaacatggaactacctcatcaaccccccaaaaatgtggccaactattaatattctttgtgacatttacaccaaggggcatagtaagtatttttggtattataaaatacacattcaaaatctctgttgtacaaaactcatgtaacagttgggacaaaatatccaaatgtgggttcacagttcacaggtggtgaaaattgaggccttactgctatggagtgtatatcaaaatgttcatggtgacacatttgaagcaataaatggcttaattaaatgccaaaatgag

SEQ ID NO: 35176 - DNA, 409 bp, Homo sapiens
actatactaaatacgcggaggtcgactttttttttttttttggcagagtcttgctctgtcacccaggctggagtgcagtgttgtgatctcagctcactgcaacctccgcttcctgggttcaagcaattctcatgtctcagcctcccgagtagctgggattacaggcgcccaccaccacgcctggctgatttttttgtattttcagtagagacggggttttgccaagttggccaggttggtcttgaactcctggcctcaagcaatccacacacctcggcctcccaaagtgctgggattacaggcatgagcgaccatgcccaaccaggatgcaagtaattttggagcaatgagtaaatttgaaaacaattctgttttggaccacatttaatcctgaaatccgaccattaag

SEQ ID NO: 35177 - DNA, 433 bp, Homo sapiens
tttttttttttgagagggagtctcgtcgctctgtcgcccaggctggagtgcagtggcacgatctcagctcactgcaacctctgcctcccggggtaaggcaattctgcctcagcctcctgagtcactgggattagaagcgtgtgccaccatgccaggctaatttttttgtatttttagtagagatggggttttgccatgttggtctggagctcctgaccttcatgatccatccacctcggccacccaaagtgctgggatcacaggcatgagctaccacgcctggcccacaaagctatttttgagagcctgcacaggccctgggtggggggatggggtaggacccaaagggctctttatggaggcacaggaggaaatggtagagtttcacaaaataaatggattaaaaaaatcaaccccgccaggcgcggtggct

SEQ ID NO: 35178 - DNA, 400 bp, Homo sapiens
atgcctggctaatttttttatttttagtagaggtggggtttcaccatgctggccaggctggtctcgaactcctgacctcaggtgatctgcctgcctcggcctcccaaagtgctgggattacaggggccgtgcagaccagggaatttttgttgtcttagaaagtcctatggagagtgctgctttgctgtatttgcatgtagttttatcatctccatgcagttaacagaatgttttcaggaggagaattccctaaggtgagaaactggttttctcaggagactatttggacaaatgacaaccatgttatttagtgagagtgaccaccaatgggagccctatacaactgttcactgggcactgcctggaagggaatttataaccaggagactattgctgttct

SEQ ID NO: 35179 - DNA, 576 bp, Homo sapiens
ctgatccaagtagatatttaaaaagaagaaggagaaggagaaagaaggagaaggggaagaggaagaggaagaggaagaagaaggaggaggaggaggagaaggagcaagaggaagaggaagaagaagaagaacaagaagagaagaagaagaagaggaagaggaagaagaaagaagaaagaagaaagaacaagaagaagaaggaagaaaagaagtgggaagaaagcatgaataggagtagcttcacaaagataggagataaccgagaaactgtttttattgcatcttcctgtgtaggccaccttgtaagctgtggcctcagacttaccttttatcttgtgtaatgcttttttaccactattgtgtctgcttcttatgtcttttccaggcatgtactgttgcaggggtgtccaatcatttagcttttctgagacacactggataaacacaaattgtcctgggccacacataaaatacattaacactaacaatagctgataagctcaaataaaaattaaaaaaatcttttacaaagtctcaaaatgttttcagaagcttacgaatttgcattggcccaca

SEQ ID NO: 35180 - DNA, 2093 bp, Homo sapiens
agcggagatctcattccgcctccctctgtcgtcgccccttcccaattctcgcgagacctcaaggagcacagcttctgcgcaccgcacgatactgggagtccaggcgccaagggagggggaagggaaaaggggaaacggtgcaaacggcgtggccgccatcttgcttgtgcccccgcttcgcgcgcgctccgttctccgtgacgcacacttccccctcccctccgccgcgcctgggcctctgcattgcccgactccgtaggagcgcgggggcggctcctgctcttcctggactcctgagcagagttgtcgagatgtccacagaaggaggatttggtggtactagcagcagtgatgcccagcaaagtctacagtcgttctggcctcgggtcatggaagaaatccggaatttaacagtgaaagacttccgagtgcaggaactcccactggctcgtattaagaagattatgaaactggatgaagatgtgaagatgatcagtgcagaagcgcctgtactctttgccaaggcagcccagatttttatcacagagttgactcttcgagcctggattcacacagaagataacaagcgccggactctacagagaaatgatatcgccatggcaattacaaaatttgatcagtttgattttctcatcgatattgttccaagagatgaactgaaacctccaaagcgtcaggaggaggtgcgccagtctgtaactcctgccgagccagtccagtactatttcacgctggctcagcaacccaccgctgtccaagtccagggccagcagcaaggccagcagaccaccagctccacgaccaccatccagcctgggcagatcatcatcgcacagcctcagcagggccagaccacacctgtgacaatgcaggttggagaaggtcagcaggtgcagattgtccaggctcagccacagggtcaagcccaacaggcccagagtggcactggacagaccatgcaggtgatgcagcagatcatcactaacacaggagagatccagcagatcccggtgcagctgaatgccggccagctgcagtatatccgcttagcccagcctgtatcaggcactcaagttgtgcagggacagatccagacacttgccaccaatgctcaacagattacacagacagaggtccagcaaggacagcagcagttcagccagttcacagatggacagcagctctaccagatccagcaagtcaccatgcctgcgggccaggacctcgcccagcccatgttcatccagtcagccaaccagccctccgacgggcaggccccccaggtgaccggcgactgagggcctgagctggcaaggccaaggacacccaacacaatttttgccatacagccccaggcaatgggcacagccttcctccccagaggacccggccgacctcagcgcctcctgcaggctaggacactggtgcactacaccccatgcctgggggccgagattctccagcagaaagatgcaatattttttgtttcctttttttccatttttttctctaaggaatcaatatttcaatatgttgagtgtgtgtccaatgctatgaaattaaaatattaaataacatatttatggcattttcttgaagagtgtggttgaagaaatatttctccttttgtttttctttttttttgtttgttactgccacttctttttaggagcaaatctccccaggggtgtacggtatttcttgactctgggaacagctgctacccccaagacttgccacgttgttctgccctcagatggaattaggtgaatgtgtgtagctgctttttcactcgtggtcctctccccatcccttgctctgaccccagagctctgtgtatttgcatccagaggccatggaaacattctttgcatttaagagacagatttattccctgtggagagtgggtggattcattgccacactcttttctcccagggacccaggaaactaggactttgtgtgtttgctgcccacctcccttttattttttaaatgcattaaaaactgtgctagtctcctttgcatggacttcaagctgcatgaaatgcaataaatctcattttagataa

SEQ ID NO: 35181 - DNA, 1609 bp, Homo sapiens
agcggagatctcattccgcctccctctgtcgtcgccccttcccaattctcgcgagacctcaaggagcacagcttctgcgcaccgcacgatactgggagtccaggcgccaagggagggggaagggaaaaggggaaacggtgcaaacggcgtggccgccatcttgcttgtgcccccgcttcgcgcgcgctccgttctccgtgacgcacacttccccctcccctccgccgcgcctgggcctctgcattgcccgactccgtaggagcgcgggggcggctcctgctcttcctggactcctgagcagagttgtcgagatgtccacagaaggaggatttggtggtactagcagcagtgatgcccagcaaagtctacagtcgttctggcctcgggtcatggaagaaatccggaatttaacagtgaaagacttccgagtgcaggaactcccactggctcgtattaagaagattatgaaactggatgaagatgtgaagatgatcagtgcagaagcgcctgtactctttgccaaggcagcccagatttttatcacagagttgactcttcgagcctggattcacacagaagataacaagcgccggactctacagagaaatgatatcgccatggcaattacaaaatttgatcagtttgattttctcatcgatattgttccaagagatgaactgaaacctccaaagcgtcaggaggaggtgcgccagtctgtaactcctgccgagccagtccagtactatttcacgctggctcagcaacccaccgctgtccaagtccagggccagcagcaaggccagcagaccaccagctccacgaccaccatccagcctgggcagatcatcatcgcacagcctcagcagggccagaccacacctgtgacaatgcaggttggagaaggtcagcaggtgcagattgtccaggctcagccacagggtcaagcccaacaggcccagagtggcactggacagaccatgcaggtgatgcagcagatcatcactaacacaggagagatccagcagatcccggtgcagctgaatgccggccagctgcagtatatccgcttagcccagcctgtatcaggcactcaagttgtgcagggacagatccagacacttgccaccaatgctcaacagattacacagacagaggtccagcaaggacagcagcagttcagccagttcacagatggacagcagctctaccagatccagcaagtcaccatgcctgcgggccaggacctcgcccagcccatgttcatccagtcagccaaccagccctccgacgggcaggccccccaggtgaccggcgactgagggcctgagctggcaaggccaaggacacccaacacaatttttgccatacagccccaggcaatgggcacagccttcctccccagaggacccggccgacctcagcgcctcctgcaggctaggacactggtgcactacaccccatgcctgggggccgagattctccagcagaaagatgcaatattttttgtttcctttttttccatttttttctctaaggaatcaatatttcaatatgttgagtgtgtgtccaatgctatgaaattaaaatattaaataacatatttatggca

SEQ ID NO: 35182 - DNA, 2355 bp, Homo sapiens
cattggagcctcggagtttttcactgaggcaggggtcagctgaaagacaaagaaaaatggcgaatagtttgttggggggtgggaggacagctgttcgggttttcagtggagtggacattccagactcatgtttctgcatctcctgctgccttttgtttcctccgtcctttggggggtagggataggagtgacttaaattctcccagtcggtggaggtataaataactacatgtaaaattaatgcagttcccagttgtcgagatgtccacagaaggaggatttggtggtactagcagcagtgatgcccagcaaagtctacagtcgttctggcctcgggtcatggaagaaatccggaatttaacagtgaaagacttccgagtgcaggaactcccactggctcgtattaagaagattatgaaactggatgaagatgtgaagatgatcagtgcagaagcgcctgtactctttgccaaggcagcccagatttttatcacagagttgactcttcgagcctggattcacacagaagataacaagcgccggactctacagagaaatgatatcgccatggcaattacaaaatttgatcagtttgattttctcatcgatattgttccaagagatgaactgaaacctccaaagcgtcaggaggaggtgcgccagtctgtaactcctgccgagccagtccagtactatttcacgctggctcagcaacccaccgctgtccaagtccagggccagcagcaaggccagcagaccaccagctccacgaccaccatccagcctgggcagatcatcatcgcacagcctcagcagggccagaccacacctgtgacaatgcaggttggagaaggtcagcaggtgcagattgtccaggctcagccacagggtcaagcccaacaggcccagagtggcactggacagaccatgcaggtgatgcagcagatcatcactaacacaggagagatccagcagatcccggtgcagctgaatgccggccagctgcagtatatccgcttagcccagcctgtatcaggcactcaagttgtgcagggacagatccagacacttgccaccaatgctcaacagattacacagacagaggtccagcaaggacagcagcagttcagccagttcacagatggacagaggaacagcgtgcagcaagctcgagtctctgagctaacgggagaggcagagcccagagaagtgaaagccacaggaaattcaactccctgcacctcttccctgcccaccacacaccccccctcacaccgggctggtgcctcctgtgtctgctgctcccaaccccagcagagctccacttcccctcctccttctgacgccttgcagtgggtggtggttgaggtatctgggacccccaaccagctcgagacccatagggagctgcatgcccctctcccagggatgacctcactctctcctctccacccctcgcagcagctctaccagatccagcaagtcaccatgcctgcgggccaggacctcgcccagcccatgttcatccagtcagccaaccagccctccgacgggcaggccccccaggtgaccggcgactgagggcctgagctggcaaggccaaggacacccaacacaatttttgccatacagccccaggcaatgggcacagccttcctccccagaggacccggccgacctcagcgcctcctgcaggctaggacactggtgcactacaccccatgcctgggggccgagattctccagcagaaagatgcaatattttttgtttcctttttttccatttttttctctaaggaatcaatatttcaatatgttgagtgtgtgtccaatgctatgaaattaaaatattaaataacatatttatggcattttcttgaagagtgtggttgaagaaatatttctccttttgtttttctttttttttgtttgttactgccacttctttttaggagcaaatctccccaggggtgtacggtatttcttgactctgggaacagctgctacccccaagacttgccacgttgttctgccctcagatggaattaggtgaatgtgtgtagctgctttttcactcgtggtcctctccccatcccttgctctgaccccagagctctgtgtatttgcatccagaggccatggaaacattctttgcatttaagagacagatttattccctgtggagagtgggtggattcattgccacactcttttctcccagggacccaggaaactaggactttgtgtgtttgctgcccacctcccttttattttttaaatgcattaaaaactgtgctagtctcctttgcatggacttcaagctgcatgaaatgcaataaatctcattttagataa

SEQ ID NO: 35183 - DNA, 1798 bp, Homo sapiens
acttttacattttttggcaagcatagtatatgcaataagtactcaataaacatctgtagagagacttatttagcttttttccattagctacatctgtctctacaatctcaacatactattctcttgaatctgtttttaattttatgccatttctcatgtctgaaaatgtcattataagtaactttttttttttctgagacagggcctcgcactgtcgcccatgctagagtgcagcgagacactcgtagctcttaccagtaacttctttataacacttttgcaatttacgaagcactctcacattatttcattcactctccccaacattaccaaaagttaggaattagatctttttacagatgaaggaattgagactccctgaagtcaagtgtcttatagttaggttttgttcattcattcatcaaatagagtgcctgatgtgagatttattgaaactggatttgaaaacaattttcctgaattcaagtcgagggtttactccactattctcaattactttatcaccagggttataaacccaaaggaagtgagtaacaacagtgtgattttattgaggacccatgcaacactagtctcagaaaggctccagtgtcatttgtaaaattcaaggttaccatcagcagaggcagtcattcctctctgcgcttgttacctaatgcactaactctcactgtaggtaattccattcaagacacatttgatgactatacctacaggttttgaagttattcggatggggttttgacacttactagctgtggggacttagatcaagttacttaacctttttgagcttcagttttatcatttgtaaaatggatacaatcctgatgcctttggaccaagtggtcacggaaatgaaagagataagtatgaaaaaatccatgctcatagtagctgtggtttccaactgcgtgataaaactttaaaatctgcattcaaataagaacaactatgtcgacgtaaggttacaagctaactattcttggtaagtactgttctttattctagaggacatcactttacagtttggtgctaaatgctcttttatgaatttaaggtgccagtagctgtctacttgaacggcatgcttaatctggaacgccatgtcgaccttcatcccccagttctttctccccaaattaaaaacacaaatacacacacacgcccctacttagttcctaaaactcaagggcacgcgcacacacctacttatttcctaaaattcaagctcgcaccaaggagatccacaaggataggcagggtggtggaggtcactgggcagcgcctccggatcccccgaaagggggcggggtcaaaactcagatctcgagctcccgaaagggggcggggttaaaactctcagatctcattccgcctccctctgtcgtcgccccttcccaattctcgcgagacctcaaggagcacagcttctgcgcaccgcacgatactgggagtccaggcgccaagggagggggaagggaaaaggggaaacggtgcaaacggcgtggccgccatcttgcttgtgcccccgcttcgcgcgcgctccgttctccgtgacgcacacttccccctcccctccgccgcgcctgggcctctgcattgcccgactccgtaggagcgcgggggcggctcctgctcttcctggactcctgagcagaggtgtgtgagtgtgcgggagtttctgtgcgagggtgatagggaagcggcggcggggggaggggcagcgcttcccgccttcgccagagacctcacttcctcgcgcggccgctgctgt

SEQ ID NO: 35184 - DNA, 776 bp, Homo sapiens
gggtggtgggctggtggatcagaccctgcagctgacataccaactctaccatcttgattcttacagaattacacagacagaggtccagcaaggacagcagcagttcagccagttcacagatggacaggtagggtacccaacctgggctgggcagagggtgaggatttgcggggcagggtagcaggtagtatctgggtttggatggttagggcaactgtcctgtcctctactaacagtgagtggacagaaattgttaaaacaagtacggtatttaaatcagggcacctatcctttagttttatagacttagtgggaactaaaataatcttagacatgtagcccaaattgccattttacagatgagtaaactgaaccctggagatgggaagtgccttgtccatgctcccctagatgttcattgcagagccaggactagagagcaggtttcctgtttccctctctagaactgtatttttttcccctctaagccatgatgctgttttaatagcatggactgttgagacgcagagaacacgtgacctcttgagctctctgggtgcctgaaattcagtcattttcagtccatgcgaggagagaatcttcccttttccctctgctttcccctcacagtacagtcccagagaccactgaggacatgataggatgacatgcccaaacttgtgccctctgctgctcaaaagggagaagagctggcatcagggacccacctctggcttctgccagcaccacatgctaggcttacatgccagggctcc

SEQ ID NO: 35185 - DNA, 255 bp, Homo sapiens
gtccggtgcccattgcctggggctgtatggcacagccttcctccccagaggacccggccgacctcagcgcctcctgcaggctaggacactggtgcactacaccccatgcctgggggccgagattctccagcagaaagatgcaatattttttgtttcctttttttccatttttttctctaaggaatcaatatttcaatatgttgagtgtgtgtccaatgctatgaaattaaaatattaaataacatatttatggca

SEQ ID NO: 35186 - DNA, 498 bp, Homo sapiens
ctctggatgcaaagtgtcctctggacctccaaagcgtcaggaggaggtgcgccagtctgtaactcctgccgagccagtccagtactatttcacgctggctcagcaacccaccgctgtccaagtccagggccagcagcaaggccagcagaccaccagctccacgaccaccatccagcctgggcagatcatcatcgcacagcctcagcagggccagaccacacctgtgacaatgcaggttggagaaggtcagcaggtgcagattgtccaggctcagccacagggtcaagcccaacaggcccagagtggcactggacagaccatgcaggtgatgcagcagatcatcactaacacaggagagatccagcagatcccggtgcagctgaatgccggccagctgcagtatatccgcttagcccagcctgtatcaggcactcaagttgtgcagggacagatccagaactgcatccagagacacttgcatccagaggggacctcaga

SEQ ID NO: 35187 - DNA, 906 bp, Homo sapiens
gggtggtgggctggtggatcagaccctgcagctgacataccaactctaccatcttgattcttacagaattacacagacagaggtccagcaaggacagcagcagttcagccagttcacagatggacaggggaacagctgctacccccaagacttgccacgttgttctgccctcagatggaattaggtgaatgtgtgtagctgctttttcactcgtggtcctctccccatcccttgctctgaccccagagctctgtgtatttgcatccagaggccatggaaacattctttgcatttaagagacagatttattccctgtggagagtgggtggattcattgccacactcttttctcccagggacccaggaaactaggactttgtgtgtttgctgcccacctcccttttattttttaaatgcattaaaaactgtgctagtctcctttgcatggacttcaagctgcatgaaatgcaataaatctcattttagataaaaaaaaaaaaaaaaaaaaaaaaaaaacaaaaaaaaaaaaaacaaaaaacaaaacaaaacagacacaccacgcaccacaaccacaccacaaactagacacgactcgacgcacgcacacccccatgaccggagcagcacacggaggacaaacgacacatgacgaggccacccggcgcggcccgcactaccacacaacgggtgcgcggccggcgagacgccagcgcaccgcgtcagcgccggcgctcgatggacgcggcgccaccacgacgcacagggcacggtgaggcacaggcgcggcggggcggcggtggagcgtggaattcccgctggcgcgggcgcagccgaggaggaagaaccgcagccgtcccaacttgccgcgccggcacacgaggcggcggagtagagccgcgaggaccc

SEQ ID NO: 35188 - DNA, 397 bp, Homo sapiens
tgtcacaggtgtggtctggccctgctgaggctgtgcgatgatgatctgcccaggctggatggtggtcgtggagcttggtggtcttgcttggcctttgctgctggccctggacttggacagcgggtgggttgctgagccagcgtgaaatagtactggactggctcggcaggagttacagactggcgcacctcctcctgacgctttggaggtttcagttcatctcttggaacaatatcgatgagaaaatcaaactgatcaaattttgtaattgccatggcgatatcatttctctgtagagtccggcgatttttatcacagagttgactcttcgagcctggattcacacagaagataacaagcgccggactctacaggtattattgcagacttagattag

SEQ ID NO: 35189 - DNA, 280 bp, Homo sapiens
gtccaaacggcgtggtggcaattaagaatgtgaggacgattggagagggacaaggtaaagagaagcacacttccccctcccctccgccgcgcctgggcctctgcattgcccgactccgtaggagcgcgggggcggctcctgctcttcctggactcctgagcagaggtgtgtgagtgtgcgggagtttctgtgcgagggtgatagggaagcggcggcggggggaggggcagcgcttcccgccttcgccagagacctcacttcctcgcgcggccgctgctgt

SEQ ID NO: 35190 - DNA, 2462 bp, Homo sapiens
agcggagatctcattccgcctccctctgtcgtcgccccttcccaattctcgcgagacctcaaggagcacagcttctgcgcaccgcacgatactgggagtccaggcgccaagggagggggaagggaaaaggggaaacggtgcaaacggcgtggccgccatcttgcttgtgcccccgcttcgcgcgcgctccgttctccgtgacgcacacttccccctcccctccgccgcgcctgggcctctgcattgcccgactccgtaggagcgcgggggcggctcctgctcttcctggactcctgagcagagttgtcgagatgtccacagaaggaggatttggtggtactagcagcagtgatgcccagcaaagtctacagtcgttctggcctcgggtcatggaagaaatccggaatttaacagtgaaagacttccgagtgcaggaactcccactggctcgtattaagaagattatgaaactggatgaagatgtgaagatgatcagtgcagaagcgcctgtactctttgccaaggcagcccagatttttatcacagagttgactcttcgagcctggattcacacagaagataacaagcgccggactctacagagaaatgatatcgccatggcaattacaaaatttgatcagtttgattttctcatcgatattgttccaagagatgaactgaaacctccaaagcgtcaggaggaggtgcgccagtctgtaactcctgccgagccagtccagtactatttcacgctggctcagcaacccaccgctgtccaagtccagggccagcagcaaggccagcagaccaccagctccacgaccaccatccagcctgggcagatcatcatcgcacagcctcagcagggccagaccacacctgtgacaatgcaggttggagaaggtcagcaggtgcagattgtccaggctcagccacagggtcaagcccaacaggcccagagtggcactggacagaccatgcaggtgatgcagcagatcatcactaacacaggagagatccagcagatcccggtgcagctgaatgccggccagctgcagtatatccgcttagcccagcctgtatcaggcactcaagttgtgcagggacagatccagacacttgccaccaatgctcaacaggggcaaagaaatgcaagtcaggggaagcctcgaaggtgcctgaaagaaaccttacagattacacagacagaggtccagcaaggacagcagcagttcagccagttcacagatggacagaggaacagcgtgcagcaagctcgagtctctgagctaacgggagaggcagagcccagagaagtgaaagccacaggaaattcaactccctgcacctcttccctgcccaccacacaccccccctcacaccgggctggtgcctcctgtgtctgctgctcccaaccccagcagagctccacttcccctcctccttctgacgccttgcagtgggtggtggttgaggtatctgggacccccaaccagctcgagacccatagggagctgcatgcccctctcccagggatgacctcactctctcctctccacccctcgcagcagctctaccagatccagcaagtcaccatgcctgcgggccaggacctcgcccagcccatgttcatccagtcagccaaccagccctccgacgggcaggccccccaggtgaccggcgactgagggcctgagctggcaaggccaaggacacccaacacaatttttgccatacagccccaggcaatgggcacagccttcctccccagaggacccggccgacctcagcgcctcctgcaggctaggacactggtgcactacaccccatgcctgggggccgagattctccagcagaaagatgcaatattttttgtttcctttttttccatttttttctctaaggaatcaatatttcaatatgttgagtgtgtgtccaatgctatgaaattaaaatattaaataacatatttatggcattttcttgaagagtgtggttgaagaaatatttctccttttgtttttctttttttttgtttgttactgccacttctttttaggagcaaatctccccaggggtgtacggtatttcttgactctgggaacagctgctacccccaagacttgccacgttgttctgccctcagatggaattaggtgaatgtgtgtagctgctttttcactcgtggtcctctccccatcccttgctctgaccccagagctctgtgtatttgcatccagaggccatggaaacattctttgcatttaagagacagatttattccctgtggagagtgggtggattcattgccacactcttttctcccagggacccaggaaactaggactttgtgtgtttgctgcccacctcccttttattttttaaatgcattaaaaactgtgctagtctcctttgcatggacttcaagctgcatgaaatgcaataaatctcattttagataa

SEQ ID NO: 35191 - DNA, 2150 bp, Homo sapiens
agcggagatctcattccgcctccctctgtcgtcgccccttcccaattctcgcgagacctcaaggagcacagcttctgcgcaccgcacgatactgggagtccaggcgccaagggagggggaagggaaaaggggaaacggtgcaaacggcgtggccgccatcttgcttgtgcccccgcttcgcgcgcgctccgttctccgtgacgcacacttccccctcccctccgccgcgcctgggcctctgcattgcccgactccgtaggagcgcgggggcggctcctgctcttcctggactcctgagcagagttgtcgagatgtccacagaaggaggatttggtggtactagcagcagtgatgcccagcaaagtctacagtcgttctggcctcgggtcatggaagaaatccggaatttaacagtgaaagacttccgagtgcaggaactcccactggctcgtattaagaagattatgaaactggatgaagatgtgaagatgatcagtgcagaagcgcctgtactctttgccaaggcagcccagatttttatcacagagttgactcttcgagcctggattcacacagaagataacaagcgccggactctacagagaaatgatatcgccatggcaattacaaaatttgatcagtttgattttctcatcgatattgttccaagagatgaactgaaacctccaaagcgtcaggaggaggtgcgccagtctgtaactcctgccgagccagtccagtactatttcacgctggctcagcaacccaccgctgtccaagtccagggccagcagcaaggccagcagaccaccagctccacgaccaccatccagcctgggcagatcatcatcgcacagcctcagcagggccagaccacacctgtgacaatgcaggttggagaaggtcagcaggtgcagattgtccaggctcagccacagggtcaagcccaacaggcccagagtggcactggacagaccatgcaggtgatgcagcagatcatcactaacacaggagagatccagcagatcccggtgcagctgaatgccggccagctgcagtatatccgcttagcccagcctgtatcaggcactcaagttgtgcagggacagatccagacacttgccaccaatgctcaacaggggcaaagaaatgcaagtcaggggaagcctcgaaggtgcctgaaagaaaccttacagattacacagacagaggtccagcaaggacagcagcagttcagccagttcacagatggacagcagctctaccagatccagcaagtcaccatgcctgcgggccaggacctcgcccagcccatgttcatccagtcagccaaccagccctccgacgggcaggccccccaggtgaccggcgactgagggcctgagctggcaaggccaaggacacccaacacaatttttgccatacagccccaggcaatgggcacagccttcctccccagaggacccggccgacctcagcgcctcctgcaggctaggacactggtgcactacaccccatgcctgggggccgagattctccagcagaaagatgcaatattttttgtttcctttttttccatttttttctctaaggaatcaatatttcaatatgttgagtgtgtgtccaatgctatgaaattaaaatattaaataacatatttatggcattttcttgaagagtgtggttgaagaaatatttctccttttgtttttctttttttttgtttgttactgccacttctttttaggagcaaatctccccaggggtgtacggtatttcttgactctgggaacagctgctacccccaagacttgccacgttgttctgccctcagatggaattaggtgaatgtgtgtagctgctttttcactcgtggtcctctccccatcccttgctctgaccccagagctctgtgtatttgcatccagaggccatggaaacattctttgcatttaagagacagatttattccctgtggagagtgggtggattcattgccacactcttttctcccagggacccaggaaactaggactttgtgtgtttgctgcccacctcccttttattttttaaatgcattaaaaactgtgctagtctcctttgcatggacttcaagctgcatgaaatgcaataaatctcattttagataa

SEQ ID NO: 35192 - DNA, 2509 bp, Homo sapiens
agcggagatctcattccgcctccctctgtcgtcgccccttcccaattctcgcgagacctcaaggagcacagcttctgcgcaccgcacgatactgggagtccaggcgccaagggagggggaagggaaaaggggaaacggtgcaaacggcgtggccgccatcttgcttgtgcccccgcttcgcgcgcgctccgttctccgtgacgcacacttccccctcccctccgccgcgcctgggcctctgcattgcccgactccgtaggagcgcgggggcggctcctgctcttcctggactcctgagcagagttgtcgagatgtccacagaaggaggatttggtggtactagcagcagtgatgcccagcaaagtctacagtcgttctggcctcgggtcatggaagaaatccggaatttaacagtgaaagacttccgagtgcaggaactcccactggctcgtattaagaagattatgaaactggatgaagatgtgaagatgatcagtgcagaagcgcctgtactctttgccaaggcagcccagatttttatcacagagttgactcttcgagcctggattcacacagaagataacaagcgccggactctacagagaaatgatatcgccatggcaattacaaaatttgatcagtttgattttctcatcgatattgttccaagagatgaactgaaacctccaaagcgtcaggaggaggtgcgccagtctgtaactcctgccgagccagtccagtactatttcacgctggctcagcaacccaccgctgtccaagtccagggccagcagcaaggccagcagaccaccagctccacgaccaccatccagcctgggcagatcatcatcgcacagcctcagcagggccagaccacacctgtgacaatgcaggttggagaaggtcagcaggtgcagattgtccaggctcagccacagggtcaagcccaacaggcccagagtggcactggacagaccatgcaggtgatgcagcagatcatcactaacacaggagagatccagcagatcccggtgcagctgaatgccggccagctgcagtatatccgcttagcccagcctgtatcaggcactcaagttgtgcagggacagatccagacacttgccaccaatgctcaacagattacacagacagaggtccagcaaggacagcagcagttcagccagttcacagatggacagcagctctaccagatccagcaagtcaccatgcctgcgggccaggacctcgcccagcccatgttcatccagtcagccaaccagccctccgacgggcaggccccccaggtgaccggcgactgagggcctgagctggcaaggccaaggacacccaacacaatttttgccatacagccccaggcaatgggcacagccttcctccccagaggacccggccgacctcagcgcctcctgcaggctaggacactggtgcactacaccccatgcctgggggccgagattctccagcagaaagatgcaatattttttgtttcctttttttccatttttttctctaaggaatcaatatttcaatatgttgagtgtgtgtccaatgctatgaaattaaaatattaaataacatatttatggcattttcttgaagagtgtggttgaagaaatatttctccttttgtttttctttttttttgtttgttactgccacttctttttaggagcaaatctccccaggggtgtacggtatttcttgactctgggaacagctgctacccccaagacttgccacgttgttctgccctcagatggaattaggtgaatgtgtgtagctgctttttcactcgtggtcctctccccatcccttgctctgaccccagagctctgtgtatttgcatccagaggccatggaaacattctttgcatttaagagacagatttattccctgtggagagtgggtggattcattgccacactcttttctcccagggacccaggaaactaggactttgtgtgtttgctgcccacctcccttttattttttaaatgcattaaaaactgtgctagtctcctttgcatggacttcaagctgcatgaaatgcaataaatctcattttagataaaaaaaaaaaaaaaaaaaaaaaaaaaacaaaaaaaaaaaaaacaaaaaacaaaacaaaacagacacaccacgcaccacaaccacaccacaaactagacacgactcgacgcacgcacacccccatgaccggagcagcacacggaggacaaacgacacatgacgaggccacccggcgcggcccgcactaccacacaacgggtgcgcggccggcgagacgccagcgcaccgcgtcagcgccggcgctcgatggacgcggcgccaccacgacgcacagggcacggtgaggcacaggcgcggcggggcggcggtggagcgtggaattcccgctggcgcgggcgcagccgaggaggaagaaccgcagccgtcccaacttgccgcgccggcacacgaggcggcggagtagagccgcgaggaccc

SEQ ID NO: 35193 - DNA, 2491 bp, Homo sapiens
agcggagatctcattccgcctccctctgtcgtcgccccttcccaattctcgcgagacctcaaggagcacagcttctgcgcaccgcacgatactgggagtccaggcgccaagggagggggaagggaaaaggggaaacggtgcaaacggcgtggccgccatcttgcttgtgcccccgcttcgcgcgcgctccgttctccgtgacgcacacttccccctcccctccgccgcgcctgggcctctgcattgcccgactccgtaggagcgcgggggcggctcctgctcttcctggactcctgagcagagttgtcgagatgtccacagaaggaggatttggtggtactagcagcagtgatgcccagcaaagtctacagtcgttctggcctcgggtcatggaagaaatccggaatttaacagtgaaagacttccgagtgcaggaactcccactggctcgtattaagaagattatgaaactggatgaagatgtgaagatgatcagtgcagaagcgcctgtactctttgccaaggcagcccagatttttatcacagagttgactcttcgagcctggattcacacagaagataacaagcgccggactctacagagaaatgatatcgccatggcaattacaaaatttgatcagtttgattttctcatcgatattgttccaagagatgaactgaaacctccaaagcgtcaggaggaggtgcgccagtctgtaactcctgccgagccagtccagtactatttcacgctggctcagcaacccaccgctgtccaagtccagggccagcagcaaggccagcagaccaccagctccacgaccaccatccagcctgggcagatcatcatcgcacagcctcagcagggccagaccacacctgtgacaatgcaggttggagaaggtcagcaggtgcagattgtccaggctcagccacagggtcaagcccaacaggcccagagtggcactggacagaccatgcaggtgatgcagcagatcatcactaacacaggagagatccagcagatcccggtgcagctgaatgccggccagctgcagtatatccgcttagcccagcctgtatcaggcactcaagttgtgcagggacagatccagacacttgccaccaatgctcaacagattacacagacagaggtccagcaaggacagcagcagttcagccagttcacagatggacagcagctctaccagatccagcaagtcaccatgcctgcgggccaggacctcgcccagcccatgttcatccagtcagccaaccagccctccgacgggcaggccccccaggtgaccggcgactgagggcctgagctggcaaggccaaggacacccaacacaatttttgccatacagccccaggcaatgggcacagccttcctccccagaggacccggccgacctcagcgcctcctgcaggctaggacactggtgcactacaccccatgcctgggggccgagattctccagcagaaagatgcaatattttttgtttcctttttttccatttttttctctaaggaatcaatatttcaatatgttgagtgtgtgtccaatgctatgaaattaaaatattaaataacatatttatggcattttcttgaagagtgtggttgaagaaatatttctccttttgtttttctttttttttgtttgttactgccacttctttttaggagcaaatctccccaggggtgtacggtatttcttgactctgggaacagctgctacccccaagacttgccacgttgttctgccctcagatggaattaggtgaatgtgtgtagctgctttttcactcgtggtcctctccccatcccttgctctgaccccagagctctgtgtatttgcatccagaggccatggaaacattctttgcatttaagagacagatttattccctgtggagagtgggtggattcattgccacactcttttctcccagggacccaggaaactaggactttgtgtgtttgctgcccacctcccttttattttttaaatgcattaaaaactgtgctagtctcctttaaaaaaaaaaacaaaaaagaaaaaaaaaaaaaaaaaaaaaaaaaaaaaaaaaaaaacaaaaaaaaaaaaaacaaaaaacaaaacaaaacagacacaccacgcaccacaaccacaccacaaactagacacgactcgacgcacgcacacccccatgaccggagcagcacacggaggacaaacgacacatgacgaggccacccggcgcggcccgcactaccacacaacgggtgcgcggccggcgagacgccagcgcaccgcgtcagcgccggcgctcgatggacgcggcgccaccacgacgcacagggcacggtgaggcacaggcgcggcggggcggcggtggagcgtggaattcccgctggcgcgggcgcagccgaggaggaagaaccgcagccgtcccaacttgccgcgccggcacacgaggcggcggagtagagccgcgaggaccc

SEQ ID NO: 35194 - DNA, 1908 bp, Homo sapiens
ttagcaagtgtacagagatatcgtcctggcaattgtgcatctttctcctttgaccttagcagtttgcatggcagattgtgccaagatgaggcctgtccagggacccatgcaataaaagttgtcgagatgtccacagaaggaggatttggtggtactagcagcagtgatgcccagcaaagtctacagtcgttctggcctcgggtcatggaagaaatccggaatttaacagtgaaagacttccgagtgcaggaactcccactggctcgtattaagaagattatgaaactggatgaagatgtgaagatgatcagtgcagaagcgcctgtactctttgccaaggcagcccagatttttatcacagagttgactcttcgagcctggattcacacagaagataacaagcgccggactctacagagaaatgatatcgccatggcaattacaaaatttgatcagtttgattttctcatcgatattgttccaagagatgaactgaaacctccaaagcgtcaggaggaggtgcgccagtctgtaactcctgccgagccagtccagtactatttcacgctggctcagcaacccaccgctgtccaagtccagggccagcagcaaggccagcagaccaccagctccacgaccaccatccagcctgggcagatcatcatcgcacagcctcagcagggccagaccacacctgtgacaatgcaggttggagaaggtcagcaggtgcagattgtccaggctcagccacagggtcaagcccaacaggcccagagtggcactggacagaccatgcaggtgatgcagcagatcatcactaacacaggagagatccagcagatcccggtgcagctgaatgccggccagctgcagtatatccgcttagcccagcctgtatcaggcactcaagttgtgcagggacagatccagacacttgccaccaatgctcaacagattacacagacagaggtccagcaaggacagcagcagttcagccagttcacagatggacagcagctctaccagatccagcaagtcaccatgcctgcgggccaggacctcgcccagcccatgttcatccagtcagccaaccagccctccgacgggcaggccccccaggtgaccggcgactgagggcctgagctggcaaggccaaggacacccaacacaatttttgccatacagccccaggcaatgggcacagccttcctccccagaggacccggccgacctcagcgcctcctgcaggctaggacactggtgcactacaccccatgcctgggggccgagattctccagcagaaagatgcaatattttttgtttcctttttttccatttttttctctaaggaatcaatatttcaatatgttgagtgtgtgtccaatgctatgaaattaaaatattaaataacatatttatggcattttcttgaagagtgtggttgaagaaatatttctccttttgtttttctttttttttgtttgttactgccacttctttttaggagcaaatctccccaggggtgtacggtatttcttgactctgggaacagctgctacccccaagacttgccacgttgttctgccctcagatggaattaggtgaatgtgtgtagctgctttttcactcgtggtcctctccccatcccttgctctgaccccagagctctgtgtatttgcatccagaggccatggaaacattctttgcatttaagagacagatttattccctgtggagagtgggtggattcattgccacactcttttctcccagggacccaggaaactaggactttgtgtgtttgctgcccacctcccttttattttttaaatgcattaaaaactgtgctagtctcctttgcatggacttcaagctgcatgaaatgcaataaatctcattttagataa

SEQ ID NO: 35195 - DNA, 2229 bp, Homo sapiens
agcggagatctcattccgcctccctctgtcgtcgccccttcccaattctcgcgagacctcaaggagcacagcttctgcgcaccgcacgatactgggagtccaggcgccaagggagggggaagggaaaaggggaaacggtgcaaacggcgtggccgccatcttgcttgtgcccccgcttcgcgcgcgctccgttctccgtgacgcacacttccccctcccctccgccgcgcctgggcctctgcattgcccgactccgtaggagcgcgggggcggctcctgctcttcctggactcctgagcagagacgaggtctcgctctgttgccaaggctggtgtgccaggctggagtgccgtggactgatcatgactcactgcagcctccacctcctgggcctcaagcaatcctcctacttcagcctcctgagtagctgggactacagttgtcgagatgtccacagaaggaggatttggtggtactagcagcagtgatgcccagcaaagtctacagtcgttctggcctcgggtcatggaagaaatccggaatttaacagtgaaagacttccgagtgcaggaactcccactggctcgtattaagaagattatgaaactggatgaagatgtgaagatgatcagtgcagaagcgcctgtactctttgccaaggcagcccagatttttatcacagagttgactcttcgagcctggattcacacagaagataacaagcgccggactctacagagaaatgatatcgccatggcaattacaaaatttgatcagtttgattttctcatcgatattgttccaagagatgaactgaaacctccaaagcgtcaggaggaggtgcgccagtctgtaactcctgccgagccagtccagtactatttcacgctggctcagcaacccaccgctgtccaagtccagggccagcagcaaggccagcagaccaccagctccacgaccaccatccagcctgggcagatcatcatcgcacagcctcagcagggccagaccacacctgtgacaatgcaggttggagaaggtcagcaggtgcagattgtccaggctcagccacagggtcaagcccaacaggcccagagtggcactggacagaccatgcaggtgatgcagcagatcatcactaacacaggagagatccagcagatcccggtgcagctgaatgccggccagctgcagtatatccgcttagcccagcctgtatcaggcactcaagttgtgcagggacagatccagacacttgccaccaatgctcaacagattacacagacagaggtccagcaaggacagcagcagttcagccagttcacagatggacagcagctctaccagatccagcaagtcaccatgcctgcgggccaggacctcgcccagcccatgttcatccagtcagccaaccagccctccgacgggcaggccccccaggtgaccggcgactgagggcctgagctggcaaggccaaggacacccaacacaatttttgccatacagccccaggcaatgggcacagccttcctccccagaggacccggccgacctcagcgcctcctgcaggctaggacactggtgcactacaccccatgcctgggggccgagattctccagcagaaagatgcaatattttttgtttcctttttttccatttttttctctaaggaatcaatatttcaatatgttgagtgtgtgtccaatgctatgaaattaaaatattaaataacatatttatggcattttcttgaagagtgtggttgaagaaatatttctccttttgtttttctttttttttgtttgttactgccacttctttttaggagcaaatctccccaggggtgtacggtatttcttgactctgggaacagctgctacccccaagacttgccacgttgttctgccctcagatggaattaggtgaatgtgtgtagctgctttttcactcgtggtcctctccccatcccttgctctgaccccagagctctgtgtatttgcatccagaggccatggaaacattctttgcatttaagagacagatttattccctgtggagagtgggtggattcattgccacactcttttctcccagggacccaggaaactaggactttgtgtgtttgctgcccacctcccttttattttttaaatgcattaaaaactgtgctagtctcctttgcatggacttcaagctgcatgaaatgcaataaatctcattttagataa

SEQ ID NO: 35196 - DNA, 2039 bp, Homo sapiens
agcggagatctcattccgcctccctctgtcgtcgccccttcccaattctcgcgagacctcaaggagcacagcttctgcgcaccgcacgatactgggagtccaggcgccaagggagggggaagggaaaaggggaaacggtgcaaacggcgtggccgccatcttgcttgtgcccccgcttcgcgcgcgctccgttctccgtgacgcacacttccccctcccctccgccgcgcctgggcctctgcattgcccgactccgtaggagcgcgggggcggctcctgctcttcctggactcctgagcagagttgtcgagatgtccacagaaggaggatttggtggtactagcagcagtgatgcccagcaaagtctacagtcgttctggcctcgggtcatggaagaaatccggaatttaacagtgaaagacttccgagtgcaggaactcccactggctcgtattaagaagattatgaaactggatgaagatgtgaagatgatcagtgcagaagcgcctgtactctttgccaaggcagcccagatttttatcacagagttgactcttcgagcctggattcacacagaagataacaagcgccggactctacagagaaatgatatcgccatggcaattacacctccaaagcgtcaggaggaggtgcgccagtctgtaactcctgccgagccagtccagtactatttcacgctggctcagcaacccaccgctgtccaagtccagggccagcagcaaggccagcagaccaccagctccacgaccaccatccagcctgggcagatcatcatcgcacagcctcagcagggccagaccacacctgtgacaatgcaggttggagaaggtcagcaggtgcagattgtccaggctcagccacagggtcaagcccaacaggcccagagtggcactggacagaccatgcaggtgatgcagcagatcatcactaacacaggagagatccagcagatcccggtgcagctgaatgccggccagctgcagtatatccgcttagcccagcctgtatcaggcactcaagttgtgcagggacagatccagacacttgccaccaatgctcaacagattacacagacagaggtccagcaaggacagcagcagttcagccagttcacagatggacagcagctctaccagatccagcaagtcaccatgcctgcgggccaggacctcgcccagcccatgttcatccagtcagccaaccagccctccgacgggcaggccccccaggtgaccggcgactgagggcctgagctggcaaggccaaggacacccaacacaatttttgccatacagccccaggcaatgggcacagccttcctccccagaggacccggccgacctcagcgcctcctgcaggctaggacactggtgcactacaccccatgcctgggggccgagattctccagcagaaagatgcaatattttttgtttcctttttttccatttttttctctaaggaatcaatatttcaatatgttgagtgtgtgtccaatgctatgaaattaaaatattaaataacatatttatggcattttcttgaagagtgtggttgaagaaatatttctccttttgtttttctttttttttgtttgttactgccacttctttttaggagcaaatctccccaggggtgtacggtatttcttgactctgggaacagctgctacccccaagacttgccacgttgttctgccctcagatggaattaggtgaatgtgtgtagctgctttttcactcgtggtcctctccccatcccttgctctgaccccagagctctgtgtatttgcatccagaggccatggaaacattctttgcatttaagagacagatttattccctgtggagagtgggtggattcattgccacactcttttctcccagggacccaggaaactaggactttgtgtgtttgctgcccacctcccttttattttttaaatgcattaaaaactgtgctagtctcctttgcatggacttcaagctgcatgaaatgcaataaatctcattttagataa

SEQ ID NO: 35197 - DNA, 1848 bp, Homo sapiens
agcggagatctcattccgcctccctctgtcgtcgccccttcccaattctcgcgagacctcaaggagcacagcttctgcgcaccgcacgatactgggagtccaggcgccaagggagggggaagggaaaaggggaaacggtgcaaacggcgtggccgccatcttgcttgtgcccccgcttcgcgcgcgctccgttctccgtgacgcacacttccccctcccctccgccgcgcctgggcctctgcattgcccgactccgtaggagcgcgggggcggctcctgctcttcctggactcctgagcagagttgtcgagatgtccacagaaggaggatttggtggtactagcagcagtgatgcccagcaaagtctacagtcgttctggcctcgggtcatggaagaaatccggaatttaacagtgaaagacttccgagtgcaggaactcccactggctcgtattaagaagattatgaaactggatgaagatgtgaagatgatcagtgcagaagcgcctgtactctttgccaaggcagcccagatttttatcacagagttgactcttcgagcctggattcacacagaagataacaagcgccggactctacagagaaatgatatcgccatggcaattacaaaatttgatcagtttgattttctcatcgatattgttccaagagatgaactgaaacctccaaagcgtcaggaggaggtgcgccagtctgtaactcctgccgagccagtccagtactatttcacgctggctcagcaacccaccgctgtccaagtccagggccagcagcaaggccagcagaccaccagctccacgaccaccatccagcctgggcagatcatcatcgcacagcctcagcagggccagaccacacctgtgacaatgcaggttggagaaggtcagcaggtgcagattgtccaggctcagccacagggtcaagcccaacaggcccagagtggcactggacagaccatgcaggtgatgcagcagatcatcactaacacaggagagatccagcagatcccggtgcagctgaatgccggccagctgcagtatatccgcttagcccagcctgtatcaggcactcaagttgtgcagggacagatccagacacttgccaccaatgctcaacagattacacagacagaggtccagcaaggacagcagcagttcagccagttcacagatggacaggtagggtacccaacctgggctgggcagagggtgaggatttgcggggcagggtagcaggtagtatctgggtttggatggttagggcaactgtcctgtcctctactaacagtgagtggacagaaattgttaaaacaagtacggtatttaaatcagggcacctatcctttagttttatagacttagtgggaactaaaataatcttagacatgtagcccaaattgccattttacagatgagtaaactgaaccctggagatgggaagtgccttgtccatgctcccctagatgttcattgcagagccaggactagagagcaggtttcctgtttccctctctagaactgtatttttttcccctctaagccatgatgctgttttaatagcatggactgttgagacgcagagaacacgtgacctcttgagctctctgggtgcctgaaattcagtcattttcagtccatgcgaggagagaatcttcccttttccctctgctttcccctcacagtacagtcccagagaccactgaggacatgataggatgacatgcccaaacttgtgccctctgctgctcaaaagggagaagagctggcatcagggacccacctctggcttctgccagcaccacatgctaggcttacatgccagggctcc

SEQ ID NO: 35198 - DNA, 1079 bp, Homo sapiens
attggaccccaattgaatgttaccggaaatgtccggaggcttccgggtaaccccccctccttccagcctttgtggtttgagggcaacgggaccagatcccaagacacttgccaccaatgctcaacattacacagacagaggtccagcaaggacagcagcagttcagccagttcacagatggacagcagctctaccagatccagcaagtcaccatgcctgcgggccaggacctcgcccagcccatgttcatccagtcagccaaccagccctccgacgggcaggccccccaggtgaccggcgactgagggcctgagctggcaaggccaaggacacccaacacaatttttgccatacagccccaggcaatgggcacagccttcctccccagaggacccggccgacctcagcgcctcctgcaggctaggacactggtgcactacaccccatgcctgggggccgagattctccagcagaaagatgcaatattttttgtttcctttttttccatttttttctctaaggaatcaatatttcaatatgttgagtgtgtgtccaatgctatgaaattaaaatattaaataacatatttatggcattttcttgaagagtgtggttgaagaaatatttctccttttgtttttctttttttttgtttgttactgccacttctttttaggagcaaatctccccaggggtgtacggtatttcttgactctgggaacagctgctacccccaagacttgccacgttgttctgccctcagatggaattaggtgaatgtgtgtagctgctttttcactcgtggtcctctccccatcccttgctctgaccccagagctctgtgtatttgcatccagaggccatggaaacattctttgcatttaagagacagatttattccctgtggagagtgggtggattcattgccacactcttttctcccagggacccaggaaactaggactttgtgtgtttgctgcccacctcccttttattttttaaatgcattaaaaactgtgctagtctcctttgcatggacttcaagctgcatgaaatgcaataaatctcattttagataa

SEQ ID NO: 35199 - DNA, 2756 bp, Homo sapiens
acttttacattttttggcaagcatagtatatgcaataagtactcaataaacatctgtagagagacttatttagcttttttccattagctacatctgtctctacaatctcaacatactattctcttgaatctgtttttaattttatgccatttctcatgtctgaaaatgtcattataagtaactttttttttttctgagacagggcctcgcactgtcgcccatgctagagtgcagcgagacactcgtagctcttaccagtaacttctttataacacttttgcaatttacgaagcactctcacattatttcattcactctccccaacattaccaaaagttaggaattagatctttttacagatgaaggaattgagactccctgaagtcaagtgtcttatagttaggttttgttcattcattcatcaaatagagtgcctgatgtgagatttattgaaactggatttgaaaacaattttcctgaattcaagtcgagggtttactccactattctcaattactttatcaccagggttataaacccaaaggaagtgagtaacaacagtgtgattttattgaggacccatgcaacactagtctcagaaaggctccagtgtcatttgtaaaattcaaggttaccatcagcagaggcagtcattcctctctgcgcttgttacctaatgcactaactctcactgtaggtaattccattcaagacacatttgatgactatacctacaggttttgaagttattcggatggggttttgacacttactagctgtggggacttagatcaagttacttaacctttttgagcttcagttttatcatttgtaaaatggatacaatcctgatgcctttggaccaagtggtcacggaaatgaaagagataagtatgaaaaaatccatgctcatagtagctgtggtttccaactgcgtgataaaactttaaaatctgcattcaaataagaacaactatgtcgacgtaaggttacaagctaactattcttggtaagtactgttctttattctagaggacatcactttacagtttggtgctaaatgctcttttatgaatttaaggtgccagtagctgtctacttgaacggcatgcttaatctggaacgccatgtcgaccttcatcccccagttctttctccccaaattaaaaacacaaatacacacacacgcccctacttagttcctaaaactcaagggcacgcgcacacacctacttatttcctaaaattcaagctcgcaccaaggagatccacaaggataggcagggtggtggaggtcactgggcagcgcctccggatcccccgaaagggggcggggtcaaaactcagatctcgagctcccgaaagggggcggggttaaaactctcagatctcattccgcctccctctgtcgtcgccccttcccaattctcgcgagacctcaaggagcacagcttctgcgcaccgcacgatactgggagtccaggcgccaagggagggggaagggaaaaggggaaacggtgcaaacggcgtggccgccatcttgcttgtgcccccgcttcgcgcgcgctccgttctccgtgacgcacacttccccctcccctccgccgcgcctgggcctctgcattgcccgactccgtaggagcgcgggggcggctcctgctcttcctggactcctgagcagagttgtcgagatgtccacagaaggaggatttggtggtactagcagcagtgatgcccagcaaagcctacagtcgttctggcctcgggtcatggaagaaatccggaatttaacagtgaaagacttccgagtgcaggaactcccactggctcgtattaagaagattatgaaactggatgaagatgtgaagatgatcagtgcagaagcgcctgtactctttgccaaggcagcccagatttttatcacagagttgactcttcgagcctggattcacacagaagataacaagcgccggactctacagagaaatgatatcgccatggcaattacaaaatttgatcagttgattttctcatcgatattgttccaagagatgaactgaaacctccaaagcgtcaggaggaggtgcgccagtctgtaactcctgccgagccagtccagtactatttcacgctggctcagcaacccaccgctgtccaagtccagggccagcagcaaggccagcagaccaccagctccacgaccaccatccagcctgggcagatcatcatcgcacagcctcagcagggccagaccacacctgtgacaatgcaggttggagaaggtcagcaggtgcagatgtccaggctcagccacagggtcaagcccaacaggcccagagtggcactggacagaccatgcaggtgatgcagcagatcatcactaacacaggagagatccagcagatcccggtgcagctgaatgccggcagctgcagtatatccgcttagcccagcctgtatcaggcactcaagtgtgcagcggacagatccagacacttgcacaatgtcaacagatacacagacagaggtccagcagacggcagcaagtcagccaagttcaaagatgcaaggaggtctacagatccggaagtccatgctgggggcagacctcgcccgccgtcatccagcggcaacagcctcgagggagccccaggagcggctgggggtcgtggggggaggcccaaaattggacagcccgagggggctcccaaaaggaacccgggagggaaccccgcgggccaagaaaatttctaaaa

SEQ ID NO: 35200 - DNA, 1869 bp, Homo sapiens
ttaagagtatacttggaaccctcggagtcctccatggacaagaacagggtggcccatggacttccagccaaaggccactgtggggctgctttggggagagactcacagctggacttctctatccgaccatgcaatgttagccagcaccaattacccacaatgctttgcccataagagatagaaataatggaactcacaggaagaaacagtattgataacatacacaggcttacagaggccaggcccagtaattaccatgagacagaagcctacaggtggcggtgctttgactgggctgggattattgatacattactgatacatcacttcttttataaagcatatgtaaaacgagtgctactgaaagtcgaaggacagcttccggggagtcatgaactctttcactatctcatccgtgacctccttgcgccgggcctggtgctctgcgatgaactgaaacctccaaagcgtcaggaggaggtgcgccagtctgtaactcctgccgagccagtccagtactatttcacgctggctcagcaacccaccgctgtccaagtccagggccagcagcaaggccagcagaccaccagctccacgaccaccatccagcctgggcagatcatcatcgcacagcctcagcagggccagaccacacctgtgacaatgcaggttggagaaggtcagcaggtgcagattgtccaggctcagccacagggtcaagcccaacaggcccagagtggcactggacagaccatgcaggtgatgcagcagatcatcactaacacaggagagatccagcagatcccggtgcagctgaatgccggccagctgcagtatatccgcttagcccagcctgtatcaggcactcaagttgtgcagggacagatccagacacttgccaccaatgctcaacagattacacagacagaggtccagcaaggacagcagcagttcagccagttcacagatggacagcagctctaccagatccagcaagtcaccatgcctgcgggccaggacctcgcccagcccatgttcatccagtcagccaaccagccctccgacgggcaggccccccaggtgaccggcgactgagggcctgagctggcaaggccaaggacacccaacacaatttttgccatacagccccaggcaatgggcacagccttcctccccagaggacccggccgacctcagcgcctcctgcaggctaggacactggtgcactacaccccatgcctgggggccgagattctccagcagaaagatgcaatattttttgtttcctttttttccatttttttctctaaggaatcaatatttcaatatgttgagtgtgtgtccaatgctatgaaattaaaatattaaataacatatttatggcattttcttgaagagtgtggttgaagaaatatttctccttttgtttttctttttttttgtttgttactgccacttctttttaggagcaaatctccccaggggtgtacggtatttcttgactctgggaacagctgctacccccaagacttgccacgttgttctgccctcagatggaattaggtgaatgtgtgtagctgctttttcactcgtggtcctctccccatcccttgctctgaccccagagctctgtgtatttgcatccagaggccatggaaacattctttgcatttaagagacagatttattccctgtggagagtgggtggattcattgccacactcttttctcccagggacccaggaaactaggactttgtgtgtttgctgcccacctcccttttattttttaaatgcattaaaaactgtgctagtctcctttgcatggacttcaagctgcatgaaatgcaataaatctcattttagataa

SEQ ID NO: 35201 - DNA, 1745 bp, Homo sapiens
agcggagatctcattccgcctccctctgtcgtcgccccttcccaattctcgcgagacctcaaggagcacagcttctgcgcaccgcacgatactgggagtccaggcgccaagggagggggaagggaaaaggggaaacggtgcaaacggcgtggccgccatcttgcttgtgcccccgcttcgcgcgcgctccgttctccgtgacgcacacttccccctcccctccgccgcgcctgggcctctgcattgcccgactccgtaggagcgcgggggcggctcctgctcttcctggactcctgagcagagacgaggtctcgctctgttgccaaggctggtgtgccaggctggagtgccgtggactgatcatgactcactgcagcctccacctcctgggcctcaagcaatcctcctacttcagcctcctgagtagctgggactacagttgtcgagatgtccacagaaggaggatttggtggtactagcagcagtgatgcccagcaaagtctacagtcgttctggcctcgggtcatggaagaaatccggaatttaacagtgaaagacttccgagtgcaggaactcccactggctcgtattaagaagattatgaaactggatgaagatgtgaagatgatcagtgcagaagcgcctgtactctttgccaaggcagcccagatttttatcacagagttgactcttcgagcctggattcacacagaagataacaagcgccggactctacagagaaatgatatcgccatggcaattacaaaatttgatcagtttgattttctcatcgatattgttccaagagatgaactgaaacctccaaagcgtcaggaggaggtgcgccagtctgtaactcctgccgagccagtccagtactatttcacgctggctcagcaacccaccgctgtccaagtccagggccagcagcaaggccagcagaccaccagctccacgaccaccatccagcctgggcagatcatcatcgcacagcctcagcagggccagaccacacctgtgacaatgcaggttggagaaggtcagcaggtgcagattgtccaggctcagccacagggtcaagcccaacaggcccagagtggcactggacagaccatgcaggtgatgcagcagatcatcactaacacaggagagatccagcagatcccggtgcagctgaatgccggccagctgcagtatatccgcttagcccagcctgtatcaggcactcaagttgtgcagggacagatccagacacttgccaccaatgctcaacagattacacagacagaggtccagcaaggacagcagcagttcagccagttcacagatggacagcagctctaccagatccagcaagtcaccatgcctgcgggccaggacctcgcccagcccatgttcatccagtcagccaaccagccctccgacgggcaggccccccaggtgaccggcgactgagggcctgagctggcaaggccaaggacacccaacacaatttttgccatacagccccaggcaatgggcacagccttcctccccagaggacccggccgacctcagcgcctcctgcaggctaggacactggtgcactacaccccatgcctgggggccgagattctccagcagaaagatgcaatattttttgtttcctttttttccatttttttctctaaggaatcaatatttcaatatgttgagtgtgtgtccaatgctatgaaattaaaatattaaataacatatttatggca

SEQ ID NO: 35202 - DNA, 331 bp, Homo sapiens
acatgcagcagttcagccagttcacagatggacagcagctctaccattacacagacagaggtccagcaaggacagcagcagttcagccagttcacagatggacagcagctctaccagatccagcaagtcaccatgcctgcgggccaggacctcgcccagcagtacgaggagaaggcggccgcgtatgataaactggaaaagaccaagaaccggcagcagcaggacactgcgacgacctggttgttgatcttggacaaccctgcggcaacatcgtgtccaacctggaaaagaagcagaggcaaatcttgaatccgttgttagcgcgtgctaa

SEQ ID NO: 35203 - DNA, 2043 bp, Homo sapiens
cattggagcctcggagtttttcactgaggcaggggtcagctgaaagacaaagaaaaatggcgaatagtttgttggggggtgggaggacagctgttcgggttttcagtggagtggacattccagactcatgtttctgcatctcctgctgccttttgtttcctccgtcctttggggggtagggataggagtgacttaaattctcccagtcggtggaggtataaataactacatgtaaaattaatgcagttcccagttgtcgagatgtccacagaaggaggatttggtggtactagcagcagtgatgcccagcaaagtctacagtcgttctggcctcgggtcatggaagaaatccggaatttaacagtgaaagacttccgagtgcaggaactcccactggctcgtattaagaagattatgaaactggatgaagatgtgaagatgatcagtgcagaagcgcctgtactctttgccaaggcagcccagatttttatcacagagttgactcttcgagcctggattcacacagaagataacaagcgccggactctacagagaaatgatatcgccatggcaattacaaaatttgatcagtttgattttctcatcgatattgttccaagagatgaactgaaacctccaaagcgtcaggaggaggtgcgccagtctgtaactcctgccgagccagtccagtactatttcacgctggctcagcaacccaccgctgtccaagtccagggccagcagcaaggccagcagaccaccagctccacgaccaccatccagcctgggcagatcatcatcgcacagcctcagcagggccagaccacacctgtgacaatgcaggttggagaaggtcagcaggtgcagattgtccaggctcagccacagggtcaagcccaacaggcccagagtggcactggacagaccatgcaggtgatgcagcagatcatcactaacacaggagagatccagcagatcccggtgcagctgaatgccggccagctgcagtatatccgcttagcccagcctgtatcaggcactcaagttgtgcagggacagatccagacacttgccaccaatgctcaacagattacacagacagaggtccagcaaggacagcagcagttcagccagttcacagatggacagcagctctaccagatccagcaagtcaccatgcctgcgggccaggacctcgcccagcccatgttcatccagtcagccaaccagccctccgacgggcaggccccccaggtgaccggcgactgagggcctgagctggcaaggccaaggacacccaacacaatttttgccatacagccccaggcaatgggcacagccttcctccccagaggacccggccgacctcagcgcctcctgcaggctaggacactggtgcactacaccccatgcctgggggccgagattctccagcagaaagatgcaatattttttgtttcctttttttccatttttttctctaaggaatcaatatttcaatatgttgagtgtgtgtccaatgctatgaaattaaaatattaaataacatatttatggcattttcttgaagagtgtggttgaagaaatatttctccttttgtttttctttttttttgtttgttactgccacttctttttaggagcaaatctccccaggggtgtacggtatttcttgactctgggaacagctgctacccccaagacttgccacgttgttctgccctcagatggaattaggtgaatgtgtgtagctgctttttcactcgtggtcctctccccatcccttgctctgaccccagagctctgtgtatttgcatccagaggccatggaaacattctttgcatttaagagacagatttattccctgtggagagtgggtggattcattgccacactcttttctcccagggacccaggaaactaggactttgtgtgtttgctgcccacctcccttttattttttaaatgcattaaaaactgtgctagtctcctttgcatggacttcaagctgcatgaaatgcaataaatctcattttagataa

SEQ ID NO: 35204 - DNA, 1826 bp, Homo sapiens
agcggagatctcattccgcctccctctgtcgtcgccccttcccaattctcgcgagacctcaaggagcacagcttctgcgcaccgcacgatactgggagtccaggcgccaagggagggggaagggaaaaggggaaacggtgcaaacggcgtggccgccatcttgcttgtgcccccgcttcgcgcgcgctccgttctccgtgacgcacacttccccctcccctccgccgcgcctgggcctctgcattgcccgactccgtaggagcgcgggggcggctcctgctcttcctggactcctgagcagagttgtcgagatgtccacagaaggaggatttggtggtactagcagcagtgatgcccagcaaagtctacagtcgttctggcctcgggtcatggaagaaatccggaatttaacagtgaaagacttccgagtgcaggaactcccactggctcgtattaagaagattatgaaactggatgaagatgtgaagatgatcagtgcagaagcgcctgtactctttgccaaggcagcccagatttttatcacagagttgactcttcgagcctggattcacacagaagataacaagcgccggactctacagagaaatgatatcgccatggcaattacaaaatttgatcagtttgattttctcatcgatattgttccaagagatgaactgaaacctccaaagcgtcaggaggaggtgcgccagtctgtaactcctgccgagccagtccagtactatttcacgctggctcagcaacccaccgctgtccaagtccagggccagcagcaaggccagcagaccaccagctccacgaccaccatccagcctgggcagatcatcatcgcacagcctcagcagggccagaccacacctgtgacaatgcaggttggagaaggtcagcaggtgcagattgtccaggctcagccacagggtcaagcccaacaggcccagagtggcactggacagaccatgcaggtgatgcagcagatcatcactaacacaggagagatccagcagatcccggtgcagctgaatgccggccagctgcagtatatccgcttagcccagcctgtatcaggcactcaagttgtgcagggacagatccagacacttgccaccaatgctcaacagattacacagacagaggtccagcaaggacagcagcagttcagccagttcacagatggacagcagctctaccagatccagcaagtcaccatgcctgcgggccaggacctcgcccagcccatgttcatccagtcagccaaccagccctccgacgggcaggccccccaggtgaccggcgactgagggcctgagctggcaaggccaaggacacccaacacaatttttgccatacagccccaggcaatgggcacagccttcctccccagaggacccggccgacctcagcgcctcctgcaggctaggacactggtgcactacaccccatgcctgggggccgagattctccagcagaaagatgcaatattttttgtttcctttttttccatttttttctctaaggaatcaatatttcaatatgttgagtgtgtgtccaatgctatgaaattaaaatattaaataacatatttatggcattttcttgaagagtgtggttgaagaaatatttctccttttgtttttctttttttttgtttgttactgccacttctttttaggagcaaatctccccaggggtgtacggtatttcttgactctgggaacagctgctacccccaagacttgccacgttgttctgccctcagatggaattaggtgaatgtgtgtagcaatgaacgggtcctactaagatag

SEQ ID NO: 35205 - DNA, 1921 bp, Homo sapiens
agcggagatctcattccgcctccctctgtcgtcgccccttcccaattctcgcgagacctcaaggagcacagcttctgcgcaccgcacgatactgggagtccaggcgccaagggagggggaagggaaaaggggaaacggtgcaaacggcgtggccgccatcttgcttgtgcccccgcttcgcgcgcgctccgttctccgtgacgcacacttccccctcccctccgccgcgcctgggcctctgcattgcccgactccgtaggagcgcgggggcggctcctgctcttcctggactcctgagcagagttgtcgagatgtccacagaaggaggatttggtggtactagcagcagtgatgcccagcaaagtctacagtcgttctggcctcgggtcatggaagaaatccggaatttaacagtgaaagacttccgagtgcaggaactcccactggctcgtattaagaagattatgaaactggatgaagatgtgaagatgatcagtgcagaagcgcctgtactctttgccaaggcagcccagatttttatcacagagttgactcttcgagcctggattcacacagaagataacaagcgccggactctacagagaaatgatatcgccatggcaattacaaaatttgatcagtttgattttctcatcgatattgttccaagagatgaactgaaacctccaaagcgtcaggaggaggtgcgccagtctgtaactcctgccgagccagtccagtactatttcacgctggctcagcaacccaccgctgtccaagtccagggccagcagcaaggccagcagaccaccagctccacgaccaccatccagcctgggcagatcatcatcgcacagcctcagcagggccagaccacacctgtgacaatgcaggttggagaaggtcagcaggtgcagattgtccaggctcagccacagggtcaagcccaacaggcccagagtggcactggacagaccatgcaggtgatgcagcagatcatcactaacacaggagagatccagcagatcccggtgcagctgaatgccggccagctgcagtatatccgcttagcccagcctgtatcaggcactcaagttgtgcagggacagatccagacacttgccaccaatgctcaacagattacacagacagaggtccagcaaggacagcagcagttcagccagttcacagatggacagaggaacagcgtgcagcaagctcgagtctctgagctaacgggagaggcagagcccagagaagtgaaagccacaggaaattcaactccctgcacctcttccctgcccaccacacaccccccctcacaccgggctggtgcctcctgtgtctgctgctcccaaccccagcagagctccacttcccctcctccttctgacgccttgcagtgggtggtggttgaggtatctgggacccccaaccagctcgagacccatagggagctgcatgcccctctcccagggatgacctcactctctcctctccacccctcgcagcagctctaccagatccagcaagtcaccatgcctgcgggccaggacctcgcccagcccatgttcatccagtcagccaaccagccctccgacgggcaggccccccaggtgaccggcgactgagggcctgagctggcaaggccaaggacacccaacacaatttttgccatacagccccaggcaatgggcacagccttcctccccagaggacccggccgacctcagcgcctcctgcaggctaggacactggtgcactacaccccatgcctgggggccgagattctccagcagaaagatgcaatattttttgtttcctttttttccatttttttctctaaggaatcaatatttcaatatgttgagtgtgtgtccaatgctatgaaattaaaatattaaataacatatttatggca

SEQ ID NO: 35206 - DNA, 1581 bp, Homo sapiens
agcggagatctcattccgcctccctctgtcgtcgccccttcccaattctcgcgagacctcaaggagcacagcttctgcgcaccgcacgatactgggagtccaggcgccaagggagggggaagggaaaaggggaaacggtgcaaacggcgtggccgccatcttgcttgtgcccccgcttcgcgcgcgctccgttctccgtgacgcacacttccccctcccctccgccgcgcctgggcctctgcattgcccgactccgtaggagcgcgggggcggctcctgctcttcctggactcctgagcagagttgtcgagatgtccacagaaggaggatttggtggtactagcagcagtgatgcccagcaaagtctacagtcgttctggcctcgggtcatggaagaaatccggaatttaacagtgaaagacttccgagtgcaggaactcccactggctcgtattaagaagattatgaaactggatgaagatgtgaagatgatcagtgcagaagcgcctgtactctttgccaaggcagcccagatttttatcacagagttgactcttcgagcctggattcacacagaagataacaagcgccggactctacagagaaatgatatcgccatggcaattacaaaatttgatcagtttgattttctcatcgatattgttccaagagatgaactgaaacctccaaagcgtcaggaggaggtgcgccagtctgtaactcctgccgagccagtccagtactatttcacgctggctcagcaacccaccgctgtccaagtccagggccagcagcaaggccagcagaccaccagctccacgaccaccatccagcctgggcagatcatcatcgcacagcctcagcagggccagaccacacctgtgacaatgcaggttggagaaggtcagcaggtgcagattgtccaggctcagccacagggtcaagcccaacaggcccagagtggcactggacagaccatgcaggtgatgcagcagatcatcactaacacaggagagatccagcagatcccggtgcagctgaatgccggccagctgcagtatatccgcttagcccagcctgtatcaggcactcaagttgtgcagggacagatccagacacttgccaccaatgctcaacagattacacagacagaggtccagcaaggacagcagcagttcagccagttcacagatggacaggtagggtacccaacctgggctgggcagagggtgaggatttgcggggcagggtagcaggtagtatctgggtttggatggttagggcaactgtcctgtcctctactaacagtgagtggacagaaattgttaaaacaagtacggtatttaaatcagggcacctatcctttagttttatagacttagtgggaactaaaataatcttagacatgtagcccaaattgccattttacagatgagtaaactgaaccctggagatgggaagtgccttgtccatgctcccctagatgttcattgcagagccaggactagagagcaggtttcctgtttccctctctagaactgtatttttttcccctcttccccgcccaggggatcctctagc

SEQ ID NO: 35207 - DNA, 986 bp, Homo sapiens
aacctggcccgtattccggactgtgtaaagacttccgagtgcaggaactcccactggctcgtattaagaagattatgaaactggatgaagatgtgaagatgatcagtgcagaagcgcctgtactctttgccaaggcagcccagatttttatcacagagttgactcttcgagcctggattcacacagaagataacaagcgccggactctacagagaaatgatatcgccatggcaattacaaaatttgatcagttgattttctcatcgatattgttccaagagatgaactgaaacctccaaagcgtcaggaggaggtgcgccagtctgtaactcctgccgagccagtccagtactatttcacgctggctcagcaacccaccgctgtccaagtccagggccagcagcaaggccagcagaccaccagctccacgaccaccatccagcctgggcagatcatcatcgcacagcctcagcagggccagaccacacctgtgacaatgcaggttggagaaggtcagcaggtgcagatgtccaggctcagccacagggtcaagcccaacaggcccagagtggcactggacagaccatgcaggtgatgcagcagatcatcactaacacaggagagatccagcagatcccggtgcagctgaatgccggcagctgcagtatatccgcttagcccagcctgtatcaggcactcaagtgtgcagcggacagatccagacacttgcacaatgtcaacagatacacagacagaggtccagcagacggcagcaagtcagccaagttcaaagatgcaaggaggtctacagatccggaagtccatgctgggggcagacctcgcccgccgtcatccagcggcaacagcctcgagggagccccaggagcggctgggggtcgtggggggaggcccaaaattggacagcccgagggggctcccaaaaggaacccgggagggaaccccgcgggccaagaaaatttctaaaa

SEQ ID NO: 35208 - DNA, 473 bp, Homo sapiens
gaagggcagtggggaggtgggaacagccagaattatgaggacaatgacatccatgacagttttagagactaccgttattcgttttagccttgaaatcactgaagcgggtgtaggtacaatcatcagaccagttttatggatctggggtgcagagctgtgctcagctatgtctgagtctaggggtctccctctcatccacagtgttatctgagctcccattttagagatcagaaaacggaggctagcgagagtcatcgcgggaaacttgccctctgactgccagtcagaacccgtgacatgcacctgccccagcctggtctggggctaaatccaggccacagcagggggaatgacctcgagcccttaggcaaatctgcttgagtcaatgggtcagagatccctggactgagggtcaaatggaccctctcaggtgtgggggtggcacacctgagaggacccatggccacctgcct

SEQ ID NO: 35209 - DNA, 520 bp, Homo sapiens
agcaggagaactgcttgaacctgggaggcagaggttgcggtgagccaagatcgcgccattgcactccagcctgggcaacaagagtgaaactccgtctcaaaaaaaaaagaaaaattctaaaactttaagtgaaatttattatcccttcccacttattttctgtggttttgtgtgtatagagcatcttcctttgttacccaagtacctcgaatgggttggaaactggcggtagaaggttagagtagccaattgatatgtaaaccaagtgtcagatcagatgagatgaaagaggtggagtttaaagcaagtgagatatgataaacaatgatgaaagcaaaaatagggcagttgaaccagagtcagccagttggcataactgccaataaatgaggcagtgtagaataactaataatgattggaatcaaggaaaagagagcatagaggaattatctagagaataacttctttttaatcatttgttagtcatgtaactatggataaaacatactaatttagcgtc

SEQ ID NO: 35210 - DNA, 261 bp, Homo sapiens
cttgtactgtctccctcatttgtgtcttgaatggaagagagaaagatggatgtagccactgagccaggaattttacatacccatagcctatctcatctgggctagagccgtggtttggttactggtatactatttagtagtgtgactgttgtgaactttttatagtactgtgctttcctaaaatgttgttttgagatttatcaaaatctggaccatatatttcttatgagtgtcaagaatgtgaacatccttgtcaaaagg

SEQ ID NO: 35211 - DNA, 448 bp, Homo sapiens
gctcttggacatgactaaaaaaaagaacagcctgataaaaaatagtcaaaggagatgaacaagacaaatcacaacggaagggaagtaaatggctctttgaaaacatgaaaagatgctcagccttattcatggtaagagacatgcaattgaaaataacacctgtgaaaatggcacctgtgacatttgcaaatattcataaacttcataacacactgttggcaagtccacgaggaggcaggtgcttctgtactttcctggtgggagtatcaagtggtgtagctaccgaggaaggcaatttggcagtatccatcaatattaaaaatgcatgttggctgggcgtggtggctcacgcctataatcccagcactttgggaggccgaggtgggtggatcacgaggtcaagagctcaagaccatcctggccaacatggtgaaaacccatttctact

SEQ ID NO: 35212 - DNA, 474 bp, Homo sapiens
gctgcctcctcccccgcgccggaaccctctcccctcccttgcgttgcccccctctcccgccgcctcctcccgctctcctctcgctctcctcccgcctccttcttccaggcgcggcagcggggcaagagcgaggtggctgcgaggaggcgtcactgaaagccctgacttggggaaggctgcgggctcggagccggagacgccgagctggggccgggtgagttgggaatcagactcttgagttgacagctggcctatggtttctgcattttgttaagaagcacctcatgcaagcgagggacctgggactgctcacagccaggtggcatttttctgaagttgttcattaagacttcccagcattcctacagatataaataggtgaggccgcaggcggtgctctgggtccgggagcgctgtccccagcatgaacgcggccggcggcgggagtgaatgactgcagctgcgacttccttc

SEQ ID NO: 35213 - DNA, 399 bp, Homo sapiens
atttttttttactctaaatagtcaaaatgataacactggtagatacctacttttaaggaactctaggtaaggtgacagatacaaaggcatgtacataatttcaatacaataaaagtcagtgcaagaatagacatatgcctagaatacaactaaaaagatgagccactgggagtgttggaaaagatgagggccataacaactagaataatgcctcggcccatggcagctgttcactaaaaattgttgaatttgttgaattattgagtgataaaatatgaaccatacaggaggcagttttatgtaatggaaaataatatgaagcaaaaagactcaggtctgaatttgggctttcctacaaattagtaatgctatcttggagcttttaagaagactgtttcc

SEQ ID NO: 35214 - DNA, 251 bp, Homo sapiens
taacaaactttctttcagttgtccagtgtacagaagcttactggaaggagtggccaactagttaaaggtttgacacctcaatatcaacaaaatgccaagtggatcattttgactctcacagcaatccaactggacatttgaccatgccccgtggtcagtggagagcttcttctctgaaggccacttttatctagcacatcaaggctatacacctctttcactaagaagaatttgacacttttatgttgtga

SEQ ID NO: 35215 - DNA, 546 bp, Homo sapiens
aacaaattaccaccaatttagtggtttaaaacaccaccaatttaatatcttactgttctgtaggtcagaaggccaacggtgatcttcccgggctaaaaatcaaagtgttgcaggtgttgcattcttttctggaggttttaggggagaatcaattcctggccttttccaccttctggaagccgcctgccttccttggcttgtgacttcaaagctagcaacgttgcatctctctgagccttctgtagttatagctccttctgactacagctgggaaacgtttttgcttttaaagtctcatgtgattagattggggctacctggttaatccacatctacagaagtcccttttgccttgtaaggtaacctattcacaggttcaggggtgagggagagagtgtggacacttttggaggaccagtattcttccacctacatttagtggtagaacccagaaatgatgccccccaccagaaaaaaaaaaaagctttagagcacaaagaaataagaacacctagatgttggtgaaaatgtaagcaatagttctac

SEQ ID NO: 35216 - DNA, 420 bp, Homo sapiens
gccatacattccaactttgaggattaagctgccgtcaatctattatttatttttagtaagaccaagagataaattttaatgattcaattaaaaatcataaggtcagattgatgaaatgactcaatataaactgctcgaccttccactagtacatacttgctcattgtaaaacctgtatgaaagtgtagcagaaacagccaccctatttgcagtttttctaagtaacttggtaggttgaaagatccaaggtcaaaagaacttatccagtgtagcaaataacagtaaaataagataaagtggcccgggcatggtggctcatgcctgtaatcccagcactttgggaggctgaagtgggtgcatcacatgaggtcaggagttcgagatcagcctggccaacatggtgaaatcccatctctacca

SEQ ID NO: 35217 - DNA, 640 bp, Homo sapiens
aataagtgaaaaacaaaggtcccaaacatggctctgaaacaatgcatgcccttgtcagtcttgtaacttaactctaagcttcttggcatacttaagagttatttatgcaacaaccagacatttgagaattatgatagatgaaggtgctgataataataatagctaccatgtattgagctgtgtgccaggttctttgttaggagctggggagacaatagtgaataaaacagccaaaaattcttcctctcaagtaatgttcagacaagtaaacaggctgctgagagctatgataggaaaacacaaggtgttacagaaggcacacaggactcccgggaacctaacccaggcttggggatcagtggggacaatttcctggagaaattgatatctaagctaatcacgaaggattagtaagaacagttaggtggaagatgaacaaggggaagacagtatttaaaaaaaaggaacactatgtataaaggattgaaagctacagagaacaagtttgtttgtttgtttgagacggagtctcactctactgcctaggctggagtgcaatggtgcgatcttggctcactacaacctccgcctcctgggttcatgcgattctcctgcctcagactccaaagcagctgggatt

SEQ ID NO: 35218 - DNA, 511 bp, Homo sapiens
agagaagaggctttgacaagcaaagattcctgcagtgctattgccatagagctgtatttagcaggctcccaagctctatgcttatatagaacctcttaaggtgttctagactctgagatttgggaagtgctttttctatattgagtctaaatgtgcagttcattttatgaaatgataaaaaaaattagcacagttgtcatcacttatatttttgcctttgaatcataaatccccaagatttccatatgaattattatttttttaaaagaacaacatttgtactttatatgcttccaaaaggaatgtgagccttctcatattaaaagttttctatgcagtaatatataaatagaaatgattgtatctaaatcaaaaatcaatgatacatggccagtacagtgactcctgcctgtaatcccagcactttgggaggccaaggcgggaggattgcttgagcccgggagttcaagaccagcctgggcaacatagtgagatcctgtctcttaaatta

SEQ ID NO: 35219 - DNA, 342 bp, Homo sapiens
agaggatgctaattaaaggaacagaaaactggagtagacagaagtgaaaaaggcaaaaagtgtcaaccccatcacactaacaaaattggagatgaagaaaacgaggcaaaataacttaacttgataagcatacataagcaaaagggaagaaataaaataaaacagatcattagccacaaataatatagtagcaaaaaagtaaaagttttcaattttctgattataagatacatacttaaagtatcagaggaaagttgattaaagtgatatgtgcagggagtttcaagaaaaagcaaatcaaaagaaatcaaagtatcattaatcacattagagaaagtggga

SEQ ID NO: 35220 - DNA, 374 bp, Homo sapiens
atccagcatttgcctcatgatgatctcagaaaaaatgagatgggagaagaaagagaaagtgtcagacccaaccagagtgtgagtcctgtaggaacctcacaggcaacatgggaagaggaggcagaaccaggaagcccaaatgagtgctctccagcccagcaggtccttccctatggcccatggcatcctggccctggacgtggggaagccttgcctgcgcaccactcctagttacagggagctcgcttcctcccagggtagcctcttccaaactgctgtccccattgggtataagtctctttttttttttttttttttttgtgaaacagggtctcactctatcgcccaggctggagtgcagtggcatgatctca

SEQ ID NO: 35221 - DNA, 342 bp, Homo sapiens
cagtaagttaagatgcaatatttgaataatgcaattaagaaatctcttaagggacatatatagaatactaataccgaagaccttcaaaatatgcattctctaagtacacgtgatagttttctgaaattgaccaactcaaaaaaaaagcaactctcagattataaaaggattgaaattattcagattatgttctttgatgacagtgaaaattatgctagaaatcaataataaaaaggtaactagaaaatcctcagctttttctaagttaagcagtatgcctctaaatgttactcacaggtcaaagaactcacaatggaagttagaaaatattttcaactgatt

SEQ ID NO: 35222 - DNA, 596 bp, Homo sapiens
tgagttggagtcttgctctgtcgcccaggctggagtgcagtgacccaatctcggctcactgcaagctccacctcccgggttcatgccattctcctgcctcagcctcccaagtagctgggactacaggtgcccgccaccacgcccggctaatttttttaattttagtagagtcggggtttcaccatgttggccaagatggtctcgatctgacctcgtgatctgcccgcctcggcctcccaaagtgctgggattacaggtgtgagccaccgcacccagccttattcttcccttttaaatacttaaagcacattcagattagttgaaaattcacgtgtttttggaggccaggcaggtggccttctgcagagacagcagcagctcagctcttgctgaccaaggccttggaggactgtgagccacaatcacatatgtccatgtttcaaaagaagctaaatatccagatttcctccatgggccaactaaaaggtgattgtggactatacaggctgccagtttaatcctttatcagagtctctgtggataatgtacctttgtgcctaatactttatctgtctaccaaaactcagtccagatct

SEQ ID NO: 35223 - DNA, 1271 bp, Homo sapiens
ttttaattttcagtagagatgggtttcacgttggccaggctggtttcaaattcctgacctcaagtgatccgcctgccttggcctcccaaagtgctaggattacatgtatgttttatttgttttctttcagtaagaatgtaagctcaatgaaggttaggatgttttgttttttttattcacccagttccttgaagactgcttctcacacaataagagctcaacaaatagttgctggttggctgaatgaatgaatgaatgaatggggttcaacatacaatggcagatggtgatcccttctgggaagctcgaccaaagagccctgtgaggggtcaccacagggatcacattgtggggtagagttgggaatctggtcttatcaattcccatggccccaggttagtaaggacaaacctagcactgacattgccacgcctcactctcagcagttcacaaagcctcctgcacacatgctgttatcctaaccagaatcttcacaacaccaacatgaggaaacgaactaaggcccaatactttggaatcctcattcaatgctctttcccatctctcttgggatcaacatagtcagagccctctactttggggaaaaagtgtgtcataggggcttgcgactggtacacaatctcaaaagtgggatgctcaaagtcttctctccatgccctcaaaagatgacctgggctgggcatggtggctcacacctgtaatcctaacacttgggaggccaaggtgggcagatcacttgagtctaggagctcgagaccagcctgagcaacatggtgagactctgcctctacaaaaaattacaaaaatttgccaggcatggtggtccctagtactctggaggctgaggtaggaggctcaactgatcccagggaggttgaggttgcagtgagccatgacggcaccactgcactccagcctgggcggcagagtgagacccccatctcaaaaaaataaataaataaataaataaaaccaagacctggaaactggcactccaaaaggctgcctgtgtgcgtacagaatgcacagatgtgccacagccacccagactcaggtggggaacttggggaagcaaaccacttagagaaagagaggcaccagaaagagaatcaaggaaacattttacacacaagagctccttttttaaagcctctgacaaagttttctaaccccgcgtggtgagtgaaggagcccaaaggcacactgtgttttttggctgtcccacaggctgagttgatttggaattctgc

SEQ ID NO: 35224 - DNA, 345 bp, Homo sapiens
gtctgtaaagaggtactttatatgataagtcttatgataaggactggaagaaagagaggataagacagagcgcccaagaaagagagacggaaaaagggaatggttaatgatttcagtacgtgaagaaggatcattagttctgacgccttcttttgtgcatcctgccatgtcactttatttatatgtgttttctcaattgttaacatttttatattacattgcattacagctaaccattaaggaataaaatcattcagtccgaccacaatttcatattaattttgctatgtgtttctgaataacagatagatctccatcatctgactccttttacaaaaaaaaaaa

SEQ ID NO: 35225 - DNA, 394 bp, Homo sapiens
ccaactccttgccaggttaacataaaaccacacacacactaaaggtcaatttacctcagttcataaacctgatacatcatgtctagctttctacaaaaatttgcatgacatgctaaaaggcaaagaaaaaaacagtctaaagaaacaaagcatgcatcagaactgggctacaaaatagcagagattttggagttatcagaccagaaacttccaataacaataattataagttaaagtctctaatgaaaaaagtagacaatattcaagaacagttgggtaatgtaagcacagagatggaaactatacgagttaaaagtaagtggtggaaataaaaaacactgcacaaatgaaactgctttagatgggttcatcagttagactgaatacagctaac

SEQ ID NO: 35226 - DNA, 396 bp, Homo sapiens
gaccttgtccccattttacccttgaggaaactgaagcaaaacaatgtgtccatctctctgatctaggggcagccctcaaagcctgaccccttaggctgcaaaactcttcctccctagtctcccaaagaccattgattccccccaactccatctatacctcaggatccagatggcagttcttttggaggaatagtaacccacagtttaaatgctcatgcttagaaaaggcacctcatgcccttattaaccaacactgtgaaccagctcatcaggcagcaagccgagagccaggccctgggaaaaggagacaggagctgggagttttgtttttgttttctgtttgtttttgagacggagttttgttcttgttgcccagactggagtgcaatggcgcaa

SEQ ID NO: 35227 - DNA, 369 bp, Homo sapiens
ctggcttgtccattggtgatgttgcaaagaaactgggagagatgtggaataacactgctgcagatgacaagcagccttatgaaaagaaggctgcgaagctgaaggaaaaatacgaaaaggatactgctgcatattgagctaaaggaaagcctgatgcagcaaaaaagggagttgccaaggccgaaaaagcaagaaaaacaaggaagatgaggaagatgaagaggatgaggaggaggaagatgaagaagatgatgatgatgaataagttggttctagcacagatttttttcttgtctataaagcatttaacccccctgtatacaactcactccttttaaagaaaaaaattgaaatgtaaggctgtgtaag

SEQ ID NO: 35228 - DNA, 413 bp, Homo sapiens
aagtaaacaattaaatgaaattgaatgtttcaggtgcaagagtacgttattggggatagagaggacactgcagcccctcagccccagccccaaggccctcctgtcaaaatgtgtctaaccaggatgcaggaagcccacatctgtccaggaatagagcttgcagagtggctacgtgagggtggaaatgccagattgaagtccctgaagaacttcagttttggcagctagcagtgctgcagacagccctgcccaggcaagccccacccaagaacggagggccaggcagggctgactcagttgggcaaccattggctgcactcagacaagagttacatgattcatcctctagccaagagaacagagttttaatcacaacatttccccctttcctttgtcttattttaaagccagtg

SEQ ID NO: 35229 - DNA, 505 bp, Homo sapiens
tagtggccctctcttgtcctttttgccttaattctcagcttcttgcctagctccccagaatcagcagaatcctaagagaaaataatgtcagcttagctctccatgctttccctctgatagtatttgccacttagtttttggtggccttagcactctccagtatattcaaacaagtgtgtctgtgtatctggcttttctacttgttcttgatgggagcattagtctactataagctactgagttatatcaaaagcaaaaagctagattctaatgtattcatatctttttaaaaataatgcttcttggctgggcacagtggctcacacgtgtaatcccagcactttgggaggctggggcaggcggatcacctgaggtcaggagttcgagatcaacctagccaacatggcgaaattttgtctcaacaaaaaatacaaaaattagccaggagtggtggtatgtgcctgtagtcccagctacttggagggctgaggtgggaggatcgctt

SEQ ID NO: 35230 - DNA, 350 bp, Homo sapiens
ctcaagataacccaatagcaactactgtacaaatgacaacagataatggcagtaagaatctggagagggagaggttatttttcagtttgaggcagtaaggttggctttatggcacaggtggtttttaaactatcaagtttattctgaagtttattaggtggaggggaaagatgttttctatgtgaataaaaaatcttgagtaaaagtcagtttcagaggtatattcagaaatattgagcaagtaagtttgacagaaacagtgctgaattaagtatttttgaagtttgatctgtttgggcgccgtttccagttttgctttttaattctcctctctctctctctctctctct

SEQ ID NO: 35231 - DNA, 747 bp, Homo sapiens
aggtcatgtgatgaaagcagtccaagtgcggatattttacagcagtcatcgttgggcctgaccgaggcactaacctcagctctgctgacaggtcacccagcaaccatatgtgcagttgtgagcagggtaccaggcactacagtcacagtcaccattaagagttagacctccaaaagacacagggttcctctaactattgtgacaggaacgttctggagatcaactctcttctgtatcagtaggaacattttctggttctaatccttaagccaaaactctgaatgattccagattaccaactatctccaactgaactagagatagcttacaaatgttaataaaatagcaatgaggaagctttttactttttaacttgaggttcctcccgatgtgctattactgcacgaggaaaagccattccctatcattttagccaacttagtttcaggccagtgagcaaaactttccttttttgttagaggacacaatgcccactgacttctgagttgtaaaccccatttttgagtcctacattcccaagatgaggagataaggataacgctcaggccctcacagatcctggtagctaaattactcctttccgtttattgtccacccgtggcctccagccgggctgggctgtctttcagcgccacagagttcagctgtcatacttgttaatcccatggtttcattatactgaatgactaatgcttgagagtcgataataaattaccctgttttcat

SEQ ID NO: 35232 - DNA, 399 bp, Homo sapiens
ctttaattatcattcagttctaagaattttgttaattcttttgtgggaattcttttgaagtaagttcttaggtttgcagccatatgaatagttttaaaaactgactttgccgggcatgatagctcacacaggtaatcccagcactttgggaggccaggaccagaagactgctcgagcccaggagttcaagaccagcatgggcaacatagcgagacctccatttctacaaaatattttttaaattagtcaggcatggtggcacgtacctgtagtcctggctactagagaggctgaggcaggaggatggcttaagcccaggttcaatcatagctgcagtgagctatgattgcaccactgcactccagcctaggtgacaaagtgatataccctatttctaaa

SEQ ID NO: 35233 - DNA, 429 bp, Homo sapiens
taatgcaccagaattcaaacctaggtctctatcatctcatggttggtgggttcccacttgccaagttccctccctgatcctccatgtctgtgttaacagccgggttgagctggcccactctgcctccccctaaactgcactgttcccagtccctacaatcctgccagtagactaaggacacgtatgaagaaaacactgcccttctgctgccccttccctcctcgtaccctcgatgttgctaggtcctccctttgagttccttgaaagggtctctagggtcagaagagtatgggaagatgcagatgaagtgacctgggaggtacaggcccgaggccagagcctctctgcagagcctttccccaggatccacccgctgtggtcatcttactggaatcccactgaaatcccactagctgaagagatttcttt

SEQ ID NO: 35234 - DNA, 547 bp, Homo sapiens
tctccagacccttggaagttgctgttcagttgtatgttttgttccttgtgttgtcttacttggagctcacgtctctctggaggcttcactagaagaggtggctgacctggcagttccagctccattccatgctccccctaagccccttctggcacttcatcagatactggactgtccttccccagctgtgtcacctcctctctgtattgttttgcccaatggacatctatttatttcatctttatatgtgcaatctgctgtacagaggggtgggagggataaaagtctcaagaataggatcacagaaaaaccaaaaagaattgaaagaaaatagctgataaggtccttttgttcattcacagcttaaatattttctacaaacctgtatgacaggtgcagcactagtcattgcagatgcactcttgttctctgagagcctatagcccagagacaggctcaacattaacccagcaatcccatgaggaaggtccaagccccaaaaaggccagttaaattggttctaagggtggcttatcctgcagtttct

SEQ ID NO: 35235 - DNA, 464 bp, Homo sapiens
atttatttatttatttatttagagacatagttttgctcttgttgccccaggctggagtgcaatggcgcgatcttggttcaccacaacctccatctcctgggttcaagcgattctcctgcctcagcctcctgagtagctgggattacaggcatgtgtcaccatgcccagctaattttgtatttttagtagagatggggtttctccataaattttcctattttttgtagagaccggagtctcactctgttgcccaggccggtcttgaactcctggcctcaaaccatcctcccgccgcagcctcccaaagtgctggtattacaggcgtgagccactacacctgaccgaaattttcattttataaggagggacgcttcaggcctggaggaattagctagcctagagacccaggctgtcaatggcaggtgtgggactcatatcccgttctgtgagacttgcaagcatgg

SEQ ID NO: 35236 - DNA, 232 bp, Homo sapiens
tcgggaaaggcagtagtggagatacaaatgcagtgttaggggagtccagaggagggcggcttctgtaaaagtgtccaagccaaagctgagtttcctctaacacatggcatgatgtccctttccatgcttcaatatggactttgggtgacattttggactcttcatattttatcttctcaaactcattttgactccctcatcctaacttagttctcatccaaaaacaaagaaa

SEQ ID NO: 35237 - DNA, 374 bp, Homo sapiens
aacattattaaactcctctaactagggctagctcctcttgctccaggctgtaaaaatatgacctgtgtcctgagctgcttctgttttcaacaggtccttgtcatccattctgagcagaaagggcatgcaaatgactgccccataagacatgtctcaagtgtttcttgctaaaaccagaatattctataggaaagggacgagaaaccgcactgctataacacagatttcttcctaacctggtgtggtcatggtcaccatttattctaagggaactttggcagactcttagagttcacacacacgcacacacacacacagaggagaacaaggcataacatatagaaattagatatactaagaggtacaaagaagaa

SEQ ID NO: 35238 - DNA, 759 bp, Homo sapiens
gcccactactaaggagataagtctgatttcaatcttactgtctacaaaactgcactaaatcttttcactgacattaatagccaaaaggcgagatactttaactctgggtagaattagttcctttagtaacgctggattatggctacgcccaagtgggtttttttattgttattaaaaccaacatgtgcaggaggctaaggcaggagaattgcttgaacctgggaggcagaggttgcagggaccccagatcaagccactgcactccagcctgggaatagagtgagactccatctcaaaacaaaaaaccaagccaaaaaaaaaaaaacccaacatgtgatgagttagtgtatttatgtatttacattgtattttataatcacaacacaatgtctttgtcatagaataataatccttggcagctatttgttccccaacttcataccttttctgtcttttgttgagactcaagtagtgacgtgttttgctactagttatgatgggatagctcctaaattgagttgagtctccattttcaaccctctcaaaaccaaaaaccatatgactcagcatccttcgaaattggtccccagggagtgctactacaatagtgggagggacctaaagacatcacaggaaatatgcagggagaagtgacagatgactaaggaaatccagatattagaggaatgagtaagtataaataagaaactttagccagcacggcaggtcatgcttgtaatcccagcaccttgggaggcc

SEQ ID NO: 35239 - DNA, 362 bp, Homo sapiens
caaagcggacaccaagaaacgccacacccccagaggtcatgctgaaagtacgtctaatagacagctactgtggttgagaggaaaggtgtctttttattgcttctagagacgttgaaagtgtgacctgagcacctcataatcatgtgaaaaagacactcaaaaactaccatttgaatggatggatgaaaataacctccgtatattctacgaagatgtttaataataaataggtttcgttataagagaatgtgtgtcacttcgtctcttccctcacccccgagacttagtgacagttatttttgacttttccaactatactatttgcctagaaaatgtgtctattaaatagcgtattgagaaat

SEQ ID NO: 35240 - DNA, 628 bp, Homo sapiens
gtctcctggggaagcaggccataaacacaaacaaatgaaataatgacagattagggtaaatgctatgaaggaaacatataggaaactgacacagactggaaagaaatgggggctacttgagatagtgtagtcagagattctgaggctatgggaggataaggatgttgcctgggaagagtgggcagggattgttgtttcaggtaacgggagcatactcggtatgggaaggtgtgtggtgtgtttgaggaattgaaagtctactgtgtgttgtaacgtagggcctgtcatcctctgccagttgctgtgatcatgcatcttaatagatttggttctggccagatgtggtggctcacgcctgtattcccagcactttgggaggccaaggcaggtggatcacgaggtcaggagttcgagaccagcctggccaacatagtgaaaccctgtctctactaaaaatacaaaaaatgttagctgggcgtggtggtgggcacctgtagtcccagctacttgggaggttgaggcaggagaaacacttgaacctgggaggtggaggctgtagtgagctgagatcacaccactgtactccagcctgggtgacagagtgagactccatctcaaaaaaaaaaaa

SEQ ID NO: 35241 - DNA, 1191 bp, Homo sapiens
gctaggtaccagccccgctttacaatcggcacgaggggcgaggaggagggagggccgccagtgtcgacatgctgctggaggaggttcgcgccggcgaccggctgagtggggcggcggcccggggcgacgtgcaggaggtgcgccgccttctgcaccgcgagctggtgcatcccgacgccctcaaccgcttcggcaagacggcgctgcaggtcatgatgtttggcagcaccgccatcgccctggagctgctgaagcaaggtgccagccccaatgtccaggacacctccggtaccagtccagtccatgacgcagcccgcactggattcctggacaccctgaaggtcctagtggagcacggggctgatgtcaacgtgcctgatggcaccggggcacttccaatccatctggcagttcaagagggtcacactgctgtggtcagctttctggcagctgaatctgatctccatcgcagggacgccaggggtctcacacccttggagctggcactgcagagaggggctcaggacctcgtggacatcctgcagggccacatggtggccccgctgtgatctggggtcaccctctccagcaagagaaccccgtggggttatgtatcagaagagaggggaagaaacactttctcttcttgtttctcctgcccactgctgcagtaggggaggagcacagtttgtggcttataggtgttggttttgggggtgtgagtgtttgggggacgtttctcatttgtttttctcactccttttggtgtgttggacagagaagggctcctgcaggccacagccacctaaacggttcagtttcttctgcgcctcaggctgctggggcctcagacgagacccaagggcagagcatttaagagtgaagtcatgacctccagggagcctagaagctggtggccttggccggctgtgctcagagacctgaagtgtgcacgttgcttcaggcatggggggtggggggagcgtcccaaatcaataagaaggtagaatgagttatgagttattcatattctgttggaagcttgttttccagtctcttgtacagcgttttaaaagaaatggattctatttattatgctttattggaaaaaatgttgtaataatttaatgtttttacccattaaattaagacttgtgcatgatcaaaaaaaaggtggcttctgatttttga

SEQ ID NO: 35242 - DNA, 1532 bp, Homo sapiens
atcagttgcgttcggggcgtggccgggagcacgttggctccgccccctggcggctgcctcagcggcggcggcggcgcaggctcagagcagaccccgcccggcgaggaggagggagggtgagttagggggagacccggcccccaaggggcgggcgccgggcagggccccgcgggcggccgagggttgggcccggctcccagcccctcgccgtcctccggctgacagggggaggagcccgccgggagggccggggtctcgggctggggagccgggacgggagagcagcgcagccgggtgcaccgcggccgcgccccgggagggctgttcgggccagcgcccgccggctgctccgcgctgacagcgccgggctggggcggggcggggggctttgcaggccgccagtgtcgacatgctgctggaggaggttcgcgccggcgaccggctgagtggggcggcggcccggggcgacgtgcaggaggtgcgccgccttctgcaccgcgagctggtgcatcccgacgccctcaaccgcttcggcaagacggcgctgcaggtcatgatgtttggcagcaccgccatcgccctggagctgctgaagcaaggtgccagccccaatgtccaggacacctccggtaccagtccagtccatgacgcagcccgcactggattcctggacaccctgaaggtcctagtggagcacggggctgatgtcaacgtgcctgatggcaccggggcacttccaatccatctggcagttcaagagggtcacactgctgtggtcagctttctggcagctgaatctgatctccatcgcagggacgccaggggtctcacacccttggagctggcactgcagagaggggctcaggacctcgtggacatcctgcagggccacatggtggccccgctgtgatctggggtcaccctctccagcaagagaaccccgtggggttatgtatcagaagagaggggaagaaacactttctcttcttgtttctcctgcccactgctgcagtaggggaggagcacagtttgtggcttataggtgttggttttgggggtgtgagtgtttgggggacgtttctcatttgtttttctcactccttttggtgtgttggacagagaagggctcctgcaggccacagccacctaaacggttcagtttcttctgcgcctcaggctgctggggcctcagacgagacccaagggcagagcatttaagagtgaagtcatgacctccagggagcctagaagctggtggccttggccggctgtgctcagagacctgaagtgtgcacgttgcttcaggcatggggggtggggggagcgtcccaaatcaataagaaggtagaatgagttatgagttattcatattctgttggaagcttgttttccagtctcttgtacagcgttttaaaagaaatggattctatttattatgctttattggaaaaaatgttgtaataatttaatgtttttacccattaaattaagacttgtgcatgatcaaaaaaaaggtggcttctgatttttga

SEQ ID NO: 35243 - DNA, 1254 bp, Homo sapiens
atcagttgcgttcggggcgtggccgggagcacgttggctccgccccctggcggctgcctcagcggcggcggcggcgcaggctcagagcagaccccgcccggcgaggaggagggagggccgccagtgtcgacatgctgctggaggaggttcgcgccggcgaccggctgagtggggcggcggcccggggcgacgtgcaggaggtgcgccgccttctgcaccgcgagctggtgcatcccgacgccctcaaccgcttcggcaagacggcgctgcaggtcatgatgtttggcagcaccgccatcgccctggagctgctgaagcaaggtgccagccccaatgtccaggacacctccggtaccagtccagtccatgacgcagcccgcactggattcctggacaccctgaaggtcctagtggagcacggggctgatgtcaacgtgcctgatggcaccggggcacttccaatccatctggcagttcaagagggtcacactgctgtggtcagctttctggcagctgaatctgatctccatcgcagggacgccaggggtctcacacccttggagctggcactgcagagaggggctcaggacctcgtggacatcctgcagggccacatggtggccccgctgtgatctggggtcaccctctccagcaagagaaccccgtggggttatgtatcagaagagaggggaagaaacactttctcttcttgtttctcctgcccactgctgcagtaggggaggagcacagtttgtggcttataggtgttggttttgggggtgtgagtgtttgggggacgtttctcatttgtttttctcactccttttggtgtgttggacagagaagggctcctgcaggccacagccacctaaacggttcagtttcttctgcgcctcaggctgctggggcctcagacgagacccaagggcagagcatttaagagtgaagtcatgacctccagggagcctagaagctggtggccttggccggctgtgctcagagacctgaagtgtgcacgttgcttcaggcatggggggtggggggagcgtcccaaatcaataagaaggtagaatgagttatgagttattcatattctgttggaagcttgttttccagtctcttgtacagcgttttaaaagaaatggattctatttattatgctttattggaaaaaatgttgtaataatttaatgtttttacccattaaattaagacttgtgcatgatcaaaaaaaaggtggcttctgatttttga

SEQ ID NO: 35244 - DNA, 427 bp, Homo sapiens
cggccgcgccccgggagggctgttcgggccagcgcccgccggctgctccgcgctgacagcgccgggctggggcggggcggggggctttgcaggccgccagtgtcgacatgctgctggaggaggttcgcgccggcgaccggctgagtggggcggcggcccggggcgacgtgcaggaggtgcgccgccttctgcaccgcgagctggtgcatcccgacgccctcaaccgcttcggcaagacggcgctgcaggtgaggccgggccggtccaggttggggcggggcggctaagcgggatgaggatcgagaccccagagctcctctctggtctcctggccctggtggtgacccactgggaaccggtccttcttctctaggctttcattgttcccccacagtcccccttcgaaggtgggtggtgggtgaggcta

SEQ ID NO: 35245 - DNA, 1363 bp, Homo sapiens
ctcccaggttcaagcaattctcctgcctcagcctcccgagtagctgggattacaggcacctgccaccacgcccagctaattttttgtatttttagtagagacggcatttcaccatgttggccaggctggtctcgaactcctgaccttgtgatttgcctgcctcagcctcccaaagtgttggcattacaggcgtgagctaccgcacccggccaactataaagttattttaaaggatatacaatgaactcttaacagtgatttgatattggggaggaaactgtaaaaatgtcagttctaccaaattctattataaaaacttaatgcacttccaagtaaaatttcagccagaattttttatctttcttggtgggggtgtggtggtggtgaagaggaactaaaaaggagagaaaacaattaaaaaattgaaagattcatatggaaaaagaaatctagcatagtcaaaaattttttgaaaaaaattaaaaccacatagagaggcagggcaaccaagtgagacctcatgtcttaaaaaaaaaaaaaattaatagaaaaaattaggtatggtggcgcatgcctgtaatcccaactgctcaggaggctgaggtgggaggatggcttgagtccaggagtttgaggctgcagtgagccatggtcgctccactgcactccacactgggcaacagagtaagaccctatctttaaaaaaaaaaaaaaaaagtaaaagaaaacacagaaggaacactttccttgctggatttgtaaggttactgttaagcagacactgtgcttgaaaacagagagaattgggggacagtatagagtaagatccagaaatggactcccccacagaggaattcagtgtatcacaatggaggtttttcaactcagtgaaaaagggatattattttaatgatgctatcacactgcctttgcatgagaagaaaattaaattggactgctctgtcatgccatttacaaaaataaatctcatcatgtagaggagttgcttagaagaaaaagaaaaaattcagatgaagtaaaaattaaaatgaaaaaagtaaacgaatttagaaaaactaattacgcagacactcagaagacttttagaaggaaaaggaaaccaagaagttataaggggaaagctaagcatatttgattatgtaatgttttaaaacttgagtgataaaccataaacaaagccaaaaagcaaaacagagattagggtgagtaaccataacagaagtgacagctaagagatgcctatctatgatacacaggtagctcctttacattgacgggaaaataccaatactccagtggaaaaatgagcagagaatatgaataggcaattcacaaaagaaga

SEQ ID NO: 35246 - DNA, 433 bp, Homo sapiens
atatcctcatagtcatctacagagctgagaattagacagatattgttcccattttacagatgagaaggctgagtttcagaagattcatgtaggagaaagaatgtggagttggacctacctgggttcaactcctaactccaacactgacttcagggttttcacacctaaaacagaaaataatttatctggctgtgtctttctgtaaatacagtattttttattttttattttttttgagacagggtctcactgtgtcacatgggttggagtgcagtagcatgctcacagcttactgaaatccttgacccccacctccccaaacttgccaggctcaagcaatcctcctacctcagcttcctgagtaactggtactacaggcacacaccactacacctggctaattaaaaaaaaaaaaaaaaattatagaaatggg

SEQ ID NO: 35247 - DNA, 327 bp, Homo sapiens
cgccctgccttaggaggagggaggagagagaaagagacatacacacacacaaaggctaaaggaagggaaaatgggtgattctgactcaaaaattaagtgaaaacgccaaccctgtcatccccgggatggccagacaaagggaagaggctgcctcacacccacacggtctacccgtgggtaaactggcatttctaatacttttcacctagtcttgacttgacagatgcctaaccttagctactgagtggagacaggctgatgggccttggccatacagggggaaaatttttgatgcttctcacttatgacatgattgattttctttca

SEQ ID NO: 35248 - DNA, 784 bp, Homo sapiens
gatcaagtggagggtagttcagaaaagttaataggaaatctttgtgacagcagactataatagaagtttgagtaatattttaataaatttatataattcaaatgataaaaatgtatcaatgttatccaatgatttttattaaaaaattaccttattattagaactgtgcctattacataaaaagtgctcatgtatttgaattttaaataatttatttaaatcaagaccaccataagtcattaataatttaataattgttttaaatcagtggttttcaaccctcacttcatattagaatcatctgaggacttttaatatggaatccacctcataacaattaagtctaaatttctggaagatggagccatgcttgtttttccaaaagctctttgagtgattctaatttgtagtcagagttgaagaccactgctctaaattagtgcaggaaaatgcttttatttctcccatgttaacttttaaaactagtaatgtacccagttaagtttggatggtttaaattccactaaagaacatattcttctaataactagcatttattacatgaaatttaagagtttaagttccatcaaactagcccttgtgtaagattattatttcttctctataacttcaaaatagatatttcattcaaactgttcaggtgagaaaagataatggattttttttttcctctggagctgcctgttcagtgagatggaggaggtgcacacttaaggtcaattcactaatctatggttcagatttctgatcacatggaagtttg

SEQ ID NO: 35249 - DNA, 783 bp, Homo sapiens
taaattcgcggccgcgtcgacagatgcgtgatttgcccaacatcacacaaacattaaagatatgagtttcttcctttttaactaaaaaaggtaaagtaaaaacaaaaaaagcaaaacttaaaaattcaagtattatcatataaaacctgttctcaaaccaccactcccgccacctgcctttatgccctggacccaggtcctctgactgcttcttggtggcttaggacccaccagagccacactttactcagactaagacttccttctaataacccaggatctatgacaattttgactctcaaccccatcttaaaacttacctgccctatgcttcattccctgagattattgccaaaaaattgattgtgaataagaaaatcaaacactgagatattaataaatgatgatcaaagtataatcctttctattaaagtaagataaaatggagaccagacctgaagaatccttcagagcaggcaaagccaattagacctcacaagtgatcttacctttggtttgtaaacataagtgaaacttaaatagggcattgctttttgttttgttttgttttgtttgtttttttgagacagaatttcactcttgtcacccaggctggagtgcagtggtgcaatctcggctcactgcaacctcctcctcctgggttcaggtgattctcctgcctcagcctcccgagtagctgtgactacaggcatgcaccaccatgcccgacaaattttatatttttagtagagatggggttgcaccatgttggccaggctggtc

SEQ ID NO: 35250 - DNA, 1624 bp, Homo sapiens
ccggggacccacggccccgccccgcggccgggctgggcgggcggcgaccgcggctgaggtacaggtgcctcgcggtgcagccgggtcgccttccagcccgtccgcctcccgaccagggcccgcgccccgtcccgcctctctcccgcccagccaaatgcaggccgccgccctccctgaggagatccgttggctcctggaagatgctgaagagtttctggcagaaggtttgcggaatgagaacctcagcgctgttgcaagggatcacagagaccatattctacggggctttcagcaaatcaaagccaggtactattgggattttcagccccaagggggagacattggacaggacagctctgatgataatcacagcgggactcttggcctgtccctcacatccgatgcaccctttttgtcagattatcaggatgagggaatggaagacatcgtaaaaggagctcaagaacttgataacgtaatcaagcaaggatacttggagaagaaaagcaaagatcatagtttctttggatcggagtggcagaagcgatggtgtgttgtcagcagaggtctcttctactactatgctaatgagaagagcaagcagcccaaagggaccttcctcattaagggctacagtgtacggatggccccccacctgcgaagagattccaagaaagaatcctgctttgaactgacctcccaggataggcgcagctatgagtttacagctactagtccagcagaagccagagactgggtggatcaaataagtttcttgttaaaggatctgagctccttaaccattccatatgaagaggatgaggaggaagaagaaaaagaagagacatatgatgatattgatggttttgactccccaagttgtggttcccagtgcagacccactatcttgcctgggagtgtggggataaaagagcctacagaggagaaagaagaagaagatatttatgaagtcttgccagatgaagagcatgatctagaagaggatgagagtggcactcgacgaaaaggagtagactatgccagttactaccagggcctatgggattgccatggtgaccagccagatgaactgtccttccaacggggtgacctcatccgtattctgagcaaggagtataacatgtatggctggtgggtgggagaactgaacagcctcgttgggattgttccaaaggagtatctcaccactgcctttgaagtggaagaaagatgaaacccaggaaatatattcttccctctctcctgcctttatgaggaaactgatcatcaaaagttcccactccctacttctgccaccccaccaacgccttggactcctctctttgctgaagagacccaagtctcttgacacctcagagtgactgtaagctaccagtaagacaagtgggaagaggcacgttcatcaaacctgttactaaaccagcctagtcatagctcatccccatctctaaatgtgtccacacaaccacatctgccttttccacaagcttttcacaaagaaggtgagagagaaggaaaccttgggaggaggacattactggttgttctggctggtttgaaaagcacaaataaacttgggatgtggttccttgccatgaaaaaa

SEQ ID NO: 35251 - DNA, 1710 bp, Homo sapiens
ccggggacccacggccccgccccgcggccgggctgggcgggcggcgaccgcggctgaggtacaggtgcctcgcggtgcagccgggtcgccttccagcccgtccgcctcccgaccagggcccgcgccccgtcccgcctctctcccgcccagccaaatgcaggccgccgccctccctgaggagatccgttggctcctggaagatgctgaagagtttctggcagaaggtttgcggaatgagaacctcagcgctgttgcaagggatcacagagaccatattctacggggctttcagcaaatcaaagccaggtactattgggattttcagccccaagggggagacattggacaggacagctctgatgataatcacagcgggactcttggcctgtccctcacatccgatgcaccctttttgtcagattatcaggatgagggaatggaagacatcgtaaaaggagctcaagaacttgataacgtaatcaagcaaggatacttggagaagaaaagcaaagatcatagtttctttggatcggagtggcagaagcgatggtgtgttgtcagcagaggtctcttctactactatgctaatgagaagagcaagcagcccaaagggaccttcctcattaagggctacagtgtacggatggccccccacctgcgaagagattccaagaaagaatcctgctttgaactgacctcccaggataggcgcagctatgagtttacagctactagtccagcagaagccagagactgggtggatcaaataagtttcttgttaaaggatctgagctccttaaccattccatatgaagaggatgaggaggaagaagaaaaagaagagacatatgatgatattgatggttttgactccccaagttgtggttcccagtgcagacccactatcttgcctgggagtgtggggataaaagagcctacagaggagaaagaagaagaagatatttatgaagtcttgccagatgaagagcatgatctagaagaggatgagagtggcactcgacgaaaaggagtagactatgccagttactaccagggcctatgggattgccatggtgaccagccagatgaactgtccttccaacggggtgacctcatccgtattctgagcaaggagtataacatgtatggctggtgggtgggagaactgaacagcctcgttgggattgttccaaaggagtatctcaccactgcctttgaagtggaagaaagatgaaacccaggttacctcaaggccaagacagatgctcaatctccagccatcctgtctgcaacctacacagcacagcaggaaagataaaaggagaaggaaatatattcttccctctctcctgcctttatgaggaaactgatcatcaaaagttcccactccctacttctgccaccccaccaacgccttggactcctctctttgctgaagagacccaagtctcttgacacctcagagtgactgtaagctaccagtaagacaagtgggaagaggcacgttcatcaaacctgttactaaaccagcctagtcatagctcatccccatctctaaatgtgtccacacaaccacatctgccttttccacaagcttttcacaaagaaggtgagagagaaggaaaccttgggaggaggacattactggttgttctggctggtttgaaaagcacaaataaacttgggatgtggttccttgccatgaaaaaa

SEQ ID NO: 35252 - DNA, 787 bp, Homo sapiens
ggcacgaggggcaatatcagaaccctggtttccatttgcagcaaaaacatggcgcacctcggaaaaaatagagtccttttaactttgatttctcctctctttgatcagtagactatgccagttactaccagggcctatgggattgccatggtgaccagccagatgaactgtccttccaacggggtgacctcatccgtattctgagcaaggagtataacatgtatggctggtgggtgggagaactgaacagcctcgttgggattgttccaaaggagtatctcaccactgcctttgaagtggaagaaagatgaaacccaggttacctcaaggccaagacagatgctcaatctccagccatcctgtctgcaacctacacagcacagcaggaaagataaaaggagaaggaaatatattcttccctctctcctgcctttatgaggaaactgatcatcaaaagttcccactccctacttctgccaccccaccaacgccttggactcctctctttgctgaagagacccaagtctcttgacacctcagagtgactgtaagctaccagtaagacaagtgggaagaggcacgttcatcaaacctgttactaaaccagcctagtcatagctcatccccatctctaaatgtgtccacacaaccacatctgccttttccacaagcttttcacaaagaaggtgagagagaaggaaaccttgggaggaggacattactggttgttctggctggtttgaaaagcacaaataaacttgggatgtggttccttgccatgaaaaaa

SEQ ID NO: 35253 - DNA, 1700 bp, Homo sapiens
ccggggacccacggccccgccccgcggccgggctgggcgggcggcgaccgcggctgaggtacaggtgcctcgcggtgcagccgggtcgccttccagcccgtccgcctcccgaccagggcccgcgccccgtcccgcctctctcccgcccagccaaatgcaggccgccgccctccctgaggagatccgttggctcctggaagatgctgaagagtttctggcagaaggtttgcggaatgagaacctcagcgctgttgcaagggatcacagagaccatattctacggggctttcagcaaatcaaagccaggtactattgggattttcagccccaagggggagacattggacaggacagctctgatgataatcacagcgggactcttggcctgtccctcacatccgatgcaccctttttgtcagattatcaggatgagggtattttgagaagaatgaataggagagtatagagaaaataggaattatagaagataaagccaacttatccatcagtgaatggaagacatcgtaaaaggagctcaagaacttgataacgtaatcaagcaaggatacttggagaagaaaagcaaagatcatagtttctttggatcggagtggcagaagcgatggtgtgttgtcagcagaggtctcttctactactatgctaatgagaagagcaagcagcccaaagggaccttcctcattaagggctacagtgtacggatggccccccacctgcgaagagattccaagaaagaatcctgctttgaactgacctcccaggataggcgcagctatgagtttacagctactagtccagcagaagccagagactgggtggatcaaataagtttcttgttaaaggatctgagctccttaaccattccatatgaagaggatgaggaggaagaagaaaaagaagagacatatgatgatattgatggttttgactccccaagttgtggttcccagtgcagacccactatcttgcctgggagtgtggggataaaagagcctacagaggagaaagaagaagaagatatttatgaagtcttgccagatgaagagcatgatctagaagaggatgagagtggcactcgacgaaaaggagtagactatgccagttactaccagggcctatgggattgccatggtgaccagccagatgaactgtccttccaacggggtgacctcatccgtattctgagcaaggagtataacatgtatggctggtgggtgggagaactgaacagcctcgttgggattgttccaaaggagtatctcaccactgcctttgaagtggaagaaagatgaaacccaggaaatatattcttccctctctcctgcctttatgaggaaactgatcatcaaaagttcccactccctacttctgccaccccaccaacgccttggactcctctctttgctgaagagacccaagtctcttgacacctcagagtgactgtaagctaccagtaagacaagtgggaagaggcacgttcatcaaacctgttactaaaccagcctagtcatagctcatccccatctctaaatgtgtccacacaaccacatctgccttttccacaagcttttcacaaagaaggtgagagagaaggaaaccttgggaggaggacattactggttgttctggctggtttgaaaagcacaaataaacttgggatgtggttccttgccatgaaaaaa

SEQ ID NO: 35254 - DNA, 427 bp, Homo sapiens
gagactacagggtggacagttcctgccattagggagccctccaggctaatgggaaagggcacaacattgagcagataatgccagcgatacacaaccgtggactgtgtcagctgctagaagagaaggtctaagaggggacccaatgtaggcctggaaggattgactttcaggtggagacctgaagaacaaatataaaggtttgagcagtgaagtaatgaatgagatgttattattattttaccatctaatcaagcatctctgcttacagataaagagactgggatgaaagtaaaatgaaggaccaccactatctggctgccctagaatcagaacccaaaaaggctttttgggataaagaggtcagtctatctaaagctagcaaattgttgggagatactaaggaaatctaaagctgaaatgctattgg

SEQ ID NO: 35255 - DNA, 452 bp, Homo sapiens
aacctagcaatgaggaaagaaatgcatggtgagtgcttcgtatgggcactcatcaaatgagcctttcagagctcaatagaaaaccctatcccagtgaatcttctgttgtgctgaagattgcagctgaagattgttgtcccacacagcacagtgatgttagaattggttgagctcctaatgtggcaagaccccacacatttctagatccacccagaatgaggtaaacccttccaaagaaaaagagaaatatcgaatgctgtattttgagtcttcttactctgtgggattgatagagcaagaattacaagaattcttttgagtctaagacaccactgattttaaattacacttaaagtcataccagtgatttttggagaggaggaaagaaaataccacatttaacaagtatatcaattgttagaagtagcctaatttcaaaaatgttaaaaatg

SEQ ID NO: 35256 - DNA, 804 bp, Homo sapiens
atgcatctcctcttatttcagctgctggtactcctgcctctaggaaagaccacacggcaccaggatggccgccagaatcagagttctctttcccccgtactcctgccaaggaatcaaagagagcttcccacaggcaaccatgaggaagctgaggagaagccagatctgtttgtcgcagtgccacaccttgtagccaccagccctgcaggggaaggccagaggcagagagagaagatgctgtccagatttggcaggttctggaagaagcctgagagagaaatgcatccatccagggactcagatagtgagcccttcccacctgggacccagtccctcatccagccgatagatggaatgaaaatggagaaatctcctcttcgggaagaagccaagaaattctggcaccacttcatgttcagaaaaactccggcttctcagggggtcatcttgcccatcaaaagccatgaagtacattgggagacctgcaggacagtgcccttcagccagactataacccacgaaggctgtgaaaaagtagttgttcagaacaacctttgctttgggaaatgcgggtctgttcattttcctggagccgcgcagcactcccatacctcctgctctcactgtttgcctgccaagttcaccacgatgcacttgccactgaactgcactgaactttcctccgtgatcaaggtggtgatgctggtggaggagtgccagtgcaaggtgaagacggagcatgaagatggacacatcctacatgctggctcccaggattcctttatcccaggagtttcagcttga

SEQ ID NO: 35257 - DNA, 2480 bp, Homo sapiens
taatttaaaccagtgtttgtgcggttctgattcatctgctgtggttcccgaagcttgagatctaaggagtacagggtcttttgtgatgacaatatgactaatagtaaaggaagatctattaccgataaaacaagtggtggtccaagtagtggaggaggttttgtagattggactttacgtttaaacacaattcaatccgacaagtttttaaatttactcttgagtatggttccagtgatttaccagaaaaaccaagaagacaggcacaaaaaagcaaacggcatttggcaagatggattatcaactgcagtacagacttttagtaatagatctgagcaacacatggagtatcacagtttctcagagcagtcttttcatgccaataatgggcacgcatcatcaagctgcagccaaaagtatgatgactatgccaattataattactgtgatggaagggagacttcagaaaccactgccatgttacaagatgaagatatatctagtgatggtgatgaagatgctattgtagaagtgaccccaaaattaccaaaggaatccagtggcatcatggcattgcaaatacttgtgccctttttgctagctggttttggaacagtttcagctggcatggtactggatatagtacagcactgggaggtgttcagaaaagttacagaagttttcattttagtccctgcacttcttggtctcaaagggaacttggaaatgacattggcatccagattatccactgcagtaaatattgggaagatggattcacccattgaaaagtggaacctaataattggcaacttggctttaaagcaggttcaggcaacagtagtgggttttctagcagctgtggcagcaattatattgggctggattccagaaggaaaatattaccttgatcattccatacttctgtgctctagcagtgtggcaactgccttcattgcatctcttctgcagggaataataatggttggggttatcgttggttcaaagaagactggtataaatcctgataatgttgctacacccattgctgctagttttggcgaccttataactcttgccatattggcttggataagtcagggcttatactcctgtcttgagacctattactacatttctccattagttggtgtatttttcttggctctaacccctatttggattataatagctgccaaacatccagccacaagaacagttctccactcaggctgggagcctgtcataacagctatggttataagtagcattgggggccttattctggacacaactgtatcagacccaaacttggttgggattgttgtttacacgccagttattaatggtattggtggtaatttggtggccattcaggctagcaggatttctacctacctccatttacatagcattccaggagaattgcctgatgaacccaaaggttgttactacccatttagaactttctttggtccaggagtaaataataagtctgctcaagttctactgcttttagtgattcctggacatttaattttcctctacactattcatttgatgaaaagtggtcatacttctttaactataatcttcatagtagtgtatttatttggcgctgtgttacaggtatttaccttgctgtggattgctgactggatggtccatcacttctggaggaaaggaaaggacccggatagtttctccatcccctacctaacagcattgggtgatctgctcgggacagctctgttagccttaagttttcattttctttggcttattggagatcgagatggagatgttggagactaataaattctacaaactgctctcaagttaccaaggaagaaaatacacgacaaccacttatggctctttttcaaaactcttaaatcagtagtttgacttttgccagggtaatcttcagttggccctgattcaattaaatggccttaatttttttttaaggaatttgtgtcaaaaccagaatgaagagtattcgtgctgcttttcatagaataaatgataatttgacatagacatagatataagttccagctctgaaattaattaggaaagaatataggatgtttacagtgaataattttaaaaccacaaacatagcagaaatgtactttattattaaatttgtaatgcaggattagaagaagcagagctctagtttagcctttcttgtctcacagatgtgctgtatcccaggcatactataaaacgaagagtgcccaaccaagctttgaatcgtattaacaatgcccacctctatgctagctgaggataaatttaccagttgctcatatttaaactgacctaaatatgttttgctgagcataagataaactcacttttacctccatctaaaattatcctgttctgatgccaattcaatttcagctctgcaagttcttgtcaggctaatctttaaacattgagtgatcttgagagattgttaatgaaag

SEQ ID NO: 35258 - DNA, 919 bp, Homo sapiens
  misc_feature (54)..(56): n is a, c, g, or t
  misc_feature (94)..(94): n is a, c, g, or t
gccaggcagccgccccgccaggggcacagaacccgctctcgtatcttcccccgnnnggtcgggtgttattaacactgactttgggtagtgctgnatggatggtccatcacttctggaggaaaggaaaggacccggatagtttctccatcccctacctaacagcattgggtgatctgctcgggacagctctgttagccttaagttttcattttctttggcttattggagatcgagatggagatgttggagactaataaattctacaaactgctctcaagttaccaaggaagaaaatacacgacaaccacttatggctctttttcaaaactcttaaatcagtagtttgacttttgccagggtaatcttcagttggccctgattcaattaaatggccttaatttttttttaaggaatttgtgtcaaaaccagaatgaagagtattcgtgctgcttttcatagaataaatgataatttgacatagacatagatataagttccagctctgaaattaattaggaaagaatataggatgtttacagtgaataattttaaaaccacaaacatagcagaaatgtactttattattaaatttgtaatgcaggattagaagaagcagagctctagtttagcctttcttgtctcacagatgtgctgtatcccaggcatactataaaacgaagagtgcccaaccaagctttgaatcgtattaacaatgcccacctctatgctagctgaggataaatttaccagttgctcatatttaaactgacctaaatatgttttgctgagcataagataaactcacttttacctccatctaaaattatcctgttctgatgccaattcaatttcagctctgcaagttcttgtcaggctaatctttaaacattgagtgatcttgagagattgttaatgaaag

SEQ ID NO: 35259 - DNA, 942 bp, Homo sapiens
ataggtatgcttgggctccaggccagtgatgcacagaagatgaaatgactgtctgctttattggaggcacagcatgcttgattcctgtgaggtatttaccttgctgtggattgctgactggatggtccatcacttctggaggaaaggaaaggacccggatagtttctccatcccctacctaacagcattgggtgatctgctcgggacagctctgttagccttaagttttcattttctttggcttattggagatcgagatggagatgttggagactaataaattctacaaactgctctcaagttaccaaggaagaaaatacacgacaaccacttatggctctttttcaaaactcttaaatcagtagtttgacttttgccagggtaatcttcagttggccctgattcaattaaatggccttaatttttttttaaggaatttgtgtcaaaaccagaatgaagagtattcgtgctgcttttcatagaataaatgataatttgacatagacatagatataagttccagctctgaaattaattaggaaagaatataggatgtttacagtgaataattttaaaaccacaaacatagcagaaatgtactttattattaaatttgtaatgcaggattagaagaagcagagctctagtttagcctttcttgtctcacagatgtgctgtatcccaggcatactataaaacgaagagtgcccaaccaagctttgaatcgtattaacaatgcccacctctatgctagctgaggataaatttaccagttgctcatatttaaactgacctaaatatgttttgctgagcataagataaactcacttttacctccatctaaaattatcctgttctgatgccaattcaatttcagctctgcaagttcttgtcaggctaatctttaaacattgagtgatcttgagagattgttaatgaaag

SEQ ID NO: 35260 - DNA, 2021 bp, Homo sapiens
  misc_feature (1885)..(1885): n is a, c, g, or t
taatttaaaccagtgtttgtgcggttctgattcatctgctgtggttcccgaagcttgagatctaaggagtacagggtcttttgtgatgacaatatgactaatagtaaaggaagatctattaccgataaaacaagtggtggtccaagtagtggaggaggttttgtagattggactttacgtttaaacacaattcaatccgacaagtttttaaatttactcttgagtatggttccagtgatttaccagaaaaaccaagaagacaggcacaaaaaagcaaacggcatttggcaagatggattatcaactgcagtacagacttttagtaatagatctgagcaacacatggagtatcacagtttctcagagcagtcttttcatgccaataatgggcacgcatcatcaagctgcagccaaaagtatgatgactatgccaattataattactgtgatggaagggagacttcagaaaccactgccatgttacaagatgaagatatatctagtgatggtgatgaagatgctattgtagaagtgaccccaaaattaccaaaggaatccagtggcatcatggcattgcaaatacttgtgccctttttgctagctggttttggaacagtttcagctggcatggtactggatatagtacagcactgggaggtgttcagaaaagttacagaagttttcattttagtccctgcacttcttggtctcaaagggaacttggaaatgacattggcatccagattatccactgcagtaaatattgggaagatggattcacccattgaaaagtggaacctaataattggcaacttggctttaaagcaggttcaggcaacagtagtgggttttctagcagctgtggcagcaattatattgggctggattccagaaggaaaatattaccttgatcattccatacttctgtgctctagcagtgtggcaactgccttcattgcatctcttctgcagggaataataatggttggggttatcgttggttcaaagaagactggtataaatcctgataatgttgctacacccattgctgctagttttggcgaccttataactcttgccatattggcttggataagtcagggcttatactcctgtcttgagacctattactacatttctccattagttggtgtatttttcttggctctaacccctatttggattataatagctgccaaacatccagccacaagaacagttctccactcaggctgggagcctgtcataacagctatggttataagtagcattgggggccttattctggacacaactgtatcagacccaaacttggttgggattgttgtttacacgccagttattaatgatgacatgaggaaatgaagatgcacgtgttctggcaaggcagcttctattcctgggcagctctctgccatgcggagttacaagcacacacacaggcgttagctggtcccaactaagacatgaactgaaatggtacagcaatgggatgaagatggtttctgcacctgtgagctggaagtcatcacctgttccactgtggcagttggcctggtcgtcatcacattcatccaccaagttcccgttgggagtggtcggtccagctgtaggggctgaaacaagatccaaggattattatctcacaccttggaaatgtattctcaagcctctggctgttggatctgataacgcttatgcacaaaactttaatctgcggtaagaagaccacgggcatggcttgcctctctttcaggagctggatttacatggattctgcacaatatataatagcagaggctgctttcctttggtatcagatctccatctgcccactacaccggactgccttaccctcctatacatggccatctacataaacatncttcctgtgaaaacacccacaacccccggtctctccctggccatcagagaaggaagccaccccgcgcttctcttttattgagggttacgctcatcacctcaataaccccctagttgaaattggtcaggactgcacg

SEQ ID NO: 35261 - DNA, 2042 bp, Homo sapiens
taatttaaaccagtgtttgtgcggttctgattcatctgctgtggttcccgaagcttgagatctaaggagtacagggtcttttgtgatgacaatatgactaatagtaaaggaagatctattaccgataaaacaagtggtggtccaagtagtggaggaggttttgtagattggactttacgtttaaacacaattcaatccgacaagtttttaaatttactcttgagtatggttccagtgatttaccagaaaaaccaagaagacaggcacaaaaaagcaaacggcatttggcaagatggattatcaactgcagtacagacttttagtaatagatctgagcaacacatggagtatcacagtttctcagagcagtcttttcatgccaataatgggcacgcatcatcaagctgcagccaaaagtatgatgactatgccaattataattactgtgatggaagggagacttcagaaaccactgccatgttacaagatgaagatatatctagtgatggtgatgaagatgctattgtagaagtgaccccaaaattaccaaaggaatccagtggcatcatggcattgcaaatacttgtgccctttttgctagctggttttggaacagtttcagctggcatggtactggatatagtacagcactgggaggtgttcagaaaagttacagaagttttcattttagtccctgcacttcttggtctcaaagggaacttggaaatgacattggcatccagattatccactgcagtaaatattgggaagatggattcacccattgaaaagtggaacctaataattggcaacttggctttaaagcaggttcaggcaacagtagtgggttttctagcagctgtggcagcaattatattgggctggattccagaaggaaaatattaccttgatcattccatacttctgtgctctagcagtgtggcaactgccttcattgcatctcttctgcagggaataataatggttggggttatcgttggttcaaagaagactggtataaatcctgataatgttgctacacccattgctgctagttttggcgaccttataactcttgccatattggcttggataagtcagggcttatactcctgtcttgagacctattactacatttctccattagttggtgtatttttcttggctctaacccctatttggattataatagctgccaaacatccagccacaagaacagttctccactcaggctgggagcctgtcataacagctatggttataagtagcattgggggccttattctggacacaactgtatcagacccaaacttggttgggattgttgtttacacgccagttattaatggtattggtggtaatttggtggccattcaggctagcaggatttctacctacctccatttacatagcattccaggagaattgcctgatgaacccaaaggttgttactacccatttagaactttctttggtccaggagtaaataataagtctgctcaagttctactgcttttagtgattcctggacatttaattttcctctacactattcatttgatgaaaagtggtcatacttctttaactataatcttcatagtagtgtatttatttggcgctgtgttacaggtatttaccttgctgtggattgctgactggatggtccatcacttctggaggaaaggaaaggacccggatagtttctccatcccctacctaacagcattgggtgatctgctcgggacagctctgttagccttaagttttcattttctttggcttattggagatcgagatggagatgttggagactaataaattctacaaactgctctcaagttaccaaggaagaaaatacacgacaaccacttatggctctttttcaaaactcttaaatcagtagtttgacttttgccagggtaatcttcagttggccctgattcaattaaatggccttaatttttttttaaggaatttgtgtcaaaaccagaatgaagagtattcgtgctgcttttcatagaataaatgataatttgacatag

SEQ ID NO: 35262 - DNA, 960 bp, Homo sapiens
taatttaaaccagtgtttgtgcggttctgattcatctgctgtggttcccgaagcttgagatctaaggagtacagggtcttttgtgatgacaatatgactaatagtaaaggaagatctattaccgataaaacaagtggtggtccaagtagtggaggaggttttgtagattggactttacgtttaaacacaattcaatccgacaagtttttaaatttactcttgagtatggttccagtgatttaccagaaaaaccaagaagacaggcacaaaaaagcaaacggcatttggcaagatggattatcaactgcagtacagacttttagtaatagatctgagcaacacatggagtatcacagtttctcagagcagtcttttcatgccaataatgggcacgcatcatcaagctgcagccaaaagtatgatgactatgccaattataattactgtgatggaagggagacttcagaaaccactgccatgttacaagatgaagatatatctagtgatggtgatgaagatgctattgtagaagtgaccccaaaattaccaaaggaatccagtggcatcatggcattgcaaatacttgtgccctttttgctagctggttttggaacagtttcagctggcatggtactggatatagtacaggtaaatattgggaagatggattcacccattgaaaagtggaacctaataattggcaacttggctttaaagcaggttcaggcaacagtagtgggttttctagcagctgtggcagcaattatattgggctggattccagaaggaaaatattaccttgatcattccatacttctgtgctctagcagtgtggcaactgccttcattgcatctcttctgcaggaattaaggtggggttatcgtggtcaagagacgtataatctgatagtgctaaccatgtgtattgggactatatctgcaatggtggtagcagcttac

SEQ ID NO: 35263 - DNA, 1220 bp, Homo sapiens
cggacgcgtgggccggcacacgatctcggtgagagtaaaggctgctccctactggctggacgaacccaagaaccttattctggctcctggcgaggatgggagactggtgtgtcgagccaatggaaaccccaaacccactgtccagtggatggtgaatggggaacctttgcaatcggcaccacctaacccaaaccgtgaggtggccggagacaccatcatcttccgggacacccagatcagcagcagggctgtgtaccagtgcaacacctccaacgagcatggctacctgctggccaacgcctttgtcagtgtgctggatgtgccgcctcggatgctgtcgccccggaaccagctcattcgagtgattctttacaaccggacgcggctggactgccctttctttgggtctcccatccccacactgcgatggtttaagaatgggcaaggaagcaacctggatggtggcaactaccatgtttatgagaacggcagtctggaaattaagatgatccgcaaagaggaccagggcatctacacctgtgtcgccaccaacatcctgggcaaagctgaaaaccaagtccgcctggaggtcaaagaccccaccaggatctaccggatgcccgaggaccaggtggccagaaggggcaccacggtgcagctggagtgtcgggtgaagcacgacccctccctgaaactcaccgtctcctggctgaaggatgacgagccgctctatattggaaacaggatgaagaaggaagacgactccctgaccatctttggggtggcagagcgggaccagggcagttacacgtgtgtcgccagcaccgagctagaccaagacctggccaaggcctacctcaccgtgctaggtaactgcccatgctcaccctggcactgaccagccccaccccctccccagcagccagagaagcagtggcccggggcagttccgagggcagtgcctgcagtcaagtggccgggtcaggcgtggtgatctcttcttgcctcgtgatgtcagggttagggagctgccagtttcagaacaagctgtgctggacaggttacctcctgagtggagtcattaacttccccacgtctcaactgaaaggggcctgagtgatatagagaaagtggagaggggtttctcgttgtgatcattttacctttcttacagctaactccaccactaagtcaattaaaacaatccatccttaaagcaa

SEQ ID NO: 35264 - DNA, 6120 bp, Homo sapiens
  misc_feature (4217)..(4217): n is a, c, g, or t
acgcgcacgggctggtctctgccctaatgcggcggctggcggcgagaggcgctgcaggggacgcgggggaagtggcggcgccggcagcggacagctcggacagcgcccagggccggagcccgagcccttggaggttgattgacttatgtgcaatttgggacgctggagtttaccttccctccgcagcctggaacagagcctcctctggtgttgcaaggaagaggctgaatgaggcagagaagctgagtgctgtccaggaggcccagttaaagcggctcgaggtgacaagaccccgagtgctggggagcagggagcagggccaggtgccgaggatggccaggcagccaccgccgccctgggtccatgcagccttcctcctctgcctcctcagtcttggcggagccatcgaaattcctatggatccaagcattcagaatgagctgacgcagccgccaaccatcaccaagcagtcagcgaaggatcacatcgtggacccccgtgataacatcctgattgagtgtgaagcaaaagggaaccctgcccccagcttccactggacacgaaacagcagattcttcaacatcgccaaggacccccgggtgtccatgaggaggaggtctgggaccctggtgattgacttccgcagtggcgggcggccggaggaatatgagggggaatatcagtgcttcgcccgcaacaaatttggcacggccctgtccaataggatccgcctgcaggtgtctaaatctcctctgtggcccaaggaaaacctagaccctgtcgtggtccaagagggcgctcctttgacgctccagtgcaaccccccgcctggacttccatccccggtcatcttctggatgagcagctccatggagcccatcacccaagacaaacgtgtctctcagggccataacggagacctatacttctccaacgtgatgctgcaggacatgcagaccgactacagttgtaacgcccgcttccacttcacccacaccatccagcagaagaaccctttcaccctcaaggtcctcaccacccgaggagttgcagaaagaacaccaagcttcatgtatccccagggcaccgcgagcagccagatggtgcttcgtggcatggacctcctgctggaatgcatcgcctccggggtcccaacaccagacatcgcatggtacaagaaaggtggggacctcccatctgataaggccaagtttgagaactttaataaggccctgcgtatcacaaatgtctctgaggaagactccggggagtatttctgcctggcctccaacaagatgggcagcatccggcacacgatctcggtgagagtaaaggctgctccctactggctggacgaacccaagaaccttattctggctcctggcgaggatgggagactggtgtgtcgagccaatggaaaccccaaacccactgtccagtggatggtgaatggggaacctttgcaatcggcaccacctaacccaaaccgtgaggtggccggagacaccatcatcttccgggacacccagatcagcagcagggctgtgtaccagtgcaacacctccaacgagcatggctacctgctggccaacgcctttgtcagtgtgctggatgtgccgcctcggatgctgtcgccccggaaccagctcattcgagtgattctttacaaccggacgcggctggactgccctttctttgggtctcccatccccacactgcgatggtttaagaatgggcaaggaagcaacctggatggtggcaactaccatgtttatgagaacggcagtctggaaattaagatgatccgcaaagaggaccagggcatctacacctgtgtcgccaccaacatcctgggcaaagctgaaaaccaagtccgcctggaggtcaaagaccccaccaggatctaccggatgcccgaggaccaggtggccagaaggggcaccacggtgcagctggagtgtcgggtgaagcacgacccctccctgaaactcaccgtctcctggctgaaggatgacgagccgctctatattggaaacaggatgaagaaggaagacgactccctgaccatctttggggtggcagagcgggaccagggcagttacacgtgtgtcgccagcaccgagctagaccaagacctggccaaggcctacctcaccgtgctagctgatcaggccactccaactaaccgtttggctgccctgcccaaaggacggccagaccggccccgggacctggagctgaccgacctggccgagaggagcgtgcggctgacctggatccccggggatgctaacaacagccccatcacagactacgtcgtccagtttgaagaagaccagttccaacctggggtctggcatgaccattccaagtaccccggcagcgttaactcagccgtcctccggctgtccccgtatgtcaactaccagttccgtgtcattgccatcaacgaggttgggagcagccaccccagcctcccatccgagcgctaccgaaccagtggagcaccccccgagtccaatcctggtgacgtgaagggagaggggaccagaaagaacaacatggagatcacgtggacgcccatgaatgccacctcggcctttggccccaacctgcgctacattgtcaagtggaggcggagagagactcgagaggcctggaacaacgtcacagtgtggggctctcgctacgtggtggggcagaccccagtctacgtgccctatgagatccgagtccaggctgaaaatgacttcgggaagggccctgagccagagtccgtcatcggttactccggagaagatttacccagtgcccctaggcgtttccgagtccggcagcccaacctggagacaatcaacctggaatgggatcatcctgagcatccaaatgggatcatgattggatacactctcaaatatgtggcctttaacgggaccaaagtaggaaagcagatagtggaaaacttctctcccaatcagaccaagttcacggtgcaaagaacggaccccgtgtcacgctaccgctttaccctcagcgccaggacgcaggtgggctctggggaagccgtcacagaggagtcaccagcacccccgaatgaagcttacaccaacaaccaagcggacatcgccacccagggctggttcattgggcttatgtgcgccatcgccctcctggtgctgatcctgctcatcgtctgtttcatcaagaggagtcgcggcggcaagtacccagtacgagaaaagaaggatgttccccttggccctgaagaccccaaggaagaggatggctcatttgactatagtgatgaggacaacaagcccctgcagggcagtcagacatctctggacggcaccatcaagcagcaggagagtgacgacagcctggtggactatggcgagggtggcgagggtcagttcaatgaagacggctccttcatcggccagtacacggtcaaaaaggacaaggaggaaacagagggcaacgaaagctcagaggccacgtcacctgtcaatgctatctactctctggcctaacggagcccacccaggcacagccaccactttgcaagtgggaggaggggagaaggggagacaaaaccactgcagacctaccacgaagccaccaccaccttcagtaacaagggtacgatatgggggtctgccaagctgtgaggaccagtagccaccaagccacccacaagccccctcccaatgaccccccttcagccccgggtgccaccagtgtgggagagctggagccgtggctgagctcagctggagggagcctggccccttgcccggtctcgcagccaccccgagcgttccaccacactgtccgcccttggcctcggcacacgctcaccttttctgttggttacgggacttctcattgtcttaatttcgctttgtgcatcttcccctccagacccaatgtctctgttttcttttccttttgaaaaagagtccctggaaaagaaagaataagtggattctcccccaggagaatcctttttgcaaagataggcaaaaaggattgaatccataccagaacacgtagacaggctgtaatattcaaaccacctctgggccaatgcatttccaaaggatgcctttctcgccatatgcctcccctggcccccagcccctctgcctcggccttgtcagttgctgagctgggcttggctcctttctggaaaatgacagtatttttggcagggngaaggtgcgcaggcctccttgctgctctctggtttggttgggaggtgtgtttacctcttgctcctcattcctcccctgcccttttctctggaatatctaagatgtgagctgcattgactctgaagacgtttgaggaacaggagtgggcactgatagaaaggacttcaacgccagtgactgtgtacctccagcagaagaaaatcaggtgtctggtcttgggggcactgtgctcacctctagagagaagaaaaaggctgggtttggacttcatgcctcctcactggtgaaacccaggatgtagatagagggccacacccaccctgtccagagtagagggcacctgtccacgtggccagggcccattgctgccaccctcgaggagatggaaccctgtgatgcaaaagctttgctggtgtgtttggggcataaggcactgctccccttccatctctagcagatatcatcttctcagccaattctgtaggacactgaggctcttgtttgacatggtgtgtggatggggacttgccccaagactgagcaggtctgccctttcattggggtgtatacatatcaggggaccctgaggtggcaccgtactcagtgttgtgatgcccccacctagggaggactcaatgctctttgtatgccttatgcagcgctgatctgtccctggagttcccaggttcccagctccccccctgcaagccttgaagcctccagcaacgtctatctccaggagagcagggcagcctatgcaagtgttccggcaggaccagaagtggccactcaacacacgtcctcaccagtcaccccaaatggagacactcgcagacctgcagttctcagaccgaaggtgctgccttcatcctccccacctaatgcatttttgaaaccaaaggtacctagcctcagagacagagaaggagagggggagatcttgagtctaagaggaaccctttagctgtttctgcagctgaggtcagtttcaggagggtgaagctgatccccaggaatggatcagctgccatgggcacagcctccgatttgagcctctccggctgccagccagggggcctgggccagaccagggctctgtccttccgtgactttattaaagcaacatttgccacatgtttaagccgcaaaggtattagcaatgcttgcatcattaataatcattcagttgaaggtcaagcccatagacacacactctctgctggtaagaaaccatagcccagaactgagccaataaggttgtttgaacctgagagtgtgtaatggtcatttgggccaagcctcagctagggctgctgcctggacgcctgaggggcagcttatcacagtgcaaggggacagggtaaacagcagggggtggggtgtgagcttggagggcccctcccctggatttcctccaacacctgcttggatactaggcccactgtccctgaagggaatgtcagggaagtgtgcctgtgagctgaattaaaggactggcctttccagaaaacgctttggatctgagcagagtagtcagtttctcagacactcattccatactgcaccgtacatgccagcgtacccattgcaccgaaagcaggcccttagggcaggaagggacgatgagcaagtctgccacaccacctggtgactgggaagggctgcttctctcgtaagggtcttggggagaagtaagcccgcagcctgcctctgcacctcgttccagtgtcctgccaggctctgtactgtcctttgtgtatgaagaaaatgctgttagccctctctcaggctgctgttctgtgggtgctgagagctgccccccatcaccacgcaatcacacccctctgagcagaagcaaatctgaggctgaagaattaagttttccccaagcaaggaaggcagg

SEQ ID NO: 35265 - DNA, 6011 bp, Homo sapiens
  misc_feature (4108)..(4108): n is a, c, g, or t
acgcgcacgggctggtctctgccctaatgcggcggctggcggcgagaggcgctgcaggggacgcgggggaagtggcggcgccggcagcggacagctcggacagcgcccagggccggagcccgagcccttggagctgagtgctgtccaggaggcccagttaaagcggctcgaggtgacaagaccccgagtgctggggagcagggagcagggccaggtgccgaggatggccaggcagccaccgccgccctgggtccatgcagccttcctcctctgcctcctcagtcttggcggagccatcgaaattcctatggatccaagcattcagaatgagctgacgcagccgccaaccatcaccaagcagtcagcgaaggatcacatcgtggacccccgtgataacatcctgattgagtgtgaagcaaaagggaaccctgcccccagcttccactggacacgaaacagcagattcttcaacatcgccaaggacccccgggtgtccatgaggaggaggtctgggaccctggtgattgacttccgcagtggcgggcggccggaggaatatgagggggaatatcagtgcttcgcccgcaacaaatttggcacggccctgtccaataggatccgcctgcaggtgtctaaatctcctctgtggcccaaggaaaacctagaccctgtcgtggtccaagagggcgctcctttgacgctccagtgcaaccccccgcctggacttccatccccggtcatcttctggatgagcagctccatggagcccatcacccaagacaaacgtgtctctcagggccataacggagacctatacttctccaacgtgatgctgcaggacatgcagaccgactacagttgtaacgcccgcttccacttcacccacaccatccagcagaagaaccctttcaccctcaaggtcctcaccacccgaggagttgcagaaagaacaccaagcttcatgtatccccagggcaccgcgagcagccagatggtgcttcgtggcatggacctcctgctggaatgcatcgcctccggggtcccaacaccagacatcgcatggtacaagaaaggtggggacctcccatctgataaggccaagtttgagaactttaataaggccctgcgtatcacaaatgtctctgaggaagactccggggagtatttctgcctggcctccaacaagatgggcagcatccggcacacgatctcggtgagagtaaaggctgctccctactggctggacgaacccaagaaccttattctggctcctggcgaggatgggagactggtgtgtcgagccaatggaaaccccaaacccactgtccagtggatggtgaatggggaacctttgcaatcggcaccacctaacccaaaccgtgaggtggccggagacaccatcatcttccgggacacccagatcagcagcagggctgtgtaccagtgcaacacctccaacgagcatggctacctgctggccaacgcctttgtcagtgtgctggatgtgccgcctcggatgctgtcgccccggaaccagctcattcgagtgattctttacaaccggacgcggctggactgccctttctttgggtctcccatccccacactgcgatggtttaagaatgggcaaggaagcaacctggatggtggcaactaccatgtttatgagaacggcagtctggaaattaagatgatccgcaaagaggaccagggcatctacacctgtgtcgccaccaacatcctgggcaaagctgaaaaccaagtccgcctggaggtcaaagaccccaccaggatctaccggatgcccgaggaccaggtggccagaaggggcaccacggtgcagctggagtgtcgggtgaagcacgacccctccctgaaactcaccgtctcctggctgaaggatgacgagccgctctatattggaaacaggatgaagaaggaagacgactccctgaccatctttggggtggcagagcgggaccagggcagttacacgtgtgtcgccagcaccgagctagaccaagacctggccaaggcctacctcaccgtgctagctgatcaggccactccaactaaccgtttggctgccctgcccaaaggacggccagaccggccccgggacctggagctgaccgacctggccgagaggagcgtgcggctgacctggatccccggggatgctaacaacagccccatcacagactacgtcgtccagtttgaagaagaccagttccaacctggggtctggcatgaccattccaagtaccccggcagcgttaactcagccgtcctccggctgtccccgtatgtcaactaccagttccgtgtcattgccatcaacgaggttgggagcagccaccccagcctcccatccgagcgctaccgaaccagtggagcaccccccgagtccaatcctggtgacgtgaagggagaggggaccagaaagaacaacatggagatcacgtggacgcccatgaatgccacctcggcctttggccccaacctgcgctacattgtcaagtggaggcggagagagactcgagaggcctggaacaacgtcacagtgtggggctctcgctacgtggtggggcagaccccagtctacgtgccctatgagatccgagtccaggctgaaaatgacttcgggaagggccctgagccagagtccgtcatcggttactccggagaagatttacccagtgcccctaggcgtttccgagtccggcagcccaacctggagacaatcaacctggaatgggatcatcctgagcatccaaatgggatcatgattggatacactctcaaatatgtggcctttaacgggaccaaagtaggaaagcagatagtggaaaacttctctcccaatcagaccaagttcacggtgcaaagaacggaccccgtgtcacgctaccgctttaccctcagcgccaggacgcaggtgggctctggggaagccgtcacagaggagtcaccagcacccccgaatgaagcttacaccaacaaccaagcggacatcgccacccagggctggttcattgggcttatgtgcgccatcgccctcctggtgctgatcctgctcatcgtctgtttcatcaagaggagtcgcggcggcaagtacccagtacgagaaaagaaggatgttccccttggccctgaagaccccaaggaagaggatggctcatttgactatagtgatgaggacaacaagcccctgcagggcagtcagacatctctggacggcaccatcaagcagcaggagagtgacgacagcctggtggactatggcgagggtggcgagggtcagttcaatgaagacggctccttcatcggccagtacacggtcaaaaaggacaaggaggaaacagagggcaacgaaagctcagaggccacgtcacctgtcaatgctatctactctctggcctaacggagcccacccaggcacagccaccactttgcaagtgggaggaggggagaaggggagacaaaaccactgcagacctaccacgaagccaccaccaccttcagtaacaagggtacgatatgggggtctgccaagctgtgaggaccagtagccaccaagccacccacaagccccctcccaatgaccccccttcagccccgggtgccaccagtgtgggagagctggagccgtggctgagctcagctggagggagcctggccccttgcccggtctcgcagccaccccgagcgttccaccacactgtccgcccttggcctcggcacacgctcaccttttctgttggttacgggacttctcattgtcttaatttcgctttgtgcatcttcccctccagacccaatgtctctgttttcttttccttttgaaaaagagtccctggaaaagaaagaataagtggattctcccccaggagaatcctttttgcaaagataggcaaaaaggattgaatccataccagaacacgtagacaggctgtaatattcaaaccacctctgggccaatgcatttccaaaggatgcctttctcgccatatgcctcccctggcccccagcccctctgcctcggccttgtcagttgctgagctgggcttggctcctttctggaaaatgacagtatttttggcagggngaaggtgcgcaggcctccttgctgctctctggtttggttgggaggtgtgtttacctcttgctcctcattcctcccctgcccttttctctggaatatctaagatgtgagctgcattgactctgaagacgtttgaggaacaggagtgggcactgatagaaaggacttcaacgccagtgactgtgtacctccagcagaagaaaatcaggtgtctggtcttgggggcactgtgctcacctctagagagaagaaaaaggctgggtttggacttcatgcctcctcactggtgaaacccaggatgtagatagagggccacacccaccctgtccagagtagagggcacctgtccacgtggccagggcccattgctgccaccctcgaggagatggaaccctgtgatgcaaaagctttgctggtgtgtttggggcataaggcactgctccccttccatctctagcagatatcatcttctcagccaattctgtaggacactgaggctcttgtttgacatggtgtgtggatggggacttgccccaagactgagcaggtctgccctttcattggggtgtatacatatcaggggaccctgaggtggcaccgtactcagtgttgtgatgcccccacctagggaggactcaatgctctttgtatgccttatgcagcgctgatctgtccctggagttcccaggttcccagctccccccctgcaagccttgaagcctccagcaacgtctatctccaggagagcagggcagcctatgcaagtgttccggcaggaccagaagtggccactcaacacacgtcctcaccagtcaccccaaatggagacactcgcagacctgcagttctcagaccgaaggtgctgccttcatcctccccacctaatgcatttttgaaaccaaaggtacctagcctcagagacagagaaggagagggggagatcttgagtctaagaggaaccctttagctgtttctgcagctgaggtcagtttcaggagggtgaagctgatccccaggaatggatcagctgccatgggcacagcctccgatttgagcctctccggctgccagccagggggcctgggccagaccagggctctgtccttccgtgactttattaaagcaacatttgccacatgtttaagccgcaaaggtattagcaatgcttgcatcattaataatcattcagttgaaggtcaagcccatagacacacactctctgctggtaagaaaccatagcccagaactgagccaataaggttgtttgaacctgagagtgtgtaatggtcatttgggccaagcctcagctagggctgctgcctggacgcctgaggggcagcttatcacagtgcaaggggacagggtaaacagcagggggtggggtgtgagcttggagggcccctcccctggatttcctccaacacctgcttggatactaggcccactgtccctgaagggaatgtcagggaagtgtgcctgtgagctgaattaaaggactggcctttccagaaaacgctttggatctgagcagagtagtcagtttctcagacactcattccatactgcaccgtacatgccagcgtacccattgcaccgaaagcaggcccttagggcaggaagggacgatgagcaagtctgccacaccacctggtgactgggaagggctgcttctctcgtaagggtcttggggagaagtaagcccgcagcctgcctctgcacctcgttccagtgtcctgccaggctctgtactgtcctttgtgtatgaagaaaatgctgttagccctctctcaggctgctgttctgtgggtgctgagagctgccccccatcaccacgcaatcacacccctctgagcagaagcaaatctgaggctgaagaattaagttttccccaagcaaggaaggcagg

SEQ ID NO: 35266 - DNA, 6102 bp, Homo sapiens
  misc_feature (4199)..(4199): n is a, c, g, or t
acgcgcacgggctggtctctgccctaatgcggcggctggcggcgagaggcgctgcaggggacgcgggggaagtggcggcgccggcagcggacagctcggacagcgcccagggccggagcccgagcccttggaggttgattgacttatgtgcaatttgggacgctggagtttaccttccctccgcagcctggaacagagcctcctctggtgttgcaaggaagaggctgaatgaggcagagaagctgagtgctgtccaggaggcccagttaaagcggctcgaggtgacaagaccccgagtgctggggagcagggagcagggccaggtgccgaggatggccaggcagccaccgccgccctgggtccatgcagccttcctcctctgcctcctcagtcttggcggagccatcgaaattcctatggatctgacgcagccgccaaccatcaccaagcagtcagcgaaggatcacatcgtggacccccgtgataacatcctgattgagtgtgaagcaaaagggaaccctgcccccagcttccactggacacgaaacagcagattcttcaacatcgccaaggacccccgggtgtccatgaggaggaggtctgggaccctggtgattgacttccgcagtggcgggcggccggaggaatatgagggggaatatcagtgcttcgcccgcaacaaatttggcacggccctgtccaataggatccgcctgcaggtgtctaaatctcctctgtggcccaaggaaaacctagaccctgtcgtggtccaagagggcgctcctttgacgctccagtgcaaccccccgcctggacttccatccccggtcatcttctggatgagcagctccatggagcccatcacccaagacaaacgtgtctctcagggccataacggagacctatacttctccaacgtgatgctgcaggacatgcagaccgactacagttgtaacgcccgcttccacttcacccacaccatccagcagaagaaccctttcaccctcaaggtcctcaccacccgaggagttgcagaaagaacaccaagcttcatgtatccccagggcaccgcgagcagccagatggtgcttcgtggcatggacctcctgctggaatgcatcgcctccggggtcccaacaccagacatcgcatggtacaagaaaggtggggacctcccatctgataaggccaagtttgagaactttaataaggccctgcgtatcacaaatgtctctgaggaagactccggggagtatttctgcctggcctccaacaagatgggcagcatccggcacacgatctcggtgagagtaaaggctgctccctactggctggacgaacccaagaaccttattctggctcctggcgaggatgggagactggtgtgtcgagccaatggaaaccccaaacccactgtccagtggatggtgaatggggaacctttgcaatcggcaccacctaacccaaaccgtgaggtggccggagacaccatcatcttccgggacacccagatcagcagcagggctgtgtaccagtgcaacacctccaacgagcatggctacctgctggccaacgcctttgtcagtgtgctggatgtgccgcctcggatgctgtcgccccggaaccagctcattcgagtgattctttacaaccggacgcggctggactgccctttctttgggtctcccatccccacactgcgatggtttaagaatgggcaaggaagcaacctggatggtggcaactaccatgtttatgagaacggcagtctggaaattaagatgatccgcaaagaggaccagggcatctacacctgtgtcgccaccaacatcctgggcaaagctgaaaaccaagtccgcctggaggtcaaagaccccaccaggatctaccggatgcccgaggaccaggtggccagaaggggcaccacggtgcagctggagtgtcgggtgaagcacgacccctccctgaaactcaccgtctcctggctgaaggatgacgagccgctctatattggaaacaggatgaagaaggaagacgactccctgaccatctttggggtggcagagcgggaccagggcagttacacgtgtgtcgccagcaccgagctagaccaagacctggccaaggcctacctcaccgtgctagctgatcaggccactccaactaaccgtttggctgccctgcccaaaggacggccagaccggccccgggacctggagctgaccgacctggccgagaggagcgtgcggctgacctggatccccggggatgctaacaacagccccatcacagactacgtcgtccagtttgaagaagaccagttccaacctggggtctggcatgaccattccaagtaccccggcagcgttaactcagccgtcctccggctgtccccgtatgtcaactaccagttccgtgtcattgccatcaacgaggttgggagcagccaccccagcctcccatccgagcgctaccgaaccagtggagcaccccccgagtccaatcctggtgacgtgaagggagaggggaccagaaagaacaacatggagatcacgtggacgcccatgaatgccacctcggcctttggccccaacctgcgctacattgtcaagtggaggcggagagagactcgagaggcctggaacaacgtcacagtgtggggctctcgctacgtggtggggcagaccccagtctacgtgccctatgagatccgagtccaggctgaaaatgacttcgggaagggccctgagccagagtccgtcatcggttactccggagaagatttacccagtgcccctaggcgtttccgagtccggcagcccaacctggagacaatcaacctggaatgggatcatcctgagcatccaaatgggatcatgattggatacactctcaaatatgtggcctttaacgggaccaaagtaggaaagcagatagtggaaaacttctctcccaatcagaccaagttcacggtgcaaagaacggaccccgtgtcacgctaccgctttaccctcagcgccaggacgcaggtgggctctggggaagccgtcacagaggagtcaccagcacccccgaatgaagcttacaccaacaaccaagcggacatcgccacccagggctggttcattgggcttatgtgcgccatcgccctcctggtgctgatcctgctcatcgtctgtttcatcaagaggagtcgcggcggcaagtacccagtacgagaaaagaaggatgttccccttggccctgaagaccccaaggaagaggatggctcatttgactatagtgatgaggacaacaagcccctgcagggcagtcagacatctctggacggcaccatcaagcagcaggagagtgacgacagcctggtggactatggcgagggtggcgagggtcagttcaatgaagacggctccttcatcggccagtacacggtcaaaaaggacaaggaggaaacagagggcaacgaaagctcagaggccacgtcacctgtcaatgctatctactctctggcctaacggagcccacccaggcacagccaccactttgcaagtgggaggaggggagaaggggagacaaaaccactgcagacctaccacgaagccaccaccaccttcagtaacaagggtacgatatgggggtctgccaagctgtgaggaccagtagccaccaagccacccacaagccccctcccaatgaccccccttcagccccgggtgccaccagtgtgggagagctggagccgtggctgagctcagctggagggagcctggccccttgcccggtctcgcagccaccccgagcgttccaccacactgtccgcccttggcctcggcacacgctcaccttttctgttggttacgggacttctcattgtcttaatttcgctttgtgcatcttcccctccagacccaatgtctctgttttcttttccttttgaaaaagagtccctggaaaagaaagaataagtggattctcccccaggagaatcctttttgcaaagataggcaaaaaggattgaatccataccagaacacgtagacaggctgtaatattcaaaccacctctgggccaatgcatttccaaaggatgcctttctcgccatatgcctcccctggcccccagcccctctgcctcggccttgtcagttgctgagctgggcttggctcctttctggaaaatgacagtatttttggcagggngaaggtgcgcaggcctccttgctgctctctggtttggttgggaggtgtgtttacctcttgctcctcattcctcccctgcccttttctctggaatatctaagatgtgagctgcattgactctgaagacgtttgaggaacaggagtgggcactgatagaaaggacttcaacgccagtgactgtgtacctccagcagaagaaaatcaggtgtctggtcttgggggcactgtgctcacctctagagagaagaaaaaggctgggtttggacttcatgcctcctcactggtgaaacccaggatgtagatagagggccacacccaccctgtccagagtagagggcacctgtccacgtggccagggcccattgctgccaccctcgaggagatggaaccctgtgatgcaaaagctttgctggtgtgtttggggcataaggcactgctccccttccatctctagcagatatcatcttctcagccaattctgtaggacactgaggctcttgtttgacatggtgtgtggatggggacttgccccaagactgagcaggtctgccctttcattggggtgtatacatatcaggggaccctgaggtggcaccgtactcagtgttgtgatgcccccacctagggaggactcaatgctctttgtatgccttatgcagcgctgatctgtccctggagttcccaggttcccagctccccccctgcaagccttgaagcctccagcaacgtctatctccaggagagcagggcagcctatgcaagtgttccggcaggaccagaagtggccactcaacacacgtcctcaccagtcaccccaaatggagacactcgcagacctgcagttctcagaccgaaggtgctgccttcatcctccccacctaatgcatttttgaaaccaaaggtacctagcctcagagacagagaaggagagggggagatcttgagtctaagaggaaccctttagctgtttctgcagctgaggtcagtttcaggagggtgaagctgatccccaggaatggatcagctgccatgggcacagcctccgatttgagcctctccggctgccagccagggggcctgggccagaccagggctctgtccttccgtgactttattaaagcaacatttgccacatgtttaagccgcaaaggtattagcaatgcttgcatcattaataatcattcagttgaaggtcaagcccatagacacacactctctgctggtaagaaaccatagcccagaactgagccaataaggttgtttgaacctgagagtgtgtaatggtcatttgggccaagcctcagctagggctgctgcctggacgcctgaggggcagcttatcacagtgcaaggggacagggtaaacagcagggggtggggtgtgagcttggagggcccctcccctggatttcctccaacacctgcttggatactaggcccactgtccctgaagggaatgtcagggaagtgtgcctgtgagctgaattaaaggactggcctttccagaaaacgctttggatctgagcagagtagtcagtttctcagacactcattccatactgcaccgtacatgccagcgtacccattgcaccgaaagcaggcccttagggcaggaagggacgatgagcaagtctgccacaccacctggtgactgggaagggctgcttctctcgtaagggtcttggggagaagtaagcccgcagcctgcctctgcacctcgttccagtgtcctgccaggctctgtactgtcctttgtgtatgaagaaaatgctgttagccctctctcaggctgctgttctgtgggtgctgagagctgccccccatcaccacgcaatcacacccctctgagcagaagcaaatctgaggctgaagaattaagttttccccaagcaaggaaggcagg

SEQ ID NO: 35267 - DNA, 5133 bp, Homo sapiens
acgcgcacgggctggtctctgccctaatgcggcggctggcggcgagaggcgctgcaggggacgcgggggaagtggcggcgccggcagcggacagctcggacagcgcccagggccggagcccgagcccttggaggttgattgacttatgtgcaatttgggacgctggagtttaccttccctccgcagcctggaacagagcctcctctggtgttgcaaggaagaggctgaatgaggcagagaagctgagtgctgtccaggaggcccagttaaagcggctcgaggtgacaagaccccgagtgctggggagcagggagcagggccaggtgccgaggatggccaggcagccaccgccgccctgggtccatgcagccttcctcctctgcctcctcagtcttggcggagccatcgaaattcctatggatccaagcattcagaatgagctgacgcagccgccaaccatcaccaagcagtcagcgaaggatcacatcgtggacccccgtgataacatcctgattgagtgtgaagcaaaagggaaccctgcccccagcttccactggacacgaaacagcagattcttcaacatcgccaaggacccccgggtgtccatgaggaggaggtctgggaccctggtgattgacttccgcagtggcgggcggccggaggaatatgagggggaatatcagtgcttcgcccgcaacaaatttggcacggccctgtccaataggatccgcctgcaggtgtctaaatctcctctgtggcccaaggaaaacctagaccctgtcgtggtccaagagggcgctcctttgacgctccagtgcaaccccccgcctggacttccatccccggtcatcttctggatgagcagctccatggagcccatcacccaagacaaacgtgtctctcagggccataacggagacctatacttctccaacgtgatgctgcaggacatgcagaccgactacagttgtaacgcccgcttccacttcacccacaccatccagcagaagaaccctttcaccctcaaggtcctcaccacccgaggagttgcagaaagaacaccaagcttcatgtatccccagggcaccgcgagcagccagatggtgcttcgtggcatggacctcctgctggaatgcatcgcctccggggtcccaacaccagacatcgcatggtacaagaaaggtggggacctcccatctgataaggccaagtttgagaactttaataaggccctgcgtatcacaaatgtctctgaggaagactccggggagtatttctgcctggcctccaacaagatgggcagcatccggcacacgatctcggtgagagtaaaggctgctccctactggctggacgaacccaagaaccttattctggctcctggcgaggatgggagactggtgtgtcgagccaatggaaaccccaaacccactgtccagtggatggtgaatggggaacctttgcaatcggcaccacctaacccaaaccgtgaggtggccggagacaccatcatcttccgggacacccagatcagcagcagggctgtgtaccagtgcaacacctccaacgagcatggctacctgctggccaacgcctttgtcagtgtgctggatgtgccgcctcggatgctgtcgccccggaaccagctcattcgagtgattctttacaaccggacgcggctggactgccctttctttgggtctcccatccccacactgcgatggtttaagaatgggcaaggaagcaacctggatggtggcaactaccatgtttatgagaacggcagtctggaaattaagatgatccgcaaagaggaccagggcatctacacctgtgtcgccaccaacatcctgggcaaagctgaaaaccaagtccgcctggaggtcaaagaccccaccaggatctaccggatgcccgaggaccaggtggccagaaggggcaccacggtgcagctggagtgtcgggtgaagcacgacccctccctgaaactcaccgtctcctggctgaaggatgacgagccgctctatattggaaacaggatgaagaaggaagacgactccctgaccatctttggggtggcagagcgggaccagggcagttacacgtgtgtcgccagcaccgagctagaccaagacctggccaaggcctacctcaccgtgctaggacggccagaccggccccgggacctggagctgaccgacctggccgagaggagcgtgcggctgacctggatccccggggatgctaacaacagccccatcacagactacgtcgtccagtttgaagaagaccagttccaacctggggtctggcatgaccattccaagtaccccggcagcgttaactcagccgtcctccggctgtccccgtatgtcaactaccagttccgtgtcattgccatcaacgaggttgggagcagccaccccagcctcccatccgagcgctaccgaaccagtggagcaccccccgagtccaatcctggtgacgtgaagggagaggggaccagaaagaacaacatggagatcacgtggacgcccatgaatgccacctcggcctttggccccaacctgcgctacattgtcaagtggaggcggagagagactcgagaggcctggaacaacgtcacagtgtggggctctcgctacgtggtggggcagaccccagtctacgtgccctatgagatccgagtccaggctgaaaatgacttcgggaagggccctgagccagagtccgtcatcggttactccggagaagattatcccagggctgcgcccactgaagttaaagtccgagtcatgaacagcacagccatcagccttcagtggaaccgcgtctactccgacacggtccagggccagctcagagagtaccgagcctactactggagggagagcagcttgctgaagaacctgtgggtgtctcagaagagacagcaagccagcttccctggtgaccgcctccgtggcgtggtgtcccgcctcttcccctacagtaactacaagctggagatggttgtggtcaatgggagaggtgatgggcctcgcagtgagaccaaggagttcaccaccccggaaggagtacccagtgcccctaggcgtttccgagtccggcagcccaacctggagacaatcaacctggaatgggatcatcctgagcatccaaatgggatcatgattggatacactctcaaatatgtggcctttaacgggaccaaagtaggaaagcagatagtggaaaacttctctcccaatcagaccaagttcacggtgcaaagaacggaccccgtgtcacgctaccgctttaccctcagcgccaggacgcaggtgggctctggggaagccgtcacagaggagtcaccagcacccccgaatgaaggtaggtgcatggcagcagcccctggggtaaaaggtcccagctaattccgaggcctagagaaacactgagatctgtagctggctgcctgggatggagaggaaatgagacttgcaagtcctcaagccctcggaaggtgagaacccatcttatgtgtgagaggtaggtgctggcattgtatctggagctcagctctccttggaccactgtggtcacacctgggtccccacttgccctgacttgctcagtcacttgacatctatcatctttccttcttgtagaggaataaggaagagagcatgagttgagaaatgagagaaatcataatgaactccaaagaacagtgagtgttcacctcttgagggaggcaggaatatgattgtgagtgctcccatgagggctctggggacaaccttctttcttcgaaggcacatgggttcaaggaggtaggggaaaccgtcaggatgacgctgttactggcatcatgagtagagcagagaatgtggtccttccttgcagcctgaattggatgcgttgtcaggctgcagagaggaggaggagttaggaaacagccatttgccaagccagcttcacaaagagcaaatgagttcatcacctgggtccaggcgtcatctggcagcatttcagccccaccagagctgcacctgcctgaggactccactagagggggctccaggctcacccgcacacgcactggcatcaggggaatgtgcagtctgggacctctcgaggaggcaaggctgcaaaagcctcaatactggcacaccctctgggaaaggctggggacccccgtgtgtctccagagatacaatggtctattcaacagccatttcttgagtacccacaatgtgaggtgccagacactgccacacacaagggatatacaaaggtaacaagaagctcacaccatctagagggggagtcatctataagaatatctaattgcatgtctaaatgagggggcgcagtggctgggcagagaaggggattcagtcttcacgggaagactccagagaagaggtgatgtgagtgggcactctggaagctgacaagtcatcgtgtctggtgctttccacagaagggtcaggtcccgtggcctggcccaggcccagacggggtcttctgaataccacccctacccgcattccaggagagcatcagtgctgccttctctggggctaccaggcccgctgcgtcaccccgggatcccaggcagcttcacaagctgcccacatccttccccagcccaccactctagccagtagaccagcgctgaggcaggagaagaggggccaggcagaagcagagaaaggctgacagcccgctctgcatccctctctggtctcagaaaccaggagtgagtcacacaaccagctctccctcctgctgtgctcttctgcactctcccaagcccctgggcactcgggaagtttattagggcagggggacttaggttagtggctgatgtgtgtctgtcaccaaaggccaggccaggccaggccatgatgcactttcttgattactcaattctgcaaatagatagataaagagagccccttcttccctccctatgtgcaccccaatacagaacatcagataacaaagccctattgtccagccccagtaaccaccacagagaatgttctgcagccccaggggacaaaaggacaaatagaggcttttttcttaacttagggctttgcagaaaattcaagaatttcacttagggctctcagtcca

SEQ ID NO: 35268 - DNA, 4826 bp, Homo sapiens
  misc_feature (2923)..(2923): n is a, c, g, or t
cggacgcgtgggccggcacacgatctcggtgagagtaaaggctgctccctactggctggacgaacccaagaaccttattctggctcctggcgaggatgggagactggtgtgtcgagccaatggaaaccccaaacccactgtccagtggatggtgaatggggaacctttgcaatcggcaccacctaacccaaaccgtgaggtggccggagacaccatcatcttccgggacacccagatcagcagcagggctgtgtaccagtgcaacacctccaacgagcatggctacctgctggccaacgcctttgtcagtgtgctggatgtgccgcctcggatgctgtcgccccggaaccagctcattcgagtgattctttacaaccggacgcggctggactgccctttctttgggtctcccatccccacactgcgatggtttaagaatgggcaaggaagcaacctggatggtggcaactaccatgtttatgagaacggcagtctggaaattaagatgatccgcaaagaggaccagggcatctacacctgtgtcgccaccaacatcctgggcaaagctgaaaaccaagtccgcctggaggtcaaagaccccaccaggatctaccggatgcccgaggaccaggtggccagaaggggcaccacggtgcagctggagtgtcgggtgaagcacgacccctccctgaaactcaccgtctcctggctgaaggatgacgagccgctctatattggaaacaggatgaagaaggaagacgactccctgaccatctttggggtggcagagcgggaccagggcagttacacgtgtgtcgccagcaccgagctagaccaagacctggccaaggcctacctcaccgtgctagctgatcaggccactccaactaaccgtttggctgccctgcccaaaggacggccagaccggccccgggacctggagctgaccgacctggccgagaggagcgtgcggctgacctggatccccggggatgctaacaacagccccatcacagactacgtcgtccagtttgaagaagaccagttccaacctggggtctggcatgaccattccaagtaccccggcagcgttaactcagccgtcctccggctgtccccgtatgtcaactaccagttccgtgtcattgccatcaacgaggttgggagcagccaccccagcctcccatccgagcgctaccgaaccagtggagcaccccccgagtccaatcctggtgacgtgaagggagaggggaccagaaagaacaacatggagatcacgtggacgcccatgaatgccacctcggcctttggccccaacctgcgctacattgtcaagtggaggcggagagagactcgagaggcctggaacaacgtcacagtgtggggctctcgctacgtggtggggcagaccccagtctacgtgccctatgagatccgagtccaggctgaaaatgacttcgggaagggccctgagccagagtccgtcatcggttactccggagaagatttacccagtgcccctaggcgtttccgagtccggcagcccaacctggagacaatcaacctggaatgggatcatcctgagcatccaaatgggatcatgattggatacactctcaaatatgtggcctttaacgggaccaaagtaggaaagcagatagtggaaaacttctctcccaatcagaccaagttcacggtgcaaagaacggaccccgtgtcacgctaccgctttaccctcagcgccaggacgcaggtgggctctggggaagccgtcacagaggagtcaccagcacccccgaatgaagcttacaccaacaaccaagcggacatcgccacccagggctggttcattgggcttatgtgcgccatcgccctcctggtgctgatcctgctcatcgtctgtttcatcaagaggagtcgcggcggcaagtacccagtacgagaaaagaaggatgttccccttggccctgaagaccccaaggaagaggatggctcatttgactatagtgatgaggacaacaagcccctgcagggcagtcagacatctctggacggcaccatcaagcagcaggagagtgacgacagcctggtggactatggcgagggtggcgagggtcagttcaatgaagacggctccttcatcggccagtacacggtcaaaaaggacaaggaggaaacagagggcaacgaaagctcagaggccacgtcacctgtcaatgctatctactctctggcctaacggagcccacccaggcacagccaccactttgcaagtgggaggaggggagaaggggagacaaaaccactgcagacctaccacgaagccaccaccaccttcagtaacaagggtacgatatgggggtctgccaagctgtgaggaccagtagccaccaagccacccacaagccccctcccaatgaccccccttcagccccgggtgccaccagtgtgggagagctggagccgtggctgagctcagctggagggagcctggccccttgcccggtctcgcagccaccccgagcgttccaccacactgtccgcccttggcctcggcacacgctcaccttttctgttggttacgggacttctcattgtcttaatttcgctttgtgcatcttcccctccagacccaatgtctctgttttcttttccttttgaaaaagagtccctggaaaagaaagaataagtggattctcccccaggagaatcctttttgcaaagataggcaaaaaggattgaatccataccagaacacgtagacaggctgtaatattcaaaccacctctgggccaatgcatttccaaaggatgcctttctcgccatatgcctcccctggcccccagcccctctgcctcggccttgtcagttgctgagctgggcttggctcctttctggaaaatgacagtatttttggcagggngaaggtgcgcaggcctccttgctgctctctggtttggttgggaggtgtgtttacctcttgctcctcattcctcccctgcccttttctctggaatatctaagatgtgagctgcattgactctgaagacgtttgaggaacaggagtgggcactgatagaaaggacttcaacgccagtgactgtgtacctccagcagaagaaaatcaggtgtctggtcttgggggcactgtgctcacctctagagagaagaaaaaggctgggtttggacttcatgcctcctcactggtgaaacccaggatgtagatagagggccacacccaccctgtccagagtagagggcacctgtccacgtggccagggcccattgctgccaccctcgaggagatggaaccctgtgatgcaaaagctttgctggtgtgtttggggcataaggcactgctccccttccatctctagcagatatcatcttctcagccaattctgtaggacactgaggctcttgtttgacatggtgtgtggatggggacttgccccaagactgagcaggtctgccctttcattggggtgtatacatatcaggggaccctgaggtggcaccgtactcagtgttgtgatgcccccacctagggaggactcaatgctctttgtatgccttatgcagcgctgatctgtccctggagttcccaggttcccagctccccccctgcaagccttgaagcctccagcaacgtctatctccaggagagcagggcagcctatgcaagtgttccggcaggaccagaagtggccactcaacacacgtcctcaccagtcaccccaaatggagacactcgcagacctgcagttctcagaccgaaggtgctgccttcatcctccccacctaatgcatttttgaaaccaaaggtacctagcctcagagacagagaaggagagggggagatcttgagtctaagaggaaccctttagctgtttctgcagctgaggtcagtttcaggagggtgaagctgatccccaggaatggatcagctgccatgggcacagcctccgatttgagcctctccggctgccagccagggggcctgggccagaccagggctctgtccttccgtgactttattaaagcaacatttgccacatgtttaagccgcaaaggtattagcaatgcttgcatcattaataatcattcagttgaaggtcaagcccatagacacacactctctgctggtaagaaaccatagcccagaactgagccaataaggttgtttgaacctgagagtgtgtaatggtcatttgggccaagcctcagctagggctgctgcctggacgcctgaggggcagcttatcacagtgcaaggggacagggtaaacagcagggggtggggtgtgagcttggagggcccctcccctggatttcctccaacacctgcttggatactaggcccactgtccctgaagggaatgtcagggaagtgtgcctgtgagctgaattaaaggactggcctttccagaaaacgctttggatctgagcagagtagtcagtttctcagacactcattccatactgcaccgtacatgccagcgtacccattgcaccgaaagcaggcccttagggcaggaagggacgatgagcaagtctgccacaccacctggtgactgggaagggctgcttctctcgtaagggtcttggggagaagtaagcccgcagcctgcctctgcacctcgttccagtgtcctgccaggctctgtactgtcctttgtgtatgaagaaaatgctgttagccctctctcaggctgctgttctgtgggtgctgagagctgccccccatcaccacgcaatcacacccctctgagcagaagcaaatctgaggctgaagaattaagttttccccaagcaaggaaggcagg

SEQ ID NO: 35269 - DNA, 3519 bp, Homo sapiens
  misc_feature (1616)..(1616): n is a, c, g, or t
aattcactgacacagcattattgcagtaaagaagtagtttaattaatgcaaggctggccaagaagaaggactggagttattactcaaatcagtctcatgatggagcagctcagattaactacaagctggagatggttgtggtcaatgggagaggtgatgggcctcgcagtgagaccaaggagttcaccaccccggaaggagtacccagtgcccctaggcgtttccgagtccggcagcccaacctggagacaatcaacctggaatgggatcatcctgagcatccaaatgggatcatgattggatacactctcaaatatgtggcctttaacgggaccaaagtaggaaagcagatagtggaaaacttctctcccaatcagaccaagttcacggtgcaaagaacggaccccgtgtcacgctaccgctttaccctcagcgccaggacgcaggtgggctctggggaagccgtcacagaggagtcaccagcacccccgaatgaagcttacaccaacaaccaagcggacatcgccacccagggctggttcattgggcttatgtgcgccatcgccctcctggtgctgatcctgctcatcgtctgtttcatcaagaggagtcgcggcggcaagtacccagtacgagaaaagaaggatgttccccttggccctgaagaccccaaggaagaggatggctcatttgactatagtgatgaggacaacaagcccctgcagggcagtcagacatctctggacggcaccatcaagcagcaggagagtgacgacagcctggtggactatggcgagggtggcgagggtcagttcaatgaagacggctccttcatcggccagtacacggtcaaaaaggacaaggaggaaacagagggcaacgaaagctcagaggccacgtcacctgtcaatgctatctactctctggcctaacggagcccacccaggcacagccaccactttgcaagtgggaggaggggagaaggggagacaaaaccactgcagacctaccacgaagccaccaccaccttcagtaacaagggtacgatatgggggtctgccaagctgtgaggaccagtagccaccaagccacccacaagccccctcccaatgaccccccttcagccccgggtgccaccagtgtgggagagctggagccgtggctgagctcagctggagggagcctggccccttgcccggtctcgcagccaccccgagcgttccaccacactgtccgcccttggcctcggcacacgctcaccttttctgttggttacgggacttctcattgtcttaatttcgctttgtgcatcttcccctccagacccaatgtctctgttttcttttccttttgaaaaagagtccctggaaaagaaagaataagtggattctcccccaggagaatcctttttgcaaagataggcaaaaaggattgaatccataccagaacacgtagacaggctgtaatattcaaaccacctctgggccaatgcatttccaaaggatgcctttctcgccatatgcctcccctggcccccagcccctctgcctcggccttgtcagttgctgagctgggcttggctcctttctggaaaatgacagtatttttggcagggngaaggtgcgcaggcctccttgctgctctctggtttggttgggaggtgtgtttacctcttgctcctcattcctcccctgcccttttctctggaatatctaagatgtgagctgcattgactctgaagacgtttgaggaacaggagtgggcactgatagaaaggacttcaacgccagtgactgtgtacctccagcagaagaaaatcaggtgtctggtcttgggggcactgtgctcacctctagagagaagaaaaaggctgggtttggacttcatgcctcctcactggtgaaacccaggatgtagatagagggccacacccaccctgtccagagtagagggcacctgtccacgtggccagggcccattgctgccaccctcgaggagatggaaccctgtgatgcaaaagctttgctggtgtgtttggggcataaggcactgctccccttccatctctagcagatatcatcttctcagccaattctgtaggacactgaggctcttgtttgacatggtgtgtggatggggacttgccccaagactgagcaggtctgccctttcattggggtgtatacatatcaggggaccctgaggtggcaccgtactcagtgttgtgatgcccccacctagggaggactcaatgctctttgtatgccttatgcagcgctgatctgtccctggagttcccaggttcccagctccccccctgcaagccttgaagcctccagcaacgtctatctccaggagagcagggcagcctatgcaagtgttccggcaggaccagaagtggccactcaacacacgtcctcaccagtcaccccaaatggagacactcgcagacctgcagttctcagaccgaaggtgctgccttcatcctccccacctaatgcatttttgaaaccaaaggtacctagcctcagagacagagaaggagagggggagatcttgagtctaagaggaaccctttagctgtttctgcagctgaggtcagtttcaggagggtgaagctgatccccaggaatggatcagctgccatgggcacagcctccgatttgagcctctccggctgccagccagggggcctgggccagaccagggctctgtccttccgtgactttattaaagcaacatttgccacatgtttaagccgcaaaggtattagcaatgcttgcatcattaataatcattcagttgaaggtcaagcccatagacacacactctctgctggtaagaaaccatagcccagaactgagccaataaggttgtttgaacctgagagtgtgtaatggtcatttgggccaagcctcagctagggctgctgcctggacgcctgaggggcagcttatcacagtgcaaggggacagggtaaacagcagggggtggggtgtgagcttggagggcccctcccctggatttcctccaacacctgcttggatactaggcccactgtccctgaagggaatgtcagggaagtgtgcctgtgagctgaattaaaggactggcctttccagaaaacgctttggatctgagcagagtagtcagtttctcagacactcattccatactgcaccgtacatgccagcgtacccattgcaccgaaagcaggcccttagggcaggaagggacgatgagcaagtctgccacaccacctggtgactgggaagggctgcttctctcgtaagggtcttggggagaagtaagcccgcagcctgcctctgcacctcgttccagtgtcctgccaggctctgtactgtcctttgtgtatgaagaaaatgctgttagccctctctcaggctgctgttctgtgggtgctgagagctgccccccatcaccacgcaatcacacccctctgagcagaagcaaatctgaggctgaagaattaagttttccccaagcaaggaaggcagg

SEQ ID NO: 35270 - DNA, 3107 bp, Homo sapiens
acgcgcacgggctggtctctgccctaatgcggcggctggcggcgagaggcgctgcaggggacgcgggggaagtggcggcgccggcagcggacagctcggacagcgcccagggccggagcccgagcccttggaggttgattgacttatgtgcaatttgggacgctggagtttaccttccctccgcagcctggaacagagcctcctctggtgttgcaaggaagaggctgaatgaggcagagaagctgagtgctgtccaggaggcccagttaaagcggctcgaggtgacaagaccccgagtgctggggagcagggagcagggccaggtgccgaggatggccaggcagccaccgccgccctgggtccatgcagccttcctcctctgcctcctcagtcttggcggagccatcgaaattcctatggatccaagcattcagaatgagctgacgcagccgccaaccatcaccaagcagtcagcgaaggatcacatcgtggacccccgtgataacatcctgattgagtgtgaagcaaaagggaaccctgcccccagcttccactggacacgaaacagcagattcttcaacatcgccaaggacccccgggtgtccatgaggaggaggtctgggaccctggtgattgacttccgcagtggcgggcggccggaggaatatgagggggaatatcagtgcttcgcccgcaacaaatttggcacggccctgtccaataggatccgcctgcaggtgtctaaatctcctctgtggcccaaggaaaacctagaccctgtcgtggtccaagagggcgctcctttgacgctccagtgcaaccccccgcctggacttccatccccggtcatcttctggatgagcagctccatggagcccatcacccaagacaaacgtgtctctcagggccataacggagacctatacttctccaacgtgatgctgcaggacatgcagaccgactacagttgtaacgcccgcttccacttcacccacaccatccagcagaagaaccctttcaccctcaaggtcctcaccacccgaggagttgcagaaagaacaccaagcttcatgtatccccagggcaccgcgagcagccagatggtgcttcgtggcatggacctcctgctggaatgcatcgcctccggggtcccaacaccagacatcgcatggtacaagaaaggtggggacctcccatctgataaggccaagtttgagaactttaataaggccctgcgtatcacaaatgtctctgaggaagactccggggagtatttctgcctggcctccaacaagatgggcagcatccggcacacgatctcggtgagagtaaaggctgctccctactggctggacgaacccaagaaccttattctggctcctggcgaggatgggagactggtgtgtcgagccaatggaaaccccaaacccactgtccagtggatggtgaatggggaacctttgcaatcggcaccacctaacccaaaccgtgaggtggccggagacaccatcatcttccgggacacccagatcagcagcagggctgtgtaccagtgcaacacctccaacgagcatggctacctgctggccaacgcctttgtcagtgtgctggatgtgccgcctcggatgctgtcgccccggaaccagctcattcgagtgattctttacaaccggacgcggctggactgccctttctttgggtctcccatccccacactgcgatggtttaagaatgggcaaggaagcaacctggatggtggcaactaccatgtttatgagaacggcagtctggaaattaagatgatccgcaaagaggaccagggcatctacacctgtgtcgccaccaacatcctgggcaaagctgaaaaccaagtccgcctggaggtcaaagaccccaccaggatctaccggatgcccgaggaccaggtggccagaaggggcaccacggtgcagctggagtgtcgggtgaagcacgacccctccctgaaactcaccgtctcctggctgaaggatgacgagccgctctatattggaaacaggatgaagaaggaagacgactccctgaccatctttggggtggcagagcgggaccagggcagttacacgtgtgtcgccagcaccgagctagaccaagacctggccaaggcctacctcaccgtgctagctgatcaggccactccaactaaccgtttggctgccctgcccaaaggacggccagaccggccccgggacctggagctgaccgacctggccgagaggagcgtgcggctgacctggatccccggggatgctaacaacagccccatcacagactacgtcgtccagtttgaagaagaccagttccaacctggggtctggcatgaccattccaagtaccccggcagcgttaactcagccgtcctccggctgtccccgtatgtcaactaccagttccgtgtcattgccatcaacgaggttgggagcagccaccccagcctcccatccgagcgctaccgaaccagtggagcaccccccgagtccaatcctggtgacgtgaagggagaggggaccagaaagaacaacatggagatcacgtggacgcccatgaatgccacctcggcctttggccccaacctgcgctacattgtcaagtggaggcggagagagactcgagaggcctggaacaacgtcacagtgtggggctctcgctacgtggtggggcagaccccagtctacgtgccctatgagatccgagtccaggctgaaaatgacttcgggaagggccctgagccagagtccgtcatcggttactccggagaagattatcccagggctgcgcccactgaagttaaagtccgagtcatgaacagcacagccatcagccttcagtggaaccgcgtctactccgacacggtccagggccagctcagagagtaccgagtgaggaagccagctccggactcacctaactacccagctcactaaccagggccaggggtagcaaatgcgggctataagatatttgaaagaaaccctagcgttgtttattgaatccagggttgactcaagaagataatgtctagggttagatgttcaaaaatatacccagaaaaaaaaattatatatata

SEQ ID NO: 35271 - DNA, 989 bp, Homo sapiens
acgcgcacgggctggtctctgccctaatgcggcggctggcggcgagaggcgctgcaggggacgcgggggaagtggcggcgccggcagcggacagctcggacagcgcccagggccggagcccgagcccttggaggttgattgacttatgtgcaatttgggacgctggagtttaccttccctccgcagcctggaacagagcctcctctggtgttgcaaggaagaggctgaatgaggcagagaagctgagtgctgtccaggaggcccagttaaagcggctcgaggtgacaagaccccgagtgctggggagcagggagcagggccaggtgccgaggatggccaggcagccaccgccgccctgggtccatgcagccttcctcctctgcctcctcagtcttggcggagccatcgaaattcctatggatctgacgcagccgccaaccatcaccaagcagtcagcgaaggatcacatcgtggacccccgtgataacatcctgattgagtgtgaagcaaaagggaaccctgcccccagcttccactggacacgaaacagcagattcttcaacatcgccaaggacccccgggtgtccatgaggaggaggtctgggaccctggtgattgacttccgcagtggcgggcggccggaggaatatgagggggaatatcagtgcttcgcccgcaacaaatttggcacggccctgtccaataggatccgcctgcaggtgtctaaatctcctctgtggcccaaggaaaacctagaccctgtcgtggtccaagagggcgctcctttgacgctccagtgcaaccccccgcctggacttccatccccggtcatcttctggatgagcagctccatggagcccatcacccaagacaaacgtgtctctcagggccataacggagacctatacttctccaacgtgatgctgcaggacatgcagaccgactacagttgtaacgcccgcttccaacacctcgtgctgaattcttgg

SEQ ID NO: 35272 - DNA, 606 bp, Homo sapiens
acgcgcacgggctggtctctgccctaatgcggcggctggcggcgagaggcgctgcaggggacgcgggggaagtggcggcgccggcagcggacagctcggacagcgcccagggccggagcccgagcccttggagctgagtgctgtccaggaggcccagttaaagcggctcgaggtgacaagaccccgagtgctggggagcagggagcagggccaggtgccgaggatggccaggcagccaccgccgccctgggtccatgcagccttcctcctctgcctcctcagtcttggcggagccatcgaaattcctatggatcgtcctctgtggtcttgacttgcccatgaaagcagtccagggtcaagtgtggtggagcagttcttacttgcctttctaatgtctgatatattcaaatccacacccttcgggccctcttggctggagtaatcaggaggacacaggcctgggaagggctgggagcagaattatctttgcaaaagacatggctaaatgagacattaaaatagagccccattatcatgccgcatgggagaaccaggcatggattccttctcattgttttcaactttcctgcagtaaagataaaaagt

SEQ ID NO: 35273 - DNA, 473 bp, Homo sapiens
tctctcacacctcatgataattcagagatcaagattcctttcaatttgttgttcctctttctccttaggttttgtcaaagcagagaaaccacttagtcatgactgagtcttagcccgaggaagggatgggaaaaagggaggaagaaggaggccaagcaagtgatgaggaagatacgtacatcgcttttgctcacatttcattgaagaaaacgaattgcatgggccatacctagctacagtggggaagccaggaaatatactctgtagctgggtgtcagtgtgactaactaaacctcgattactgtggaagaatgaattaagataattagcagcctaccatagataccttctaaattttcaggaacttatttctgtctgtagcttgaaaaatcaaatgaatattttttggtttttcccttttttttgttttatttggagcctgggcaacagagcaagatctagtctctgtctca

SEQ ID NO: 35274 - DNA, 146 bp, Homo sapiens
gggccatgggggaagatgctgttccaggcctctctccttggcttagaggtggtgcctgttgtctattctcttgtcactgtcttccctccacgtgtgtctggctctgtctgaatcccccatttcataaggacaccagtcatactaga

SEQ ID NO: 35275 - DNA, 224 bp, Homo sapiens
catctctcacatttatgttagaacaaggccatgaatgctgttttcttctatctcatgatccctaccatttcttcttctgtttctcacctcaataaaatggctcccatgttgatgccttgattcccggaaggagctactgttttgctttgcctcttaacatcgctcaggtgatgctgcccttgctgatactctgtctctgagctgaagcaggagaaaatcccctc

SEQ ID NO: 35276 - DNA, 350 bp, Homo sapiens
gcagtatccaaacaggcaactccgcacctcaccccagaacacccccaataaaggcacacttttaaagcaagcctgatgatttcccttccaaaattactaggtatttcagaaacagcaggttttaaaatacatcatcttaaatgcagcatcatcctcatatgaatgtcaaagagagatgaaatgcaattaaaaagagctaactgtttttttctccccctctctcatttgagtgttctggtaactacttacaaattatacttggaaatgaatcctttcataaactgatactttatttagcacatgagaactgaataaaaatgaagagcatttccccttgtatttagagacat

SEQ ID NO: 35277 - DNA, 497 bp, Homo sapiens
gtatttgcactgtctaggcatctatataaaaatgtgtgtatgcgtatataactatatgtaaacgttaagttagttattgggtatgttaagagagtgtgattaaattttttaaagagaaattgttttttcagtaattttttctttaaagtgaagaatgacttacaaaaatttatcttacatcctacttcaatacaatgtaaatgcatatatgtaaagaaggaaagaaagggagagaaaataaacctagttatgatccagagcattaaaaagattgtgcttggccgggcacggtggctcacgcctgtaatcccagcactttgggaggccgaggcaggcggatcacgaggtcaggagatcgagaccatcctggctaacacgtgaaaccccgtctctactaaaaatacaaaaaattagccgagagaggtggcgggcacctgtagtcccagctactcgaggcaggagaatggcgtgaaccccggcgggcagagcctgcagtg

SEQ ID NO: 35278 - DNA, 403 bp, Homo sapiens
taacactgcatactaactaggatgggtatgttcaaaagatcacttaataacaaatcttggtgaggattttgaaaaactgaatctttcatacattgctggtgggaaaagaaaattgtgcagtcactttgaaaaacagtctggcaatttttcaaaaggttaaacatagagttaccatatgacccagcacatgactcctaggtgcatgtgtgtctatatccatacagtggaatgttattcaggcataaaaagaaatgtagtactgatccatgctgccacatggatgaaccttgaaaacctgctaagcttagcaaagaagccagtcacaaaagaccaggtagcatatgattcccttcttcctttagttaccaactttctgtctcctcatcctcaatctctttactat

SEQ ID NO: 35279 - DNA, 519 bp, Homo sapiens
aattctagatttaaatactatccctcaagctattgtacttcattaaaaaaaaaaattacacatagagatgtccagtatttctatataagtaatgtagggtagaattatttctatcaagaaataaagcatgcatttccaaatcatcagctttatttgccattttgaaataaaatccataatatttaatgaaacagggaagaccacatgacctttggaagctttcttagcctctctgcatttcatttttcttatctgtaaaatagaatgggttgagatgggactctattaaactttgaaattctaaaactcttgacacaaaaagttgtgattcatatatgtgactattttagaataagaaatctcaacagaaaaaaatgtagtctggacttttatttaaaattccattctaaaatattcttcagacttatttaatgtcctaccgaaagattagaaatgttactggggagttaggaaagtgagcctgaagaggaaaataatctgattaaaacatttttattg

SEQ ID NO: 35280 - DNA, 212 bp, Homo sapiens
ctagactgggttctgtgtaaccttggataattgatgtccatgcattggaccttgatttttcaaactgcaaaatgagggaactgaactaaatcatctccaaggttctttcttgcaattagactccttatctctcagcaagatgatgtgtactcagcgtcttccaccccaacagggaccacctctctattttttttttttttaaggggggagcc

SEQ ID NO: 35281 - DNA, 554 bp, Homo sapiens
gtttttgtttttaggccagcacatagtaaaggcttataccttgcactgtttttttttgtctcttttcatctaggccagccccagtgccttttgaccccatagttttgatcttttgaggggccaggcgggttgttttgtagaactgtcccacattctggatttatctgattgtttccttatggtgtgatttaccttggtcttctgttagctgattgtctcaggaactagaagttaggtcaaatagtttgatgaggttaaacatttttcccaagagcacttcagaggtgatgccgcgtacctcatgtggcatcacaaggcacatcctgtgagagtgtctcacagttagtgctgctgagtttgactgtgggttacagtggtggctaccagattctctccattataagctacatctcccctttgcaattaatttttctgtaaggtgctgtgttggctctgtccagattacacattttcctgtcatcctttcatctaattgttttgataccagttttgattattgcctattttattagagttgcaaaatggcaaatgtc

SEQ ID NO: 35282 - DNA, 655 bp, Homo sapiens
gcccgtttctacctaaacacaccccactgcagggcaaactacaaggtggtttccttccagagtcccagagaggaggcagggcaccagtgctctctgcttacagggggtcgctcacctacctgggccttctatcatctcaataaccccgtaagcagaagcccaggacaactgggtgctagatctcagtgacccatccatttcttaaccctggaatcctctgaatctctgcaagctcctccttccaacccaggaagcaattttctccttcttgggctaacggaagtgatcctgtagcctccctcctccgtggcttaatgtacaatatatgccaggccttctgagatttggctgcttggaaaccacaaaccatttttcttctaacaaagcctgtctcttttaaatgaaggcttgggctaactctgttctctgaaacaggctttaagggcctgttttggaagtcaaaagctgaacaatgtcttctttgtcgttgaccatgttctgtcctccccttgaagtgatggaatccctagcttcaatgggggagactcccagggcaacagcaattaggaggaagggaaagtaaattgaataccagttcaaaatattattcccactaaactagctgctcataatgcaaggtctcagaggtcccaga

SEQ ID NO: 35283 - DNA, 623 bp, Homo sapiens
tacaatttgaagaaattttctcagttttatatgtttttttagtgggtgaagttcagtctacagtttttacatttagtcacctaactctagccaacttcttggtcatattctctggaaaacattcgaagatcatggcagcttttagataaaaacattttctattattttgcgtgcaaacttgtttactgtgttcacagagtggccagtcatgagaccataagaaacagctgcccttttagtgtctttcataccgtctgtaatatataaattgtgcatttattctgtgaagcatgacattttgaagtatatacacattgtcaaatgcttcattctaggtaattaatgctttacctaacatagttaacatttttgtggtaagagcacatgacaatgttttagcatttttcagaaatacaaatacattgttatgaactataggcaccatgcagtacaaaagcttttttgaacttatttctcctattcaactgtaattatgtatttgactgacatctttctaaacccctcttttttccaaatatgttggcatctggtggtcaccattttattctccacttcagttagattaatttttctagaatcatgtaagtgaaataatttggtta

SEQ ID NO: 35284 - DNA, 817 bp, Homo sapiens
gttcttccaggaaatatgaagtatgatagaggaaatatgaagtataatagcctcgcccagtgtttcttagccctttgccaacttaccacatccttggaaaacaacagtcatgccagtagtccaggctgccgtggcagggtctcacccatggctggggcattgcatatactcatcagggtttctcctcagaacctgcactgtgtagagggcagaaagggtgagggagatagagggggtagagcagcacaagaaaaaccaacagtgcttggcaactggaaatggaaatcaagggaaaggagtggttcagagagtaccccgtggatgaggagagagacatgtctgcccatcaagcacttagaattcttttttggaaagtaaaaccagtacatatgaaacaattgaagaatcaatgtgttatcacatgtaagtggatttggcttatgtaggaaaaagggaagttcactgttgcccagggagtcatcactgaagatgggggatttgagctgtgcccttgaagtgacacaggccttggagagcaggggtggccattgccagcgcaaggagaactgtatgaatatagacacaggatagagagtgggcagccttgtaccctctggcccgacttactggagagtagcaggagcatgaaattgaaaaggaaacatcttatcaaacttgatgttccaagaaagaagaaaggaaaaacctgtttgtgcctagtaagttacagctctcatcctgtaactttggtgtctcagattgtaaaatgtgtgctctatctagagtgtcaagatgaacattttaccatctgtggatg

SEQ ID NO: 35285 - DNA, 1249 bp, Homo sapiens
catatatattgccaaagacacatatgtgtctagggacatacaacgaatgcactgtgggggaacacaagaggaactgaagtgcaaatcaggaatgaagggaacaaataaaagaacaggaggggggcctttcatggactgatcctaacatagtgtcatgaacttaggaggaggattaactcaattctcattaattgagaattctcattaatctatgtaccaagagcaagagaaaagcccaatagcagtggtgccagcagtgccatccttaccagactgattctaacatattaccttagtttttgcagtggttcatcctctgttgattcctatctgtttcatgcctcacctccagacttcacagttctgtgaattacttattgctatccttccaataatttttctttcttttttttttttgagactgagtcttgctccatcgcccaggctggagtacagtgctgcgatctcggctcactgcaatgtccacctcctggggtcaagcaattctcttgccttagcctcctgattacaggtgtgcgccatcagagctcagctaatttttgtatttttagtagagatggggtttcaccgtgttggtcagctggtcttgaactcctgaccttgtgatccgcccaccttggcctcccacagtgctgggattacaggcaggcatgagccaccatgcccggccaatttttcttcttaaccacagtttattgtagtcaaacttatactattacagagtagatttattttacctgttgaatgtccagtccgaggttgaactttatccattacagtaggcatccttattttgttcttggcttcaatgggaatgctgcaggttttcaaagctggaaagctgttgcagaaagcccaatatgtacataaacttgctttccagcagcaacaaccaaaacagcagaaagacagcctttacctcccaaatctcaaatgaagaaatctaattggtggaactgatcttgtactcagaaccctagcttcaagggttttaatttctccaggtagcaaagaatttgaggcaaccaggtgaatggataaatttactatggtggatgctcaaatatctatggaatactcctgcagctgatggaagcaacaaactagattaacagctacatggaatacactggttatttacctattttttttcagctgctagcctttccatctctccccctgcaactcccccaattctctcctctacccacccccacccccacattct

SEQ ID NO: 35286 - DNA, 1243 bp, Homo sapiens
ctcttgtcctctggatatcctgggatggaatcctaatgaaggaaactccagtggtttactgaagccctttgtgctaggcctgaggtgagatagaattgctccatcctatgcccaggaggcctgcgtggactcacagtgcaccaccatcctcagaaatcctctctccctgtaggctgtggtctgaatctttgtgtcttcccaaaattcatatgttgaaatcctaacgccccaggtgatgatattagaagatggggcctttcaggagttgactaaaacttcagggaaaagccctcacaaatgggattagttcccttataaaataggtccaaggaaacttgctcacttctaacaccatgtgaggacacagtgagaaggcaccatctataagccagaaagcagtccctcaccagacatagatctgctggcaccttgatcttggacttctcaccctccagaactgggagaaataagtgtatattgtttataagctacacagtttatgatattatagcagcccaaacagacattgtatttcctcaatgttggtttaagagttgtctaaaccagtttcttgttatcatactgtggatgtttctagctctcactgtagcattccacctcttttctgtctcagtgacttagtcaaagcatctagttgaacactctgttatttaaagaaaccagcattcactggctgttcccagctccaggaactcaggtggattcataatttgttctgtttccttgctcttaggaaaagtactgacagctcataattggttgtatttcttaggatatttgcatttaaactagaagcaatgctttcttttcttggtataatttgtcttacatttttgaaagtaatagctattcattaaattacatttgaaaatgcaggaagaaagaaaaaattgtctataattctactactcatataaaaccactattcacatatgtgtactttcctctattaacctttcaaagcatgcctcaattttaattgtattcacacaaatacaattttatgccatacattttacttattaatatgctattagcatcaccaatgtcaatataaactccttgtaaacatcaatttaatggttgcaaagtattacatcaactggatatgccatggcttatttaatcactgtatttattgttaaatatttgcattgtttacactgtttagtattgaaaaccacgctgcaataaatatctttggatagattcttaaaaaaaa

SEQ ID NO: 35287 - DNA, 439 bp, Homo sapiens
ggtcgacggagaattgagcagagaaattggtagagacattcataaatctaataaggcatgactatgacaataatagtgatgatagttaatgggagtggcgggcaaaataagttagaaacaattactcataatccactacaatattcaaagacgggacactgaaaggtcatagagggagaaataatgtgtatagagaaagtggggggaaaagtggagacacagcaaaagacctgtttattagagcaatgcaattttcactccaatagctaccttcaccagaatgcttctcaaaatgatgcaaaagactgcgacaacaggccgggcacagtggctcacgcctgtaatcccagcactttgggaggccaaggctggcggatcacgaggtcaggagatcgagaccatcctggctaacatggtgaaaccctgtctctactaaaaa

SEQ ID NO: 35288 - DNA, 2365 bp, Homo sapiens
aacttagtgcggacacccgatcggcatagcgcactacagcccagaactcctgggttcaagcaattctcctgccttagcttcctgagtagctgggactacaggcacgtgccaccatgcccagctgatttttgtacttttagtagaaacggggtttcactatgttggctggtcttgaactcctgacatcaagtgatccgcccacctcggcctcccaaaaagtactgggattacaggcatgagccaccacgccaggctggtagcagtctttcctagaatgtggatgccttggaaaacaggggctctgccttgtttccctataacctagaatggcatctggcacacagcagatgctacatctattgtaaatgaatgaatgaaagaagtgtccttgcagccacactggcagccataacatagtggttataaatctagactctggagtctcaagtgcaaatgtcattggcctctcctccagcctcctcaaggggcactcaatgactggaagcgccctgatatgactgtggttagactgacatgactgccagatggtgggacttggtctggagcagagactacttggaatggtagaggcaaaactcaacagcccctggagctgcgcttgtggtggagctggaccctgattttagctggaccttgtttttagagacagggtttccttctgcagtctcaatctcctagccttgattgatcctcctgccttggcctcccaaagtgctgggactacaggtgcatgcaaccacacctggctaattttcttctcttctttctttctttttttttttttgatggagtcttgttctgttgcccaggctggagtgcaatggtgccatctcggctcactgcaacctctgcctcccgggttcaatccattctcctgcctcagcctcccaagtagctgggactacaggtgtgtgccaccgtgcctggctaatttttgtatttttagtagggacgagacttcaccatgttggccaggctggtctcgacctcctgacctcaggtgatccacccaccttggcctcccaaagtgctgggactacaggcacatgcaaccacgtctggctaattttcttgagtttcagtagagactgggtctcgttatgttgtccaggctggtcccgagctcctgagttcagtcgatcttcctgccttggtctcccaaagtgctgggcctacaggcgtgagccaccatccccagcccaatttttgtatattttgtagagacacagtcttgctatgttgtccaggctggtctcaaactcctgggctcaagggatcttcttgccttggcctcccggagcacttaattacaggaatgactgcatgtgctgttgtgcctatactttctggagatacgttgttaggaatttatgtagttggccgggcacggtggctcacgcctgtaatcccagcactctgggatgccgaggcaggtggatcacctgaggtcaggagttcgagaccagcctggtcaacatggtgaaaccctgtctgtactaacaatactaaaatcagaggttgcttgcagtgagccaagatcataccattgcactccagcctgggcaacagagcgagactctgtctcaaaaaaaaaaaaaaagaaaaaaaggaatttacatagttgaacaactattctttggacatcttttagtccagtagacggtgttaaacttgaagacaaataacgatttgacctgtgatatttgtttttccctcttatcttctaagcccattcatccagatcattcatcacctttaaaggcatccccaaagggaggcaggtctggacagagctgaagattgcacaggccatttgcaggctggattcgttctctggtgacccacctgtctgactcgaattatttttttcccatgtctggacaagactgacctctgcccagcaactgaggcctggatttagtccaagggccctcagtggcttttttgtttgtttgttttttcaggaagtgaagaatttagagggataaaaggcggaaataacttttcagcctctgacctttgtaacaatctggtttccttttaaaggagcattgtttgggcctggggccacctagaccttctgatgctctttccccacccttggaggaggaggaaaggaagaaaatgggccctgagcgatcaccacataccaggccctgggggtctagtggcgaaggaggcaggtagggtctcttgctttcatggagcttctagtcaagcgagacgcactaaacagtaaagggacaaataggattactggaggtagccctaactactgggacagaaacaagatggtaagatagagaaggaagagtggcctgctcagatggggtggtccagaggc

SEQ ID NO: 35289 - DNA, 2215 bp, Homo sapiens
aacttagtgcggacacccgatcggcatagcgcactacagcccagaactcctgggttcaagcaattctcctgccttagcttcctgagtagctgggactacaggcacgtgccaccatgcccagctgatttttgtacttttagtagaaacggggtttcactatgttggctggtcttgaactcctgacatcaagtgatccgcccacctcggcctcccaaaaagtactgggattacaggcatgagccaccacgccaggctggtagcagtctttcctagaatgtggatgccttggaaaacaggggctctgccttgtttccctataacctagaatggcatctggcacacagcagatgctacatctattgtaaatgaatgaatgaaagaagtgtccttgcagccacactggcagccataacatagtggttataaatctagactctggagtctcaagtgcaaatgtcattggcctctcctccagcctcctcaaggggcactcaatgactggaagcgccctgatatgactgtggttagactgacatgactgccagatggtgggacttggtctggagcagagactacttggaatggtagaggcaaaactcaacagcccctggagctgcgcttgtggtggagctggaccctgattttagctggaccttgtttttagagacagggtttccttctgcagtctcaatctcctagccttgattgatcctcctgccttggcctcccaaagtgctgggactacaggtgcatgcaaccacacctggctaattttcttctcttctttctttctttttttttttttgatggagtcttgttctgttgcccaggctggagtgcaatggtgccatctcggctcactgcaacctctgcctcccgggttcaatccattctcctgcctcagcctcccaagtagctgggactacaggtgtgtgccaccgtgcctggctaatttttgtatttttagtagggacgagacttcaccatgttggccaggctggtctcgacctcctgacctcaggtgatccacccaccttggcctcccaaagtgctgggactacaggcacatgcaaccacgtctggctaattttcttgagtttcagtagagactgggtctcgttatgttgtccaggctggtcccgagctcctgagttcagtcgatcttcctgccttggtctcccaaagtgctgggcctacaggcgtgagccaccatccccagcccaatttttgtatattttgtagagacacagtcttgctatgttgtccaggctggtctcaaactcctgggctcaagggatcttcttgccttggcctcccggagcacttaattacaggaatgactgcatgtgctgttgtgcctatactttctggagatacgttgttaggaatttatgtagttggccgggcacggtggctcacgcctgtaatcccagcactctgggatgccgaggcaggtggatcacctgaggtcaggagttcgagaccagcctggtcaacatggtgaaaccctgtctgtactaacaatactaaaatcagaggttgcttgcagtgagccaagatcataccattgcactccagcctgggcaacagagcgagactctgtctcaaaaaaaaaaaaaaagaaaaaaaggaatttacatagttgaacaactattctttggacatcttttagtccagtagacggtgttaaacttgaagacaaataacgatttgacctgtgatatttgtttttccctcttatcttctaagcccattcatccagatcattcatcacctttaaaggcatccccaaagggaggcaggtctggacagagctgaagattgcacaggccatttgcaggctggattcgttctctggtgacccacctgtctgactcgaactcctgtctcacgtgtctgtgtgaagagaccaccaaacatgctttgtgtgagcaacatggctgtttatttcacctgggtgcaggcgggctgagtccaaaaaaggagtcaacaaagggtggtgtgattatcactggttcttataggtttggggataggcggtggagttaagagcagtgttttgggggcaggaggtggatctcataaagtacattgtcaagggtgaggagaattacaaagaaacttcttaagggtgggggagatgataaagaaccttcttaagagtggggcagattacaaagtacattgatcagttagggtggggcagaaacaaatg

SEQ ID NO: 35290 - DNA, 496 bp, Homo sapiens
ggaggcaacgtggggagtcaggcaggcttgacgtcacatcctgcttctgccactcttactagactggggaatgcttagtaaattattggacttctctgagcctcaatttcctcacctgcaaaatgaaaatgatgccacatatcttacagggtagttgtgcgctttgcatgagatgatgcctggcatatatccatggatttttaaagttctttcacatgcctgccttcagatgtggactcctataataaccaatggttgtcaatgtgttccctcccaaaagcacctaattgttgcacatcagatacctgataaggagttaatatctagaatatacaaagaacccctataacttaataacaacagcaaaaccagatgtaagtatgggcaaaggacttgaacagacatttctccaaagaagatatacaggtggccagtaagcacatgaaaagatgctcaacattgctcattagagaaatgaaaatggtggttactatcc

SEQ ID NO: 35291 - DNA, 560 bp, Homo sapiens
cttgccgtaaacctagaacattttgtgccatcagtttatgcatttgctgcaattccaggacaatggggaaaatcctgttttatactaacaacaacaaccatgaaactatactactagtagctgacatttactgacttcttattaaatgccatgcatggtactgagagccttacaggcattacctcctcaaatcctcaggactatgaaatcatcccttattatctctattttccaggtaagaaaattaaggtcaccggctattctgtagtagagccagaattcaaacctggagtctgccttttgaggtactagtggtgttttccccccagattatgtattttgggcattgatactactgagtttccatctttaggtgcatcttcgctggtatcaattggaggaactggagaagatgcactggcgctgtgagacagaagtcattctcagccaggagtgtcattttctccttggagtctctaacttcaggattctgtgatttggccataaataataaatatggtttagtagaggttaataaaatgtttgttgaattactgcca

SEQ ID NO: 35292 - DNA, 434 bp, Homo sapiens
  misc_feature (261)..(261): n is a, c, g, or t
  misc_feature (424)..(424): n is a, c, g, or t
ccactgggtggtgtggggctggtttcccctaacaattcccccaccaaataaagcagctcccaaccttcctagatggttgcctcagctcagaagtccttagagaaattctgatgccctctcctcacatttgctctgtcggcaaatccctggtgtcacaagagggctcaggagggtttctggatgccaacgagaccccagccacagccggtccccagattcttgacatcatcacaagaaagaattcacagatggtgcacaagnaagtctcgccagatgctggtcttgtgatcttggacttcccagcctccagaactataatggctgctccatcagcctggttcttggaatgaggatgacataaggtagagtcccagctgaccaacagtggagatgtatcatgagcaagaaataaacctttctaatnttcagccact

SEQ ID NO: 35293 - DNA, 823 bp, Homo sapiens
ccactgggtggtgtggggctggtttcccctaacaattcccccaccaaataaagcagctcccaaccttcctagatggttgcctcagctcagaagtccttagagaaattctgatgccctctcctcacatttgctctgtcggcaaatccctggtgtcacaagagggctcaggagggtttctggatgccaacgagaccccagccacagccggtccccagattcttgacatcatcacaagaaagaattcacaggtgagtcagaatgaagtgaaatgcaagaagcttttattggaaagcaaaagtctgcacttaagagagaagtgggtgcatgctcgtgagaacgagtcacgcaaacagagtttgggtttctaattttatttggtgtttctttaattagggggtggaataatcattaggtattctggaaaaggaggggacttcagggacccctgaaattgcccatgctagagtgttgtggcacaatcctagctcactgcaaccttgacctcctggccttaagtgatcctcctgcctcagcctcctgagtagctgggactacagacgtgcaccactatgcctggctaacttctaaaaatttttagtagagacagggtctcattatgttgcctaggctggtcttgaactcctggcctcaagtgatcctcccaccttggtgggagcctgcaattacaggcatgagccaccacacccggcttctgctttattattttccaaagcactcgtccctgcctgacacattatagatgcatgtgtgtcttgtctctacaatgtgggctcccagagggcagggactttgctctgttctg

SEQ ID NO: 35294 - DNA, 653 bp, Homo sapiens
catcaattacaacacagttttacctaaggaaaaaatacagcaatattcgttaaaagcacacagtttttatggtatatacaaggagcaaaacagaactttttggtggagtataactcatatgttcacaagcaaaaccttcaattgtaaaatagcacacaccacccagtgaacagacatagaaaaagtgttaaagtcaacatgaccattactcaagtctctttccaagaggcaaaaggaattttgtagctacacaaggttatacttgacatactgctaaagaggacccagaatcttcaccaacttccattactgtcctccacctttgacaaaactgggcagccattctatgaagatgttacccattgtgacctttaatggctgtagcctttggcacagttttactttatactgataataccagcaatataattttctaatattattttccaaggccagaccttgggaagacaaggcacagaaataccatcataaacacacaactggaaacttctaggaatcaaaatagtagaggatgctgaatgtggtggcttgtgcctacaatcccagctacttgagaggctgaggtgggaggatcacttgagcccaggagtttgagaccagcctgggcaacacagcaagatcctgtctccaaa

SEQ ID NO: 35295 - DNA, 405 bp, Homo sapiens
aggctggacaggcctgctgtccccaaaccccatgggctcatttcacctgtgactccagcctcaacctgctaaggagctcacattctccagtcacttcctatagacttctggcttcctgtcaggcatataacaagcttgaaatttgtcactggtttctaacgctaagtaaaaagctgaacaaactcaaaagtcaacaacttgttaaaatccctcagagatggctgggcactccatctctgagtggactcttgaccccatcctcactcatgacgccatcctcaacctgctatggagctcacattctccggtcactttctagagagttctagcttcctgacaggcgtataacaagcttgaaatttgtcactcggttctaacactaagtaaaaagctgaacaaactcaa

SEQ ID NO: 35296 - DNA, 342 bp, Homo sapiens
gttaagagtttgagaacgtttgctgttggttggaaatagaccatggttatttcatcttatttttttcttcacattaacatagagaagttttctataaatttgtaaggtcatacatatcctatcctgtgagatagagtgaatcctaaattgtaaatatttttatttagagacaaattggaaaggcataacaaaacaaataagaaattatctcgggctcctgacaaatgtttgaattgtatccttggaattcattttgtcaaacatttactcatccttgtattggtattgacttgtcactttcatttattatagaaaaaaataaaatctcagttcataacagga

SEQ ID NO: 35297 - DNA, 1070 bp, Homo sapiens
cattagttcaaactgccttctttgagcaaaacttgattggcagtgataaaggcttaaagcccttctcaagcagagacctgtaaagactagatctgactgtagtagaaggaaggaacttagatgtttcaggcagtgagaacaccagtcttccactctaaactttgccactaacagtatgaccttgggaagttgtaactttcttcagattcttcatttgttgaatggggggattggcctagctaatttctaaatctctactgggctaaaaaattctgtgcttatactctgattatgaagtacataatctgtgcttaacattcactgacttatccttaggataatacagaagcagtacaagaaacagcccctcaagatgtttgcagtctggttagaaagacaaacttatacacagaacagtagcaaatagaccaaaataataatagctgccatttatagaacacttcttctgttctgggcattagacaaaaactgactataacggtgaacaaaaaagacttaggtcctgccctcattgaacttacagattagtaggggagaggaacattaatcaagtaattccacagatggcttagcctagattggtagtgatggaagtaaagagatgtgaacggacttgaaaaaaaattcggaggcaaaatggatagaagtttattattgattaaatatgaggtgtgagagagagggatatttaagattgatacctaccttctggcttgcctaacagaaccaaaacaggaaattatatgttcagttttgttatgttgggtgggaggtgcttttgagtcattcatttatatatgttatatatgttattttatatgcatagtaattttaaggtctgagttttaaaccaaaggttagagagtgattttttagagtctagcaaacctaagttgaaatcctgcctgttgaaatggctgtttactagctcattaacctagggcaaagtattcaacttgttttcatttttgtcttcatctctaaaatgaggaaaatatggtcttacaagattgtcctgagagatagatgaaataatatccaaaaaaaaa

SEQ ID NO: 35298 - DNA, 1587 bp, Homo sapiens
gaggttgtggagcttctcccctgcagagagtccctgatctcccaaaatttggttgagatgtaaggttgattttgctgtacaactccttttctgaagttttactcatttccaaaaaggaaggcaagttttcctgcttccatgacgatggagagcaggcatctcctttcctgagtttcagcttgcttctgacagggaaggtgagtgtaagttttttccagtttctaagatggcagagaacgatcaccagcctgagccttatttccaggtaagtagctgaattagagttttgtcttaaaatttttccttaatgaataaaatgtaagattacccaccagctgcttttaatttctccttagcattagaacactcagtaatcatatgaattgtgcatttgtttgttttgcttaactctttctgtttgtttatgtttggggttttattgttgttgtttcacttttctcccatctcttcctgacttggtcaaatccaaaggaatcttccaaattgtggggagcaaggcatctgaaatggctaaaactcctgtggctgcaaaaatagactcaacaagtttccaactaaccacccgaatgcaaccagacaaaagcacgaaagcaaaggaaaaaacccaataaatagagacgtggcgaacaaccacgcacacaaaatcaagcagcacaaaaaagggtgggccgccgcgaaactatacaactgttgggcccgagaagaaacgacagcctcacaccggcagtggttccaaagcggggctcaacgtgttactgcccacccgacaccagcaacaagcacgacagctcgcaccacaccaggagagcagagacagcggcaaggacaacacgcgagcggccaaggcgccgaccagcgaagaaacaaacaaccccagagagacacacagaagacgcagagacaagaagcaaaatcgcgacccgcgcagagacgcgacacgcgcacgcacggacgaagacagggaacggaaccgcagagcaagcacgaacacgacacacagcaagcagccaacggcggccgcaacaagggagccagcagcgggagagaaaggagagggaggacgccgaccccgagcacgaaccggagaaccccaccaggcaagacagagagaagcgagcgagacagaaggcagagagggtcgcgacggagcgcgggaagcgcgcagaccagagcgcgagagagctagaaagcccgaggacagcgggcagacggccaggcgagcagaagcacagacggacgcgcgagagaggagcagcgaaagacggccaagaggcgtagcgagcggaggcagaaggcgaagccaaaggagcagcagcaccgaagcgaaagacagagacacgaagactgacgagcagaccagaacgacgaaacgcaaggagcacgagagaggacgagcagcaggccgagccgagcagggagcggaacgcaggagcagagaggaaggcaggagcagcaaccagcacaaacggacagagggcggagaggacgaccagcacgacggcacagggggagacgcgaggacggcgcgaagcgacagcacgggcgcacgtaaagaacagaagcggt

SEQ ID NO: 35299 - DNA, 1894 bp, Homo sapiens
  misc_feature (1785)..(1785): n is a, c, g, or t
  misc_feature (1841)..(1841): n is a, c, g, or t
aaaactccacaagcccccaaagcgccaccacctctgctgtgttggaacatccacatctccaacagacagacctctgtgttccggagacaccgtgcaggatctgagtgtgtttgttatccaacgggtataagagggaaatcaaacattctttcatatcattagaagccctgtgcaaacacagccccgtgcacaaaggcctttcccgagcccataacaaggaactgtttgtcctggctgcctgtctttagcagtcggagcagggccaagccgacagtggtgtcatgggccctactgcgattttgctttcttggaccaaaattttacaggtgtcatgggacagagctcaccaggtagaagttgaatcagatcacctgctgggaaccttcagtaaatgccacactgcacaagctcggagctgtgatggaacctgacaaagagcttgcacccaaccacagaaaagtcaaatgatcattttgtacatttgcctttgtgcacgggaattgactagccacacatgccggcagccgggactcgtgtctgcctgcaaatgatgtaaccaaagagaaacctgggctcaggatcaaatgtcttcatcctcactcccttgaagaacacagacttaaccctgcagcatctgaacactatcgaggggttggtttcttcacccaagagcattttgatcagttcagcccagacccatatgtttttctggctgctgggattcattgagtccatttattctgtctcctagagtggcactgtccagtccatttgcctcatgctgcacgtggctgttgagcccctgaaagtggctagtctgaattatgatgtgctgtaaggataaaacgtgctttggatttggaaagtttagcacaaaaaaaaaaaaactgtaaactatctcattaataattatattagctatatgttggaagtatttttatctattgggttaaataacatacagtattcaaactcatttcacctgtttctttttacttcttttaatgtagctgctggaaaatttaaaatcacaaatgtagctcgtattgtttgtattagacagggctgggctagtgcttgaaggaagtttaggtttgtagtgccatctgctggctcatccggagcagacgtgaatgtaaacaagaatgaagcaatctgagctaacccacacgttgtctcttagcctggcagcacacaacctttttattccaggagcttctgaagcaggaccagactgaacccagaagctgctgaatccccaagagcctcgggaaggggagtgacaaactgctcaaaggtgcaagcctgtgtcacctcatgggtgccaaggaggctcttgagatagagtagtggtttgctgctcaccttccgcacttggggctctttcatgcagtctttttcactggttgctattcttaagaaatatttcaggccaggcaccatggttcacccctgtaagcccagcattttgggaggccaaggcgggcggatcacttgagaccaggagttcaagaccagcctggccaacatggcaaaaccgcatctctactgaaaatacaaaaattagctgggcatggtggtgcacacctgcaatcccagctactcaggaggtgaggcaggagaatcgcttgaaccagggaggtggagtttgccgtgagtcaaaatcgtgccactctactccagcctgggtgacagaccgagactccatctcaaaagaaaaaagaaaagaaatatttcaggccaggaatagtggctcccacctgtaataccaacactttgggaggntgagtagggagaatcacttgagcccaggagtttgaaaccagcctgggcaacattgngagacttcatctctttttttccccttctctgtggcgcaagacctcatctctac

SEQ ID NO: 35300 - DNA, 364 bp, Homo sapiens
ttcttagactcttggaatacttcatttcctgccctctcgctttctccaatctcatgttctgctaatttttatttgtccttaaagtcttcgttttcttagggcagcacttcagtgaaatctttcataattcccttcccccagatattattttaggtgcctcctgttttttttctttctttctttctttcttttttctttttctttttttggtagcttaaacaataagacctttattgttacaaaacccagcagcgtgaggagttcctgggttgggtgaattagaggctggaaaaattcatcgcaagcattacaagataaccaatgatacccctgatgaaagaaaacctctgcaaactgctagctg

SEQ ID NO: 35301 - DNA, 376 bp, Homo sapiens
gtcttttctggttaacattttcacatatgtggactatctgttgctgattatcatgttcccaggtcagcaggaatgcttctagcaatgtggtgtctgctttgtgtgtcctgctgtgtccactgcctgtggtcacttccgccatctgataacatgccagcaccttggcctctgactgcccacctctgcacagcatggatcctcatggaaccattgagaagtgctgacacagagggctttccaaggtctttggggctgcttgtggtgcagctggtagcatgggttggtgctcatgaaactgtccagaggaccaggatatatcctcttccttagtgtgtactttaacatattcttttggatatggagcttaggactgctc

SEQ ID NO: 35302 - DNA, 203 bp, Homo sapiens
atctggctcatggaccctaaaaactgtgttctgaaggagaagagtgtcatgagatggcccatttgctcacaggacagcagcgttacaaccccaagacgccatggcccccatccccaagcagggagtccccagatagtgttgtgaaggagtcaaccagttccggagatggaggctgagctactgtgaggtcagtggccccagct

SEQ ID NO: 35303 - DNA, 518 bp, Homo sapiens
cccaaagtgctgggatgagccactgcgactggccccacttaatgggttttcagaggtgggagcaaagaatgaagggaggaagagagctcccatcttttccattactgtatttacttaaaactggaaaaaactgaatcactgggatggtatttcatttatcttttgaaatgaagaatagatacattaatttaaatgattctctaaagactgtccttcagcatccctaaagcatttcaacactataggcacagtttttattttatctttctggcacctggtttgggctttgggcttagattaaaaagacgagccttctcctgcccctgctcccttttattctctgccatctgctaagctcgactttttatctctcaggccaaatttgactctgcaagggactttgcataacgtttcatcctcagaatcgctaatgatgggcagaggactgttacatttgttgggagggattgaagtatatgacctcagtgccacttaaaaaataaatactgtctcaacta

SEQ ID NO: 35304 - DNA, 581 bp, Homo sapiens
tacacttgaatgaaaaagaatgtacaggtgcacatgaatacagtttgattgtgggtgtatattatatccttatgacctaatttctctttttcatttctcccacaaatgatcctgttctcagacacattctcccttgggccacaatagagctgccactgctcctcataccctctcagcttcaaatttatgaactctcaatgcaggtttcattggttcccactaggtaacattctcattcctaaatcaatcccctgggaaatgcaattcagtaatgggtttaagtctggtcttaggttccgcacctgccgtatggcagtggggtgatggctatccatgcttgaacattcctggaatgttctccaagcaaaagctcagagaaatgaaggtcatgttcagggaacagtgaggtcagaataaaattgggatgaaaggcgagggtcagattaggaaatatctgaaacttcagcctaagtaatgtgccttcaaggaagctatagattgtaaaaattaaaaatatataccaggataaacaaactatggtacatccatacaatagaatattactcagcaaaaaaaaaaaa

SEQ ID NO: 35305 - DNA, 716 bp, Homo sapiens
ttttgtagagatggaggtctcactgtgttgtcccagctggtctctagcttctggcctcaaaggatcctcccgccttggcctcccaaagtagtggaattacaggcatgagcactgacccctgctgagccaggctgttttcaacattcaatggtcattgactatctttggcgtttaggagggccctccagggaccaggcgtaggggcatcagtcaccccgccctcacaccccaacctgcagccacacttggttcaatcccactgtctagcccgtctgactcagtagcccctcccgagggagcagggctaagcaaagctggtttccccactgcaaggcactgcaggccattctattctgggccttctcatccttcataaagtgaggaggcctgaacagggctccccactaaccctgagagcgcacaattcctgaagatttccaggattttcttagtatcagttatggcttaaagttatgttggtttcacatttccagggtttgtcaaccctgtcagatttaaagataagcattattagccaggtgtggccccatgcttgtagtcccagctacatcggaggctgaggcaggaagatccctccaggccgtgagtttggggcagcaatgaactgtgattgcatcactgtgctctagaccaagtgacagagcaagactcagtctctaaacccccctcccccaccactcaaaaaaaaaaaaaag

SEQ ID NO: 35306 - DNA, 483 bp, Homo sapiens
tgtaactcagtaagaaaccagctggagcagcaaagggagtgtcatccctcccccaactctggcaacacagctcacaattctgggagaattcctccagcttgaggaaaagagagagaagagtaaagagaactttgtcttgcaacttcggtaacagctcagccgtagtacaataaagcacaaatctaatccataaagaccccaatactaggacatagctcccagatgacatttctagactcaccctgggccagaagggaacctgcggccctgaaatgaaagacctaggcgtggcaggattcagtacctctgactaaagagcccttgagcatttgaatatacagcagccatagccagacactagttcaccaaaggccttgggcaagacccagtactgtgctagcctcagctgtgaccaagaagagtcccagcaatggtagtcacaggagggcttgtgacaccccttctccaacttcaggcagctca

SEQ ID NO: 35307 - DNA, 395 bp, Homo sapiens
ctaaaccttggctttctagccgtagaaccttgaggagtggagattacagaaaggagacatctgagttagatatcctttaaatgtgtgtatgaagttctgggctcatccctgagctgcacatgcataaaactgactagaatgagcacagcaaaaccttttgagaattttagaaggaccaagtctcagcataatattcaaaatctgtaggatatgaaccaaaattatccaacatacaaagaaccaggaaagcctaaaaaattctcgaggaaaaaggcaatcaacaaatgccaaccctgagaggattcaaatgttagaattattagacaaagactttaaagcaactattatgccacattctaagaagtaaaaatgagtactcttggaattaatggaaa

SEQ ID NO: 35308 - DNA, 5091 bp, Homo sapiens
  misc_feature (2613)..(2613): n is a, c, g, or t
  misc_feature (2688)..(2688): n is a, c, g, or t
accctgaggggagccgctgaccagcagcatggaggaccccgccgcgcctgggaccgggggcccgcccgcaaatggcaatggcaacggcggcggcaaagggaagcaggcggcgcccaagggccgcgaagcgttccgaagccagcggcgggagtcagagggctctgtggactgtcccactctggagtttgagtatggagatgcagatgggcatgcagccgagttgtcagaattgtatagttacactgagaacctggaattcaccaataacaggaggtgctttgaagaagatttcaagactcaagtgcagggcaaggaatggctggagttggaagaagatgcccaaaaggcctatataatgggactcttggaccggctagaggtggtcagtagggaacggcggctgaaggtggcccgggctgttctctacctggcccaaggtacttttggggaatgtgattcagaggtcgatgtgctacactggtccaggtacaactgcttcctgctgtatcagatggggaccttctccaccttcctggagctactccacatggaaattgacaacagccaggcctgtagcagtgcccttcggaaaccagctgtctccatagctgatagcacagagctcagggtgctgctgagtgttatgtacctaatggtggaaaatattcgcctggagcgagagacagacccctgtgggtggagaacagcccgggagaccttccgcactgaattaagcttctccatgcataatgaggagccttttgcccttttactcttctccatggttaccaagttctgcagtggcctggctcctcacttccccataaagaaggtcctgctcctgctctggaaggtggtcatgtttaccctcggtggatttgagcatctgcagactctcaaagtacagaagcgggcagaattgggcctgcctccactggctgaagacagtatccaggtggtgaagagcatgcgtgctgcctccccgccctcttacactcttgacctgggagagtctcagctggcacccccaccctccaagctgcgaggccgccgtggctctcgaaggcaactcctcactaagcaggacagcctggacatctacaatgaaagggatctcttcaagactgaggagcccgccacagaggaggaagaggagtctgctggtgatggagaacgaaccttggatggagagctagacctgctagagcaggaccctctggtgccacctccaccctcacaggcacccctctctgctgagcgggtggcttttcccaagggcctgccctgggccccaaaggtcagacagaaggacattgagcacttcttggagatgagcaggaacaagttcatcggattcaccctggggcaggacacagatacattggttggattacccaggcccatccatgagagtgtgaagaccctaaagcagcacaagtatatctccatcgcagatgtgcagatcaagaatgaagaggagctggagaagtgccctatgtctttgggggaagaggtggtaccagagacgccatgtgaaatcctctaccagggaatgctgtacagccttccgcagtatatgatcgctctgcttaagattctgctggctgcagctcccacctctaaggctaagacagactctatcaatatcctggcagatgtcctacctgaggagatgcccatcactgttctccagagcatgaagctgggcatcgatgtgaacaggcacaaggagattattgtaaagagtatctctaccctgcttctgctactcctcaaacacttcaaactcaaccatatctaccagtttgaatatgtatcgcaacatttggtatttgccaactgcatccccttgatcctgaagttcttcaatcaaaatatcttgtcatacatcactgccaaaaacagcatctcagtcctggattatccttgctgtaccatccaggatttgccggagcttactactgaaagtctggaagctggagacaacagccagttctgctggaggaacctcttttcctgcatcaacctcctgaggctgctcaataaactgaccaaatggaaacattcccggaccatgatgctggtagtgtttaaatcggcaccaatcttaaagcgggccctcaaggtcaaacaggccatgctgcaactttatgtcctaaagctactaaagttacagaccaagtacctggggcgccaatggaggaaaagcaacatgaaaaccatgtcagccatttaccagaaagtgcgtcaccgcatgaacgatgactgggcttacgggaatgacatcgatgccagaccatgggacttccaagcagaagaatgtaccttgagggccaacattgaggcttttaacagccgtcgctatgacagaccccaggactctgagttttcacctgtggataactgcttgcagagcgtactggggcagaggttggatctgcctgaagatttccactattcatatgagctctggctcgagagagaggtgttttcacagcccatctgttgggaggagctgctccagaatcactgactaagttcttgtcaacaagcatcaatagatagaggtcagctccaataaactgtgctctgcctaccctgtccatacaggcnctgttaccagttcagggctcttctgggggctcttgggcctaaagatggtgcaagggtgggatcctgaatcacaanaaaatgatcaacttgccctggggtcagttgggtgcccagttggccttggaaatcttttggtggatcaattctagacaagctctttggtaggaccttttcctgctttagtcttggctacaaccaggctagactttgctggctctaaaagaggaaatttgttatggcatttgacccatggcattcatcacagatagtgggaggtacaagtcataaaatagggagaaagttttcttcttgctcacactggattcctaggacttatcagagatttggaaaaaccaactttgaaattaagtttgcattttaaatttcaaatttggaagcctctttctgaaatcattagctctaagattattttagagcacctgcaccttctttgtgaaggatgatgatttactattccctcaatactgcatgttatcgaaaagtgtgttgtgtaaagtgtttttttcctcattctgtaagagatctatattcaatgtgaaaattatttccttgtgtactctgtatagggcatggaatgctctgccatttttaaagagccacaaccaatatgaaataattaggtcctctctaaggatgtttcatgtttttcttaaatgactccagtcttcaaatggctgagcatactgcagaaaattatccttttcatctaattcattttttaaatgacaagttaactacaggaggctttattcagatggtatgtccacttgtggtcgtgatcaatatatttttctaattgaaaagtaaaagcatcacagcttaccatttttctttttctgcagtgttgattaatgatttttttcccgtttattgctagcagtttcaaagtgtcatgtggagatttagcaatactgtctctacttaaaagtattgcacatttcattgaaaatgtgagagttgatataccagcctctttatatttctcttttacagcagaatcacatacttctcaagataaacaaggtttttaaaaaagtttctgatttagttaggatcatatgctttttttttttttttttttttttttgagacagagtttcgctcttgttgcccaagctggagtgcaatggcacgatctcggctcactgcaacctccgcctcccgggttcaagcgattctcctgcctcagcctcccaaggagctgggattacaggcacgcaccaccatgcctggctaattttttgtatttttagtagaaacagggtttcaccatgttagccaggctgacctcaaactcctgacctcaggtgatccgcccgcctccacctcccagggtgctgggattacaggtgtgagccaccatgcccagcctcttcaagcttttttactatacatgttgcccctctcccccaacttaggcactactgaattttttatgatggcaccaggtcactttatgctgggtgatatagtcaaaatttgcttatttactctgcccctcgtcaaccacagtatcatttcaaggacatgaataaaatacttgacagtatccaaaggagctataccaaaatctaacaagtaaattttggattttgcctctttgtgctttaaagtaccaggatttctgtctctatggataggtcttggagaatgttaagtaatggatgaaactttttaaaataatttgtaaattttacctaagtaggacagtagtccttactgcaatcaaaataatttactgagcacaactcctgtaaattaatctacagtcaggctagtatgattttaatatgatttgagtaaaaagataattttcaaggaaagagtaatcatccatcaatttattataaagccagatagtattcaatttatgtcaagaacaaagaaattgcccttttaaaagcatgtacgtgaatgctttttgaggcacagaagtatgctaagctttaacattttgtatttatttacaacccttttctaagggaaggttacttctcagtgcagatggagaaactgaagcactaaggataaatgattagtttccaatcacatcatttttttccacagacttgctgggactagctttcaggtattgacagccagccccatatattaaggtaaccaggttgaatcttccaatttgagaacccatgtatgggttgcagtgagccgagatcatgccactgcactccatcctgggcaacaagaacgaaactccgtctcaaaaacaaagaaggatataataaagttaatatataaaccatgtatgtggttaggaataaattcaaattcaccagtctccaatggtgattacttttactacatagaaaaacattttagtgacttacagaggatttttatttgtgaatatttcagtaaagtttgtgttgattgttgataacactgttcatctactgaagcactttaataaaaataaaatgagctggaattagaaaa

SEQ ID NO: 35309 - DNA, 353 bp, Homo sapiens
aaccggcccaggtcggaaacggagcaggtcaaaactcccgtgctgatcagtagtgggatcgcgcctgtgaatcatgccactgcactccatcctgggcaacaagaacgaaactccgtctcaaaaacaaagaaggatataataaagttaatatataaaccatgtatgtggttaggaataaattcaaattcaccagtctccaatggtgattacttttactacatagaaaaacattttagtgacttacagaggatttttatttgtgaatatttcagtaaagtttgtgttgattgttgataacactgttcatctactgaagcactttaataaaaataaaatgagctggaattagaaaa

SEQ ID NO: 35310 - DNA, 574 bp, Homo sapiens
atgtgaatgaggccctcagcccttgttgatgtcttcttatctttgtcagcacaagtatatctccatcgcagatgtgcagatcaagaatgaagaggagctggagaagtgccctatgtctttggtgagccaaggaagccctacacaggaggagagtagaagaaaacctgtcttcagtgttgtcacagagcatgtgtgcatgcattcattcagcatattaggctgtaactgtgttccaggcaagacaaggtccctactttcatgatatattgaagttggggaagaaagataaaaaataaaaagttaagtaaaccaaactatcagagaatggtaaataaaaaaaaaaaaagaaaaaacaacacaaaaaaaaccgtgggtggcccgacagtgggacccccgaaaaagaagcttctcgaagaacacacaatagtgatgtgaggccgccgcgaggccccccacgtagagggcacaatgagaacaagtggggcgcccaagaggaggggtacccgaagagaagaagccgcgggccacgaaacaaggaggccgggagaatccccacccagattaaaaaaaggcc

SEQ ID NO: 35311 - DNA, 4215 bp, Homo sapiens
  misc_feature (1737)..(1737): n is a, c, g, or t
  misc_feature (1812)..(1812): n is a, c, g, or t
gaacttcttgtcctgttattgggccgggtggggacagtaggttaaggtggggaattggatgttttcgcaagggctgtgttcagattccatgttccctgaaatgtggaggcctgtggatatggggtggcctcagacaaggatgcccagagtgagatctctgcatgcctaccctcccttctttcccctccagcaactcctcactaagcaggacagcctggacatctacaatgaaagggatctcttcaagactgaggagcccgccacagaggaggaagaggagtctgctggtgatggagaacgaaccttggatggagagctagacctgctagagcaggaccctctggtgccacctccaccctcacaggcacccctctctgctgagcgggtggcttttcccaagggcctgccctgggccccaaaggtcagacagaaggacattgagcacttcttggagatgagcaggaacaagttcatcggattcaccctggggcaggacacagatacattggttggattacccaggcccatccatgagagtgtgaagaccctaaagcagcacaagtatatctccatcgcagatgtgcagatcaagaatgaagaggagctggagaagtgccctatgtctttgggggaagaggtggtaccagagacgccatgtgaaatcctctaccagggaatgctgtacagccttccgcagtatatgatcgctctgcttaagattctgctggctgcagctcccacctctaaggctaagacagactctatcaatatcctggcagatgtcctacctgaggagatgcccatcactgttctccagagcatgaagctgggcatcgatgtgaacaggcacaaggagattattgtaaagagtatctctaccctgcttctgctactcctcaaacacttcaaactcaaccatatctaccagtttgaatatgtatcgcaacatttggtatttgccaactgcatccccttgatcctgaagttcttcaatcaaaatatcttgtcatacatcactgccaaaaacagcatctcagtcctggattatccttgctgtaccatccaggatttgccggagcttactactgaaagtctggaagctggagacaacagccagttctgctggaggaacctcttttcctgcatcaacctcctgaggctgctcaataaactgaccaaatggaaacattcccggaccatgatgctggtagtgtttaaatcggcaccaatcttaaagcgggccctcaaggtcaaacaggccatgctgcaactttatgtcctaaagctactaaagttacagaccaagtacctggggcgccaatggaggaaaagcaacatgaaaaccatgtcagccatttaccagaaagtgcgtcaccgcatgaacgatgactgggcttacgggaatgacatcgatgccagaccatgggacttccaagcagaagaatgtaccttgagggccaacattgaggcttttaacagccgtcgctatgacagaccccaggactctgagttttcacctgtggataactgcttgcagagcgtactggggcagaggttggatctgcctgaagatttccactattcatatgagctctggctcgagagagaggtgttttcacagcccatctgttgggaggagctgctccagaatcactgactaagttcttgtcaacaagcatcaatagatagaggtcagctccaataaactgtgctctgcctaccctgtccatacaggcnctgttaccagttcagggctcttctgggggctcttgggcctaaagatggtgcaagggtgggatcctgaatcacaanaaaatgatcaacttgccctggggtcagttgggtgcccagttggccttggaaatcttttggtggatcaattctagacaagctctttggtaggaccttttcctgctttagtcttggctacaaccaggctagactttgctggctctaaaagaggaaatttgttatggcatttgacccatggcattcatcacagatagtgggaggtacaagtcataaaatagggagaaagttttcttcttgctcacactggattcctaggacttatcagagatttggaaaaaccaactttgaaattaagtttgcattttaaatttcaaatttggaagcctctttctgaaatcattagctctaagattattttagagcacctgcaccttctttgtgaaggatgatgatttactattccctcaatactgcatgttatcgaaaagtgtgttgtgtaaagtgtttttttcctcattctgtaagagatctatattcaatgtgaaaattatttccttgtgtactctgtatagggcatggaatgctctgccatttttaaagagccacaaccaatatgaaataattaggtcctctctaaggatgtttcatgtttttcttaaatgactccagtcttcaaatggctgagcatactgcagaaaattatccttttcatctaattcattttttaaatgacaagttaactacaggaggctttattcagatggtatgtccacttgtggtcgtgatcaatatatttttctaattgaaaagtaaaagcatcacagcttaccatttttctttttctgcagtgttgattaatgatttttttcccgtttattgctagcagtttcaaagtgtcatgtggagatttagcaatactgtctctacttaaaagtattgcacatttcattgaaaatgtgagagttgatataccagcctctttatatttctcttttacagcagaatcacatacttctcaagataaacaaggtttttaaaaaagtttctgatttagttaggatcatatgctttttttttttttttttttttttttgagacagagtttcgctcttgttgcccaagctggagtgcaatggcacgatctcggctcactgcaacctccgcctcccgggttcaagcgattctcctgcctcagcctcccaaggagctgggattacaggcacgcaccaccatgcctggctaattttttgtatttttagtagaaacagggtttcaccatgttagccaggctgacctcaaactcctgacctcaggtgatccgcccgcctccacctcccagggtgctgggattacaggtgtgagccaccatgcccagcctcttcaagcttttttactatacatgttgcccctctcccccaacttaggcactactgaattttttatgatggcaccaggtcactttatgctgggtgatatagtcaaaatttgcttatttactctgcccctcgtcaaccacagtatcatttcaaggacatgaataaaatacttgacagtatccaaaggagctataccaaaatctaacaagtaaattttggattttgcctctttgtgctttaaagtaccaggatttctgtctctatggataggtcttggagaatgttaagtaatggatgaaactttttaaaataatttgtaaattttacctaagtaggacagtagtccttactgcaatcaaaataatttactgagcacaactcctgtaaattaatctacagtcaggctagtatgattttaatatgatttgagtaaaaagataattttcaaggaaagagtaatcatccatcaatttattataaagccagatagtattcaatttatgtcaagaacaaagaaattgcccttttaaaagcatgtacgtgaatgctttttgaggcacagaagtatgctaagctttaacattttgtatttatttacaacccttttctaagggaaggttacttctcagtgcagatggagaaactgaagcactaaggataaatgattagtttccaatcacatcatttttttccacagacttgctgggactagctttcaggtattgacagccagccccatatattaaggtaaccaggttgaatcttccaatttgagaacccatgtatgggttgcagtgagccgagatcatgccactgcactccatcctgggcaacaagaacgaaactccgtctcaaaaacaaagaaggatataataaagttaatatataaaccatgtatgtggttaggaataaattcaaattcaccagtctccaatggtgattacttttactacatagaaaaacattttagtgacttacagaggatttttatttgtgaatatttcagtaaagtttgtgttgattgttgataacactgttcatctactgaagcactttaataaaaataaaatgagctggaattagaaaa

SEQ ID NO: 35312 - DNA, 4911 bp, Homo sapiens
  misc_feature (2613)..(2613): n is a, c, g, or t
  misc_feature (2688)..(2688): n is a, c, g, or t
accctgaggggagccgctgaccagcagcatggaggaccccgccgcgcctgggaccgggggcccgcccgcaaatggcaatggcaacggcggcggcaaagggaagcaggcggcgcccaagggccgcgaagcgttccgaagccagcggcgggagtcagagggctctgtggactgtcccactctggagtttgagtatggagatgcagatgggcatgcagccgagttgtcagaattgtatagttacactgagaacctggaattcaccaataacaggaggtgctttgaagaagatttcaagactcaagtgcagggcaaggaatggctggagttggaagaagatgcccaaaaggcctatataatgggactcttggaccggctagaggtggtcagtagggaacggcggctgaaggtggcccgggctgttctctacctggcccaaggtacttttggggaatgtgattcagaggtcgatgtgctacactggtccaggtacaactgcttcctgctgtatcagatggggaccttctccaccttcctggagctactccacatggaaattgacaacagccaggcctgtagcagtgcccttcggaaaccagctgtctccatagctgatagcacagagctcagggtgctgctgagtgttatgtacctaatggtggaaaatattcgcctggagcgagagacagacccctgtgggtggagaacagcccgggagaccttccgcactgaattaagcttctccatgcataatgaggagccttttgcccttttactcttctccatggttaccaagttctgcagtggcctggctcctcacttccccataaagaaggtcctgctcctgctctggaaggtggtcatgtttaccctcggtggatttgagcatctgcagactctcaaagtacagaagcgggcagaattgggcctgcctccactggctgaagacagtatccaggtggtgaagagcatgcgtgctgcctccccgccctcttacactcttgacctgggagagtctcagctggcacccccaccctccaagctgcgaggccgccgtggctctcgaaggcaactcctcactaagcaggacagcctggacatctacaatgaaagggatctcttcaagactgaggagcccgccacagaggaggaagaggagtctgctggtgatggagaacgaaccttggatggagagctagacctgctagagcaggaccctctggtgccacctccaccctcacaggcacccctctctgctgagcgggtggcttttcccaagggcctgccctgggccccaaaggtcagacagaaggacattgagcacttcttggagatgagcaggaacaagttcatcggattcaccctggggcaggacacagatacattggttggattacccaggcccatccatgagagtgtgaagaccctaaagcagcacaagtatatctccatcgcagatgtgcagatcaagaatgaagaggagctggagaagtgccctatgtctttgggggaagaggtggtaccagagacgccatgtgaaatcctctaccagggaatgctgtacagccttccgcagtatatgatcgctctgcttaagattctgctggctgcagctcccacctctaaggctaagacagactctatcaatatcctggcagatgtcctacctgaggagatgcccatcactgttctccagagcatgaagctgggcatcgatgtgaacaggcacaaggagattattgtaaagagtatctctaccctgcttctgctactcctcaaacacttcaaactcaaccatatctaccagtttgaatatgtatcgcaacatttggtatttgccaactgcatccccttgatcctgaagttcttcaatcaaaatatcttgtcatacatcactgccaaaaacagcatctcagtcctggattatccttgctgtaccatccaggatttgccggagcttactactgaaagtctggaagctggagacaacagccagttctgctggaggaacctcttttcctgcatcaacctcctgaggctgctcaataaactgaccaaatggaaacattcccggaccatgatgctggtagtgtttaaatcggcaccaatcttaaagcgggccctcaaggtcaaacaggccatgctgcaactttatgtcctaaagctactaaagttacagaccaagtacctggggcgccaatggaggaaaagcaacatgaaaaccatgtcagccatttaccagaaagtgcgtcaccgcatgaacgatgactgggcttacgggaatgacatcgatgccagaccatgggacttccaagcagaagaatgtaccttgagggccaacattgaggcttttaacagccgtcgctatgacagaccccaggactctgagttttcacctgtggataactgcttgcagagcgtactggggcagaggttggatctgcctgaagatttccactattcatatgagctctggctcgagagagaggtgttttcacagcccatctgttgggaggagctgctccagaatcactgactaagttcttgtcaacaagcatcaatagatagaggtcagctccaataaactgtgctctgcctaccctgtccatacaggcnctgttaccagttcagggctcttctgggggctcttgggcctaaagatggtgcaagggtgggatcctgaatcacaanaaaatgatcaacttgccctggggtcagttgggtgcccagttggccttggaaatcttttggtggatcaattctagacaagctctttggtaggaccttttcctgctttagtcttggctacaaccaggctagactttgctggctctaaaagaggaaatttgttatggcatttgacccatggcattcatcacagatagtgggaggtacaagtcataaaatagggagaaagttttcttcttgctcacactggattcctaggacttatcagagatttggaaaaaccaactttgaaattaagtttgcattttaaatttcaaatttggaagcctctttctgaaatcattagctctaagattattttagagcacctgcaccttctttgtgaaggatgatgatttactattccctcaatactgcatgttatcgaaaagtgtgttgtgtaaagtgtttttttcctcattctgtaagagatctatattcaatgtgaaaattatttccttgtgtactctgtatagggcatggaatgctctgccatttttaaagagccacaaccaatatgaaataattaggtcctctctaaggatgtttcatgtttttcttaaatgactccagtcttcaaatggctgagcatactgcagaaaattatccttttcatctaattcattttttaaatgacaagttaactacaggaggctttattcagatggtatgtccacttgtggtcgtgatcaatatatttttctaattgaaaagtaaaagcatcacagcttaccatttttctttttctgcagtgttgattaatgatttttttcccgtttattgctagcagtttcaaagtgtcatgtggagatttagcaatactgtctctacttaaaagtattgcacatttcattgaaaatgtgagagttgatataccagcctctttatatttctcttttacagcagaatcacatacttctcaagataaacaaggtttttaaaaaagtttctgatttagttaggatcatatgctttttttttttttttttttttttttgagacagagtttcgctcttgttgcccaagctggagtgcaatggcacgatctcggctcactgcaacctccgcctcccgggttcaagcgattctcctgcctcagcctcttcaagcttttttactatacatgttgcccctctcccccaacttaggcactactgaattttttatgatggcaccaggtcactttatgctgggtgatatagtcaaaatttgcttatttactctgcccctcgtcaaccacagtatcatttcaaggacatgaataaaatacttgacagtatccaaaggagctataccaaaatctaacaagtaaattttggattttgcctctttgtgctttaaagtaccaggatttctgtctctatggataggtcttggagaatgttaagtaatggatgaaactttttaaaataatttgtaaattttacctaagtaggacagtagtccttactgcaatcaaaataatttactgagcacaactcctgtaaattaatctacagtcaggctagtatgattttaatatgatttgagtaaaaagataattttcaaggaaagagtaatcatccatcaatttattataaagccagatagtattcaatttatgtcaagaacaaagaaattgcccttttaaaagcatgtacgtgaatgctttttgaggcacagaagtatgctaagctttaacattttgtatttatttacaacccttttctaagggaaggttacttctcagtgcagatggagaaactgaagcactaaggataaatgattagtttccaatcacatcatttttttccacagacttgctgggactagctttcaggtattgacagccagccccatatattaaggtaaccaggttgaatcttccaatttgagaacccatgtatgggttgcagtgagccgagatcatgccactgcactccatcctgggcaacaagaacgaaactccgtctcaaaaacaaagaaggatataataaagttaatatataaaccatgtatgtggttaggaataaattcaaattcaccagtctccaatggtgattacttttactacatagaaaaacattttagtgacttacagaggatttttatttgtgaatatttcagtaaagtttgtgttgattgttgataacactgttcatctactgaagcactttaataaaaataaaatgagctggaattagaaaa

SEQ ID NO: 35313 - DNA, 2780 bp, Homo sapiens
accctgaggggagccgctgaccagcagcatggaggaccccgccgcgcctgggaccgggggcccgcccgcaaatggcaatggcaacggcggcggcaaagggaagcaggcggcgcccaagggccgcgaagcgttccgaagccagcggcgggagtcagagggctctgtggactgtcccactctggagtttgagtatggagatgcagatgggcatgcagccgagttgtcagaattgtatagttacactgagaacctggaattcaccaataacaggaggtgctttgaagaagatttcaagactcaagtgcagggcaaggaatggctggagttggaagaagatgcccaaaaggcctatataatgggactcttggaccggctagaggtggtcagtagggaacggcggctgaaggtggcccgggctgttctctacctggcccaaggtacttttggggaatgtgattcagaggtcgatgtgctacactggtccaggtacaactgcttcctgctgtatcagatggggaccttctccaccttcctggagctactccacatggaaattgacaacagccaggcctgtagcagtgcccttcggaaaccagctgtctccatagctgatagcacagagctcagggtgctgctgagtgttatgtacctaatggtggaaaatattcgcctggagcgagagacagacccctgtgggtggagaacagcccgggagaccttccgcactgaattaagcttctccatgcataatgaggagccttttgcccttttactcttctccatggttaccaagttctgcagtggcctggctcctcacttccccataaagaaggtcctgctcctgctctggaaggtggtcatgtttaccctcggtggatttgagcatctgcagactctcaaagtacagaagcgggcagaattgggcctgcctccactggctgaagacagtatccaggtggtgaagagcatgcgtgctgcctccccgccctcttacactcttgacctgggagagtctcagctggcacccccaccctccaagctgcgaggccgccgtggctctcgaaggcaactcctcactaagcaggacagcctggacatctacaatgaaagggatctcttcaagactgaggagcccgccacagaggaggaagaggagtctgctggtgatggagaacgaaccttggatggagagctagacctgctagagcaggaccctctggtgccacctccaccctcacaggcacccctctctgctgagcgggtggcttttcccaagggcctgccctgggccccaaaggtcagacagaaggacattgagcacttcttggagatgagcaggaacaagttcatcggattcaccctggggcaggacacagatacattggttggattacccaggcccatccatgagagtgtgaagaccctaaagcagcacaagtatatctccatcgcagatgtgcagatcaagaatgaagaggagctggagaagtgccctatgtctttgggggaagaggtggtaccagagacgccatgtgaaatcctctaccagggaatgctgtacagccttccgcagtatatgatcgctctgcttaagattctgctggctgcagctcccacctctaaggctaagacagactctatcaatatcctggcagatgtcctacctgaggagatgcccatcactgttctccagagcatgaagctgggcatcgatgtgaacaggcacaaggagattattgtaaagagtatctctaccctgcttctgctactcctcaaacacttcaaactcaaccatatctaccagtttgaatatgtatcgcaacatttggtatttgccaactgcatccccttgatcctgaagttcttcaatcaaaatatcttgtcatacatcactgccaaaaacagcatctcagtcctggattatccttgctgtaccatccaggatttgccggagcttactactgaaagtctggaagctggagacaacagccagttctgctggaggaacctcttttcctgcatcaacctcctgaggctgctcaataaactgaccaaatggaaacattcccggaccatgatgctggtagtgtttaaatcggcaccaatcttaaagcgggccctcaaggtcaaacaggccatgctgcaactttatgtcctaaagctactaaagttacagaccaagtacctggggcgccaatggaggaaaagcaacatgaaaaccatgtcagccatttaccagaaagtgcgtcaccgcatgaacgatgactgggcttacgggaatggtgagtcttcccaaagctcttgacttcctggagtttcctggggtttagacaaaactaaataaatatttatcactcctcttttggcatgaattgttacatattttagatgaaaaaatatgtgattataggtcaggcgctgatacaccaaactttaaggttatgcctcaaattctagtatgtacccttgtcctatgtaaactatgaaaatccgttttataaaacaagtaaattgagagataattaattgcctttccaaaacattcttttaaatgacagctttctccaaaagatttaaattaaaacaactttttattattacaaagcagttagaaaaaaagatagaaaatacaagtaaacaaacattttactatattatatttatgccatatttgtactatgcagaaattgccaccattaacatcttattgtatattcctccagatctttttctatgcatatacatgcatattttatcaaaatgaaagcaagttatgtatg

SEQ ID NO: 35314 - DNA, 1957 bp, Homo sapiens
accctgaggggagccgctgaccagcagcatggaggaccccgccgcgcctgggaccgggggcccgcccgcaaatggcaatggcaacggcggcggcaaagggaagcaggcggcgcccaagggccgcgaagcgttccgaagccagcggcgggagtcagagggctctgtggactgtcccactctggagtttgagtatggagatgcagatgggcatgcagccgagttgtcagaattgtatagttacactgagaacctggaattcaccaataacaggaggtgctttgaagaagatttcaagactcaagtgcagggcaaggaatggctggagttggaagaagatgcccaaaaggcctatataatgggactcttggaccggctagaggtggtcagtagggaacggcggctgaaggtggcccgggctgttctctacctggcccaaggtacttttggggaatgtgattcagaggtcgatgtgctacactggtccaggtacaactgcttcctgctgtatcagatggggaccttctccaccttcctggagctactccacatggaaattgacaacagccaggcctgtagcagtgcccttcggaaaccagctgtctccatagctgatagcacagagctcagggtgctgctgagtgttatgtacctaatggtggaaaatattcgcctggagcgagagacagacccctgtgggtggagaacagcccgggagaccttccgcactgaattaagcttctccatgcataatgaggagccttttgcccttttactcttctccatggttaccaagttctgcagtggcctggctcctcacttccccataaagaaggtcctgctcctgctctggaaggtggtcatgtttaccctcggtggatttgagcatctgcagactctcaaagtacagaagcgggcagaattgggcctgcctccactggctgaagacagtatccaggtggtgaagagcatgcgtgctgcctccccgccctcttacactcttgacctgggagagtctcagctggcacccccaccctccaagctgcgaggccgccgtggctctcgaaggcaactcctcactaagcaggacagcctggacatctacaatgaaagggatctcttcaagactgaggagcccgccacagaggaggaagaggagtctgctggtgatggagaacgaaccttggatggagagctagacctgctagagcaggaccctctggtgccacctccaccctcacaggcacccctctctgctgagcgggtggcttttcccaagggcctgccctgggccccaaaggtcagacagaaggacattgagcacttcttggagatgagcaggaacaagttcatcggattcaccctggggcaggacacagatacattggttggattacccaggcccatccatgagagtgtgaagaccctaaagcagcacaagtatatctccatcgcagatgtgcagatcaagaatgaagaggagctggagaagtgccctatgtctttggtgagccaaggaagccctacacaggaggagagtagaagaaaacctgtcttcagtgttgtcacagagcatgtgtgcatgcattcattcagcatattaggctgtaactgtgttccaggcaagacaaggtccctactttcatgatatattgaagttggggaagaaagataaaaaataaaaagttaagtaaaccaaactatcagagaatggtaaataaaaaaaaaaaaagaaaaaacaacacaaaaaaaaccgtgggtggcccgacagtgggacccccgaaaaagaagcttctcgaagaacacacaatagtgatgtgaggccgccgcgaggccccccacgtagagggcacaatgagaacaagtggggcgcccaagaggaggggtacccgaagagaagaagccgcgggccacgaaacaaggaggccgggagaatccccacccagattaaaaaaaggcc

SEQ ID NO: 35315 - DNA, 320 bp, Homo sapiens
cttgctgtaccatccaggatttgccggagcttactactgaaagtctggtaagcagatggggatttggtagcctttgaaattgctaggtagcacaggttggcatttgctctttcatttcttctccaaccccttaatgccctggtttgagagtctcagatcaatgaaggtatattggcaagagcagagatgcagcaggggtttagagttgctgacccagttgagaaagatttggaaaagtttagcgtagcatttttcagagaagaggaaacagccagtgaaaaacactaaggaggaaaaggaatttagaaacataatgggac

SEQ ID NO: 35316 - DNA, 272 bp, Homo sapiens
gacaggtttgatggtttaatctcccagggacacaagtggctatttttaacgttgctctgaaaaggaggaagctagctttggattcattggacacaggaatgtgttggaagcttcagctctttcatgccaccctctctactttgggcctcttctttaaggatctcccgaatgtgactgttctgtctttcctgccacagaattgtatagttacactgagaacctggaattcaccaataacaggaggtgctttgaagaagatttcaagactcaag

SEQ ID NO: 35317 - DNA, 197 bp, Homo sapiens
tactccactcttggtcacatctaacttatttcttagtttgtcctttgttagacaagcaatccctaaatatagcacggtttctatgggaacatacattctcctgaagattccaggaacacgttttatctgaaaaataaggaactgtcagataatacgtccaaattcaggactataacccaggttttatatttttgaat

SEQ ID NO: 35318 - DNA, 1484 bp, Homo sapiens
acggggcctgggcggcaggggcggtggctggagctcggtaaagctcgtgggaccccattgggggaatttgatccaaggaagcggtgattgccgggggaggagaagctcccagatccttgtgtccacttgcagcgggggaggcggagacggcggagcgggccttttggcgtccactgcgcggctgcaccctgccccatcctgccgggatcatggtctgcggcagcccgggagggatgctgctgctgcgggccgggctgcttgccctggctgctctctgcctgctccgggtgcccggggctcgggctgcagcctgtgagcccgtccgcatccccctgtgcaagtccctgccctggaacatgactaagatgcccaaccacctgcaccacagcactcaggccaacgccatcctggccatcgagcagttcgaaggtctgctgggcacccactgcagccccgatctgctcttcttcctctgtgccatgtacgcgcccatctgcaccattgacttccagcacgagcccatcaagccctgtaagtctgtgtgcgagcgggcccggcagggctgtgagcccatactcatcaagtaccgccactcgtggccggagaacctggcctgcgaggagctgccagtgtacgacaggggcgtgtgcatctctcccgaggccatcgttactgcggacggagctgattttcctatggattctagtaacggaaactgtagaggggcaagcagtgaacgctgtaaatgtaagcctattagagctacacagaagacctatttccggaacaattacaactatgtcattcgggctaaagttaaagagataaagactaagtgccatgatgtgactgcagtagtggaggtgaaggagattctaaagtcctctctggtaaacattccacgggacactgtcaacctctataccagctctggctgcctctgccctccacttaatgttaatgaggaatatatcatcatgggctatgaagatgaggaacgttccagattactcttggtggaaggctctatagctgagaagtggaaggatcgactcggtaaaaaagttaagcgctgggatatgaagcttcgtcatcttggactcagtaaaagtgattctagcaatagtgattccactcagagtcagaagtctggcaggaactcgaacccccggcaagcacgcaactaaatcccgaaatacaaaaagtaacacagtggacttcctattaagacttacttgcattgctggactagcaaaggaaaattgcactattgcacatcatattctattgtttactataaaaatcatgtgataactgattattacttctgtttctcttttggtttctgcttctctcttctctcaacccctttgtaatggtttgggggcagactcttaagtatattgtgagttttctatttcactaatcatgagaaaaactgttcttttgcaataataataaattaaacatgctgttaccagagc

SEQ ID NO: 35319 - DNA, 455 bp, Homo sapiens
  misc_feature (455)..(455): n is a, c, g, or t
ctagaggatcccggtacattctttgcactgcggacggagctgattttcctatggattctagtaacggaaactgtagaggggcaagcagtgaacgctgtaaatgtaagcctattagagctacacagaagacctatttccggaacaattacaactatgtcattcgggctaaagttaaagagataaagactaagtgccatgatgtgactgcagtagtggaggtgaaggagattctaaagtcctctctggtaaacattccacgggacactgtcaacctctataccagctctggctgcctctgccctccacttaatgttaatgaggaatatatcatcatgggctatgaagatgaggaacgttccagattactcttggtggaaggctctatagctgagaagtggaaggatcgactcggtaaaaaagttaagccatggatgttaaggttccgtcactttgan

SEQ ID NO: 35320 - DNA, 2766 bp, Homo sapiens
acggggcctgggcggcaggggcggtggctggagctcggtaaagctcgtgggaccccattgggggaatttgatccaaggaagcggtgattgccgggggaggagaagctcccagatccttgtgtccacttgcagcgggggaggcggagacggcggagcgggccttttggcgtccactgcgcggctgcaccctgccccatcctgccgggatcatggtctgcggcagcccgggagggatgctgctgctgcgggccgggctgcttgccctggctgctctctgcctgctccgggtgcccggggctcgggctgcagcctgtgagcccgtccgcatccccctgtgcaagtccctgccctggaacatgactaagatgcccaaccacctgcaccacagcactcaggccaacgccatcctggccatcgagcagttcgaaggtctgctgggcacccactgcagccccgatctgctcttcttcctctgtgccatgtacgcgcccatctgcaccattgacttccagcacgagcccatcaagccctgtaagtctgtgtgcgagcgggcccggcagggctgtgagcccatactcatcaagtaccgccactcgtggccggagaacctggcctgcgaggagctgccagtgtacgacaggggcgtgtgcatctctcccgaggccatcgttactgcggacggagctgattttcctatggattctagtaacggaaactgtagaggggcaagcagtgaacgctgtaaatgtaagcctattagagctacacagaagacctatttccggaacaattacaactatgtcattcgggctaaagttaaagagataaagactaagtgccatgatgtgactgcagtagtggaggtgaaggagattctaaagtcctctctggtaaacattccacgggacactgtcaacctctataccagctctggctgcctctgccctccacttaatgttaatgaggaatatatcatcatgggctatgaagatgaggaacgttccagattactcttggtggaaggctctatagctgagaagtggaaggatcgactcggtaaaaaagttaagcgctgggatatgaagcttcgtcatcttggactcagtaaaagtgattctagcaatagtgattccactcagagtcagaagtctggcaggaactcgaacccccggcaagcacgcaactaaatcccgaaatacaaaaagtaacacagtggacttcctattaagacttacttgcattgctggactagcaaaggaaaattgcactattgcacatcatattctattgtttactataaaaatcatgtgataactgattattacttctgtttctcttttggtttctgcttctctcttctctcaacccctttgtaatggtttgggggcagactcttaagtatattgtgagttttctatttcactaatcatgagaaaaactgttcttttgcaataataataaattaaacatgctgttaccagagcctctttgctggagtctccagatgttaatttactttctgcaccccaattgggaatgcaatattggatgaaaagagaggtttctggtattcacagaaagctagatatgccttaaaacatactctgccgatctaattacagccttatttttgtatgccttttgggcattctcctcatgcttagaaagttccaaatgtttataaaggtaaaatggcagtttgaagtcaaatgtcacataggcaaagcaatcaagcaccaggaagtgtttatgaggaaacaacacccaagatgaattatttttgagactgtcaggaagtaaaataaataggagcttaagaaagaacattttgcctgattgagaagcacaactgaaaccagtagccgctggggtgttaatggtagcattcttcttttggcaatacatttgatttgttcatgaatatattaatcagcattagagaaatgaattataactagacatctgctgttatcaccatagttttgtttaatttgcttccttttaaataaacccattggtgaaagtctttttttttctcttcttttaaaataaatcagaattgccgtattgaccaggaaaagattatgtatgcacgtgcaccagggttagtttttaaaagtacatggctccataaaaatgctgtagattacagagtgataaaatatgcaggtttttttgtttttgttttttctgttgtgtgtgtgtctgtatttgtgtacatgtgtgtccttgcactcacacccaaggtggattaaaatacaggcctgcaaactggcctgcactttatcatttggatttgtgctgcttaatgctcagcgaaaaatgtctagtaaaatgaattatggttgtcaggagagaggttatttcgacttttgaaccaattgcacatttctcattacccaagctgtggtgagatcccaggggctgtggtgaacaaatgatgcttttatagatggtccctagcttacaatgattcaatttacaatgcttcaatttaacaatttgttgacttacaatgggtttatcaggatgtaacccaatgcatttcaacttacgatattttcagtttcgaatgggtttatccagatgtaaccccatcgtaaatggcggagcatctgtacttccttcctctggcagagttccttagagcctgtgccaattacttgaaagtctcattctctgccatttacatgtgtgctattagtagaaccaaatttctaagctgtggcgtgctgaaaataaaatgcttatgaagcaaaaaaaaaa

SEQ ID NO: 35321 - DNA, 2322 bp, Homo sapiens
acggggcctgggcggcaggggcggtggctggagctcggtaaagctcgtgggaccccattgggggaatttgatccaaggaagcggtgattgccgggggaggagaagctcccagatccttgtgtccacttgcagcgggggaggcggagacggcggagcgggccttttggcgtccactgcgcggctgcaccctgccccatcctgccgggatcatggtctgcggcagcccgggagggatgctgctgctgcgggccgggctgcttgccctggctgctctctgcctgctccgggtgcccggggctcgggctgcagcctgtgagcccgtccgcatccccctgtgcaagtccctgccctggaacatgactaagatgcccaaccacctgcaccacagcactcaggccaacgccatcctggccatcgagcagttcgaaggtctgctgggcacccactgcagccccgatctgctcttcttcctctgtgccatgtacgcgcccatctgcaccattgacttccagcacgagcccatcaagccctgtaagtctgtgtgcgagcgggcccggcagggctgtgagcccatactcatcaagtaccgccactcgtggccggagaacctggcctgcgaggagctgccagtgtacgacaggggcgtgtgcatctctcccgaggccatcgttactgcggacggagctgattttcctatggattctagtaacggaaactgtagaggggcaagcagtgaacgctgtaaatgtaagcctattagagctacacagaagacctatttccggaacaattacaactatgtcattcgggctaaagttaaagagataaagactaagtgccatgatgtgactgcagtagtggaggtgaaggagattctaaagtcctctctggtaaacattccacgggacactgtcaacctctataccagctctggctgcctctgccctccacttaatgttaatgaggaatatatcatcatgggctatgaagatgaggaacgttccagattactcttggtggaaggctctatagctgagaagtggaaggatcgactcggtaaaaaagttaagcgctgggatatgaagcttcgtcatcttggactcagtaaaagtgattctagcaatagtgattccactcagagtcagaagtctggcaggaactcgaacccccggcaagcacgcaactaaatcccgaaatacaaaaagtaacacagtggacttcctattaagacttacttgcattgctggactagcaaaggaaaattgcactattgcacatcatattctattgtttactataaaaatcatgtgataactgattattacttctgtttctcttttggtttctgcttctctcttctctcaacccctttgtaatggtttgggggcagactcttaagtatattgtgagttttctatttcactaatcatgagaaaaactgttcttttgcaataataataaattaaacatgctgttaccagagcctctttgctggagtctccagatgttaatttactttctgcaccccaattgggaatgcaatattggatgaaaagagaggtttctggtattcacagaaagctagatatgccttaaaacatactctgccgatctaattacagccttatttttgtatgccttttgggcattctcctcatgcttagaaagttccaaatgtttataaaggtaaaatggcagtttgaagtcaaatgtcacataggcaaagcaatcaagcaccaggaagtgtttatgaggaaacaacacccaagatgaattatttttgagactgtcaggaagtaaaataaataggagcttaagaaagaacattttgcctgattgagaagcacaactgaaaccagtagccgctggggtgttaatggtagcattcttcttttggcaatacatttgatttgttcatgaatatattaatcagcattagagaaatgaattataactagacatctgctgttatcaccatagttttgtttaatttgcttccttttaaataaacccattggaactttctaagcatgaggagaatgcccaaaaggcatacaaaaataaggctgtaattagatcggcagagtatgttttaaggcatatctagctttctgtgaataccagaaacctctcttttcatccaatattgcattcccaattggggtgcagaaagtaaattaacatctggagactccagcaaagaggctctggtaacagcatgtttaatttattattattgcaaaagaacagtttttctcatgattagtgaaatagaaaactcacaatatacttaagagtctgcccgtcgacgcggccgcgaat

SEQ ID NO: 35322 - DNA, 1904 bp, Homo sapiens
acattatagagtgctggcttgaaatcagagaataatgttcatattgcatcagttttcttgttaccctgggaaatagattgatacttttggaaaagtagcaaaatgcttcagagatctgaacttgcagtctgacccagttgttagaatcatggaaataatgaccctggtgatatgtgcttgtgactattttctattttaaatttcacagcgctgggatatgaagcttcgtcatcttggactcagtaaaagtgattctagcaatagtgattccactcagagtcagaagtctggcaggaactcgaacccccggcaagcacgcaactaaatcccgaaatacaaaaagtaacacagtggacttcctattaagacttacttgcattgctggactagcaaaggaaaattgcactattgcacatcatattctattgtttactataaaaatcatgtgataactgattattacttctgtttctcttttggtttctgcttctctcttctctcaacccctttgtaatggtttgggggcagactcttaagtatattgtgagttttctatttcactaatcatgagaaaaactgttcttttgcaataataataaattaaacatgctgttaccagagcctctttgctggagtctccagatgttaatttactttctgcaccccaattgggaatgcaatattggatgaaaagagaggtttctggtattcacagaaagctagatatgccttaaaacatactctgccgatctaattacagccttatttttgtatgccttttgggcattctcctcatgcttagaaagttccaaatgtttataaaggtaaaatggcagtttgaagtcaaatgtcacataggcaaagcaatcaagcaccaggaagtgtttatgaggaaacaacacccaagatgaattatttttgagactgtcaggaagtaaaataaataggagcttaagaaagaacattttgcctgattgagaagcacaactgaaaccagtagccgctggggtgttaatggtagcattcttcttttggcaatacatttgatttgttcatgaatatattaatcagcattagagaaatgaattataactagacatctgctgttatcaccatagttttgtttaatttgcttccttttaaataaacccattggtgaaagtctttttttttctcttcttttaaaataaatcagaattgccgtattgaccaggaaaagattatgtatgcacgtgcaccagggttagtttttaaaagtacatggctccataaaaatgctgtagattacagagtgataaaatatgcaggtttttttgtttttgttttttctgttgtgtgtgtgtctgtatttgtgtacatgtgtgtccttgcactcacacccaaggtggattaaaatacaggcctgcaaactggcctgcactttatcatttggatttgtgctgcttaatgctcagcgaaaaatgtctagtaaaatgaattatggttgtcaggagagaggttatttcgacttttgaaccaattgcacatttctcattacccaagctgtggtgagatcccaggggctgtggtgaacaaatgatgcttttatagatggtccctagcttacaatgattcaatttacaatgcttcaatttaacaatttgttgacttacaatgggtttatcaggatgtaacccaatgcatttcaacttacgatattttcagtttcgaatgggtttatccagatgtaaccccatcgtaaatggcggagcatctgtacttccttcctctggcagagttccttagagcctgtgccaattacttgaaagtctcattctctgccatttacatgtgtgctattagtagaaccaaatttctaagctgtggcgtgctgaaaataaaatgcttatgaagcaaaaaaaaaa

SEQ ID NO: 35323 - DNA, 1795 bp, Homo sapiens
  misc_feature (1685)..(1685): n is a, c, g, or t
  misc_feature (1688)..(1688): n is a, c, g, or t
  misc_feature (1782)..(1782): n is a, c, g, or t
acggggcctgggcggcaggggcggtggctggagctcggtaaagctcgtgggaccccattgggggaatttgatccaaggaagcggtgattgccgggggaggagaagctcccagatccttgtgtccacttgcagcgggggaggcggagacggcggagcgggccttttggcgtccactgcgcggctgcaccctgccccatcctgccgggatcatggtctgcggcagcccgggagggatgctgctgctgcgggccgggctgcttgccctggctgctctctgcctgctccgggtgcccggggctcgggctgcagcctgtgagcccgtccgcatccccctgtgcaagtccctgccctggaacatgactaagatgcccaaccacctgcaccacagcactcaggccaacgccatcctggccatcgagcagttcgaaggtctgctgggcacccactgcagccccgatctgctcttcttcctctgtgccatgtacgcgcccatctgcaccattgacttccagcacgagcccatcaagccctgtaagtctgtgtgcgagcgggcccggcagggctgtgagcccatactcatcaagtaccgccactcgtggccggagaacctggcctgcgaggagctgccagtgtacgacaggggcgtgtgcatctctcccgaggccatcgttactgcggacggagctgattttcctatggattctagtaacggaaactgtagaggggcaagcagtgaacgctgtaaatgtaagcctattagagctacacagaagacctatttccggaacaattacaactatgtcattcgggctaaagttaaagagataaagactaagtgccatgatgtgactgcagtagtggaggtgaaggagattctaaagtcctctctggtaaacattccacgggacactgtcaacctctataccagctctggctgcctctgccctccacttaatgttaatgaggaatatatcatcatgggctatgaagatgaggaacgttccagattactcttggtggaaggctctatagctgagaagtggaaggatcgactcggtaaaaaagttaagcgctgggatatgaagcttcgtcatcttggactcagtaaaagtgattctagcaatagtgattccactcagagtcagaagtctggcaggaactcgaacccccggcaagcacgcaactaaatcccgaaatacaaaaagtaacacagtggacttcctattaagacttacttgcattgctggactagcaaaggaaaattgcactattgcacatcatattctattgtttactataaaaatcatgtgataactgattattacttctgtttctcttttggtttctgcttctctcttctctcaacccctttgtaatggtttgggggcagactcttaagtatattgtgagttttctatttcactaatcatgagaaaaactgttcttttgcaataataataaattaaacatgctgttaccagagcctctttgctggagtctccagatgttaatttactttctgcaccccaattgggaatgcaatattggatgaaaagagaggtttctggtattcacagaaagctagatatgccttaaaacatactctgccgatctaattacagccttatttttgtatgccttttgggcattctcctcatgcttagaaagttccaatgggtttattntanaggaagcaaattaaacaaaactatggtgatacagcagatgtctagttataattctttctcctaatgtggtagaatatcatgagcaatcaatgtngtggggaatagaa

SEQ ID NO: 35324 - DNA, 1787 bp, Homo sapiens
acggggcctgggcggcaggggcggtggctggagctcggtaaagctcgtgggaccccattgggggaatttgatccaaggaagcggtgattgccgggggaggagaagctcccagatccttgtgtccacttgcagcgggggaggcggagacggcggagcgggccttttggcgtccactgcgcggctgcaccctgccccatcctgccgggatcatggtctgcggcagcccgggagggatgctgctgctgcgggccgggctgcttgccctggctgctctctgcctgctccgggtgcccggggctcgggctgcagcctgtgagcccgtccgcatccccctgtgcaagtccctgccctggaacatgactaagatgcccaaccacctgcaccacagcactcaggccaacgccatcctggccatcgagcagttcgaaggtctgctgggcacccactgcagccccgatctgctcttcttcctctgtgccatgtacgcgcccatctgcaccattgacttccagcacgagcccatcaagccctgtaagtctgtgtgcgagcgggcccggcagggctgtgagcccatactcatcaagtaccgccactcgtggccggagaacctggcctgcgaggagctgccagtgtacgacaggggcgtgtgcatctctcccgaggccatcgttactgcggacggagctgattttcctatggattctagtaacggaaactgtagaggggcaagcagtgaacgctgtaaatgtaagcctattagagctacacagaagacctatttccggaacaattacaactatgtcattcgggctaaagttaaagagataaagactaagtgccatgatgtgactgcagtagtggaggtgaaggagattctaaagtcctctctggtaaacattccacgggacactgtcaacctctataccagctctggctgcctctgccctccacttaatgttaatgaggaatatatcatcatgggctatgaagatgaggaacgttccagattactcttggtggaaggctctatagctgagaagtggaaggatcgactcggtaaaaaagttaagcgctgggatatgaagcttcgtcatcttggactcagtaaaagtgattctagcaatagtgattccactcagagtcagaagtctggcaggaactcgaacccccggcaagcacgcaactaaatcccgaaatacaaaaagtaacacagtggacttcctattaagacttacttgcattgctggactagcaaaggaaaattgcactattgcacatcatattctattgtttactataaaaatcatgtgataactgattattacttctgtttctcttttggtttctgcttctctcttctctcaacccctttgtaatggtttgggggcagactcttaagtatattgtgagttttctatttcactaatcatgagaaaaactgttcttttgcaataataataaattaaacatgctgttaccagagcaaaaaaaaaaaaaaaaaaaaaaaaaaaaaaaaaaaaccttaaaaaaaaaaaaaaagaaaaaaaaaagacggggggggcccaagaggccacagaaaacttgaagaacagggggagaaggaggaccccagaggagaaggaaaagggggcaaagaggaccggagaaacaccggaaaaacaaaggggggggaatcacacaaaaaaaaagccgaggggaacaaggggttgagaaaaaccaaaggggacgcacgggaacaagaggggacaaaagaggggacaagagacgcgagaaaccccgggcggggc

SEQ ID NO: 35325 - DNA, 1520 bp, Homo sapiens
acggggcctgggcggcaggggcggtggctggagctcggtaaagctcgtgggaccccattgggggaatttgatccaaggaagcggtgattgccgggggaggagaagctcccagatccttgtgtccacttgcagcgggggaggcggagacggcggagcgggccttttggcgtccactgcgcggctgcaccctgccccatcctgccgggatcatggtctgcggcagcccgggagggatgctgctgctgcgggccgggctgcttgccctggctgctctctgcctgctccgggtgcccggggctcgggctgcagcctgtgagcccgtccgcatccccctgtgcaagtccctgccctggaacatgactaagatgcccaaccacctgcaccacagcactcaggccaacgccatcctggccatcgagcagttcgaaggtctgctgggcacccactgcagccccgatctgctcttcttcctctgtgccatgtacgcgcccatctgcaccattgacttccagcacgagcccatcaagccctgtaagtctgtgtgcgagcgggcccggcagggctgtgagcccatactcatcaagtaccgccactcgtggccggagaacctggcctgcgaggagctgccagtgtacgacaggggcgtgtgcatctctcccgaggccatcgttactgcggacggagctgattttcctatggattctagtaacggaaactgtagaggggcaagcagtgaacgctgtaaatgtaagcctattagagctacacagaagacctatttccggaacaattacaactatgtcattcgggctaaagttaaagagataaagactaagtgccatgatgtgactgcagtagtggaggtgaaggagattctaaagtcctctctggtaaacattccacgggacactgtcaacctctataccagctctggctgcctctgccctccacttaatgttaatgaggaatatatcatcatgggctatgaagatgaggaacgttccagattactcttggtggaaggctctatagctgagaagtggaaggatcgactcggtaaaaaagttaagcgctgggatatgaagcttcgtcatcttggactcagtaaaagtgattctagcaatagtgattccactcagagtcagaagtctggcaggaactcgaacccccggcaagcacgcaactaaatcccgaaatacaaaaagtaacacagtggacttcctattaagacttacttgcattgctggactagcaaaggaaaattgcactattgcacatcatattctattgtttactataaaaatcatgtgataactgattattacttctgtttctcttttggtttctgcttctctcttctctcaacccctttgtaatggtttgggggcagactcttaagtatattgtgagttttctatttcactaatcatgagaaaaactgttcttttgcaataataataaattaaacatgctgttaccagagcaaaaaaaaagtcgacgcggccgcgaatttagtagta

SEQ ID NO: 35326 - DNA, 1100 bp, Homo sapiens
  misc_feature (1100)..(1100): n is a, c, g, or t
acggggcctgggcggcaggggcggtggctggagctcggtaaagctcgtgggaccccattgggggaatttgatccaaggaagcggtgattgccgggggaggagaagctcccagatccttgtgtccacttgcagcgggggaggcggagacggcggagcgggccttttggcgtccactgcgcggctgcaccctgccccatcctgccgggatcatggtctgcggcagcccgggagggatgctgctgctgcgggccgggctgcttgccctggctgctctctgcctgctccgggtgcccggggctcgggctgcagcctgtgagcccgtccgcatccccctgtgcaagtccctgccctggaacatgactaagatgcccaaccacctgcaccacagcactcaggccaacgccatcctggccatcgagcagttcgaaggtctgctgggcacccactgcagccccgatctgctcttcttcctctgtgccatgtacgcgcccatctgcaccattgacttccagcacgagcccatcaagccctgtaagtctgtgtgcgagcgggcccggcagggctgtgagcccatactcatcaagtaccgccactcgtggccggagaacctggcctgcgaggagctgccagtgtacgacaggggcgtgtgcatctctcccgaggccatcgttactgcggacggagctgattttcctatggattctagtaacggaaactgtagaggggcaagcagtgaacgctgtaaatgtaagcctattagagctacacagaagacctatttccggaacaattacaactatgtcattcgggctaaagttaaagagataaagactaagtgccatgatgtgactgcagtagtggaggtgaaggagattctaaagtcctctctggtaaacattccacgggacactgtcaacctctataccagctctggctgcctctgccctccacttaatgttaatgaggaatatatcatcatgggctatgaagatgaggaacgttccagattactcttggtggaaggctctatagctgagaagtggaaggatcgactcggtaaaaaagttaagccatggatgttaaggttccgtcactttgan

SEQ ID NO: 35327 - DNA, 995 bp, Homo sapiens
taatggcaatatattctgttagtgcgtaagtatacattttaaaaaggcatgagccaccgctcctggctttctttaatgtaacttaaataaaatataaggttttactttatttgtgctttttggaaatgtctcctgatttttaataacagtttattatgccttgtaccagcttttttattaatatataaggtgcccactatattataccaattatgctgcttatatagttattcatatgcatctcaaaaccttccttaatgtacttataatgaggtaacaccatagcaaaattgcatctttttcattatctgcatttaatatctatagtttaccaacgatgacactgcaagcattgtgtcttctgatcgtgccagtcgtggacgaagggagagtgtggtgagcatgatttgcatgcaaagaaataagatgagttttaaatgacagcaatgcatgatcacatgaagtctgttggaaagtgaagtttgcatttgacaaaaagagcattttcctcaaatttagttatataaatattttgccttataaaacatgttgagaacacatattctctgtgggctgtgcaagctttcattaataatttgcctttttacatctcttaggagtgaatcattatttgaaaagtttttactttttcttctttgttgctgttttatgcacatacatgtgtgtgcagttcaccaaagacaaatttcttcagcaaaattaatgtttccatattgtataaaactcataactatggattacaaatcatgttaccattaattgctttctatattgttgtatttagatttaaccagtgtttatccacctgttaagacctgtaatccagtcagggtggctcatgcctataatcccagctacttgggagactgaggtgggaggattgcttgagcccaggagtttgaggctgcagtgagctatgattgcatcactgcactccagtgtgggtagcaaagtgagactgtgcctctcaaaag

SEQ ID NO: 35328 - DNA, 2433 bp, Homo sapiens
tcggccgctcaggctgcggctcctcccggggccggttcccgctgtctcagccgcggcgcagagggcacatcggcctgaccgactagccggctgccagtgccgggagccgccgcgtccatccccgcccgcctggccggggacccaggactgagtcgtccagctgcgcccctcgcccatagccccagcgggcgccgggcgggcgagcagctcttcggcccttcccggacagcgacgcagtcgcagcgcgcgccctaacacagatgtgggaagataaatgaaggggtctagatgtaaatgtcagtggaaaggagagctaccatcactaagggctgaaaacacagttaaatcactttcaaagttaaaagactattaagaacacaagatggggactcctgcttctggaaggaaaagaacacctgtgaaagaccgattttctgcagaagatgaagctttgagtaacattgccagagaggcagaggcaaggctggcagcaaaacgggctgcccgggcagaagcaagagatatacgcatgagagaactggaacgacaacaaaaagagttggatgaaaaatctgacaaacagtatgctgaaaattatacaagaccttcatctcgaaattctgcctcagcaacaacccctctaagtggaaactcatccagacgaggaagtggggacaccagcagcttaatagatccagacacttcattaagtgaattgcgggaatctttgtctgaagtggaagaaaaatacaagaaagccatggtttccaatgcacagttagacaatgagaagaacaatttgatctaccaagtagacacactcaaggatgttattgaagagcaggaggaacagatggcagaattttatagagaaaatgaagaaaaatcaaaggagttagaaaggcagaaacatatgtgtagtgtgctgcagcataagatggaagaacttaaagaaggcctgcggcaaagagatgagcttattgagaaacatggcttagttataatccccgatggcactcccaatggtgatgtcagtcatgaaccagtggctggagccatcactgttgtgtctcaggaagctgctcaggtcttggagtcagcaggagaagggccattagatgtaaggctacgaaaacttgctggagagaaggaagaactactgtcacagattagaaaactgaagcttcagttagaggaggaacgacagaaatgctccaggaatgatggcacagtgggtgacctggcaggactgcagaatggctcagacttgcagttcatcgaaatgcagagagatgccaatagacaaattagcgaatacaaatttaagctttcaaaagcagaacaggatataactaccttggagcaaagtattagccggcttgagggacaggttctgagatataaaactgctgctgagaatgctgagaaagttgaagatgaattgaaagcagaaaaacggaagctacaacgagagttacgaacagcactggacaagattgaggagatggagatgaccaacagccacctggccaagcggctggagaagatgaaggccaataggacagcacttctggcccagcagtaggaaaaccacccttcaacctgggtgatgctccttggggccctacctagagggactgacttttgtccattgacacaaaccccttttagtactgttttgagttttgtcattaaaacagccacctttgtattttataatttatgacagaatgaagtcattttgaatctacatgaatgaacactttggattttgttgtagtttgattctagggtagaaccagtccatgctgtttttattttttatctccgtaattgtagaatcatgtttactcaacgtttttccccagctgcctcagtaactgggcactcggaggccttggcacgggttctggaggacagacagcaattctatgagtgctcactgagatacttgctggagacctcagaaaacacaagtgccttctccacggtgcaattcagacttcagtgatctccagtggtcaaaagacatttacccttaatatcagacaacatttatattttagtgaagaaacaagttctcgggtggggaatctatgtttcactcagatttatatgtttggaggaaaaaagcctttttttgtaaaatatttaaatttatataagaaaatgttagaaaaaaatatggggagtgtatataaaacttgctttattgcatggggcaggggaagtccaggcctaatactcctaaagtaagagttgggtcctttttttcttcaatacaactgtgctgtaccttgtaaagtattttatctgctgcttatttgtggaatgaaacctcaaacaaacccaaagggggagggtagggcagggcaggcagattggaaatctgcctgcagattctattaaatacacccttttgccaaccacaat

SEQ ID NO: 35329 - DNA, 3396 bp, Homo sapiens
tcggccgctcaggctgcggctcctcccggggccggttcccgctgtctcagccgcggcgcagagggcacatcggcctgaccgactagccggctgccagtgccgggagccgccgcgtccatccccgcccgcctggccggggacccaggactgagtcgtccagctgcgcccctcgcccatagccccagcgggcgccgggcgggcgagcagctcttcggcccttcccggacagcgacgcagtcgcagcgcgcgccctaacacagatgtgggaagataaatgaaggggtctagatgtaaatgtcagtggaaaggagagctaccatcactaagggctgaaaacacagttaaatcactttcaaagttaaaagactattaagaacacaagatggggactcctgcttctggaaggaaaagaacacctgtgaaagaccgattttctgcagaagatgaagctttgagtaacattgccagagaggcagaggcaaggctggcagcaaaacgggctgcccgggcagaagcaagagatatacgcatgagagaactggaacgacaacaaaaagagtactctcttcattcctttgatcggaagtggggacagattcagaagtggctggaagattcggaaagggccaggtattcccaccggtccagtcaccatcgtccttatctgggagttgaggatgcattgtccattcgaagtgttggcagtcacaggtatgatatgttcaaggatagatcatcaagactttcatcattaaatcattcttacagtcactctcatggaatgaagaagaggtcttctgattctcataaagacctactgagtggcctctactttgaccagagaaactatagcagtcttagacatagcaaacccacctctgcctactacactcggcagtcttcttccctgtacagtgaccctctggcaacatataagagtgacagggcctctcctactgcaaattctggtctgctgagaagtgccagtctggcatcattgtacaatggtggattatataacccttatggtcctcgaactccatctgaatgcagttattattcatcaagaataagttcagcccgaagcagtccagggtttaccaacgatgacactgcaagcattgtgtcttctgatcgtgccagtcgtggacgaagggagagtgtggtatctgccgctgattatttcagtcgctccaatcgtaggggaagtgttgtctctgaggtggatgatatcagtatcccagatttgtccagcttggatgaaaaatctgacaaacagtatgctgaaaattatacaagaccttcatctcgaaattctgcctcagcaacaacccctctaagtggaaactcatccagacgaggaagtggggacaccagcagcttaatagatccagacacttcattaagtgaattgcgggatatctatgaccttaaggaccagatacaggatgtagaagggagatacatgcaggggcttaaagaactaaaggaatctttgtctgaagtggaagaaaaatacaagaaagccatggtttccaatgcacagttagacaatgagaagaacaatttgatctaccaagtagacacactcaaggatgttattgaagagcaggaggaacagatggcagaattttatagagaaaatgaagaaaaatcaaaggagttagaaaggcagaaacatatgtgtagtgtgctgcagcataagatggaagaacttaaagaaggcctgcggcaaagagatgagcttattgaggagaagcagcgcatgcagcagaaaatagacaccatgacaaaagaggtgtttgacctccaggagacacttctttggaaagataaaaaaattggggccctagagaaacagaaagaatacattgcctgccttaggaatgagcgagatatgctcagagaggagctggctgacctgcaggagacagtgaagacgggagagaaacatggcttagttataatccccgatggcactcccaatggtgatgtcagtcatgaaccagtggctggagccatcactgttgtgtctcaggaagctgctcaggtcttggagtcagcaggagaagggccattagatgtaaggctacgaaaacttgctggagagaaggaagaactactgtcacagattagaaaactgaagcttcagttagaggaggaacgacagaaatgctccaggaatgatggcacagtgggtgacctggcaggactgcagaatggctcagacttgcagttcatcgaaatgcagagagatgccaatagacaaattagcgaatacaaatttaagctttcaaaagcagaacaggatataactaccttggagcaaagtattagccggcttgagggacaggttctgagatataaaactgctgctgagaatgctgagaaagttgaagatgaattgaaagcagaaaaacggaagctacaacgagagttacgaacagcactggacaagattgaggagatggagatgaccaacagccacctggccaagcggctggagaagatgaaggccaataggacagcacttctggcccagcagtaggaaaaccacccttcaacctgggtgatgctccttggggccctacctagagggactgacttttgtccattgacacaaaccccttttagtactgttttgagttttgtcattaaaacagccacctttgtattttataatttatgacagaatgaagtcattttgaatctacatgaatgaacactttggattttgttgtagtttgattctagggtagaaccagtccatgctgtttttattttttatctccgtaattgtagaatcatgtttactcaacgtttttccccagctgcctcagtaactgggcactcggaggccttggcacgggttctggaggacagacagcaattctatgagtgctcactgagatacttgctggagacctcagaaaacacaagtgccttctccacggtgcaattcagacttcagtgatctccagtggtcaaaagacatttacccttaatatcagacaacatttatattttagtgaagaaacaagttctcgggtggggaatctatgtttcactcagatttatatgtttggaggaaaaaagcctttttttgtaaaatatttaaatttatataagaaaatgttagaaaaaaatatggggagtgtatataaaacttgctttattgcatggggcaggggaagtccaggcctaatactcctaaagtaagagttgggtcctttttttcttcaatacaactgtgctgtaccttgtaaagtattttatctgctgcttatttgtggaatgaaacctcaaacaaacccaaagggggagggtagggcagggcaggcagattggaaatctgcctgcagattctattaaatacacccttttgccaaccacaat

SEQ ID NO: 35330 - DNA, 3785 bp, Homo sapiens
tcggccgctcaggctgcggctcctcccggggccggttcccgctgtctcagccgcggcgcagagggcacatcggcctgaccgactagccggctgccagtgccgggagccgccgcgtccatccccgcccgcctggccggggacccaggactgagtcgtccagctgcgcccctcgcccatagccccagcgggcgccgggcgggcgagcagctcttcggcccttcccggacagcgacgcagtcgcagcgcgcgccctaacacagatgtgggaagataaatgaaggggtctagatgtaaatgtcagtggaaaggagagctaccatcactaagggctgaaaacacagttaaatcactttcaaagttaaaagactattaagaacacaagatggggactcctgcttctggaaggaaaagaacacctgtgaaagaccgattttctgcagaagatgaagctttgagtaacattgccagagaggcagaggcaaggctggcagcaaaacgggctgcccgggcagaagcaagagatatacgcatgagagaactggaacgacaacaaaaagagtactctcttcattcctttgatcggaagtggggacagattcagaagtggctggaagattcggaaagggccaggtattcccaccggtccagtcaccatcgtccttatctgggagttgaggatgcattgtccattcgaagtgttggcagtcacaggtatgatatgttcaaggatagatcatcaagactttcatcattaaatcattcttacagtcactctcatggaatgaagaagaggtcttctgattctcataaagacctactgagtggcctctactttgaccagagaaactatagcagtcttagacatagcaaacccacctctgcctactacactcggcagtcttcttccctgtacagtgaccctctggcaacatataagagtgacagggcctctcctactgcaaattctggtctgctgagaagtgccagtctggcatcattgtacaatggtggattatataacccttatggtcctcgaactccatctgaatgcagttattattcatcaagaataagttcagcccgaagcagtccagggtttaccaacgatgacactgcaagcattgtgtcttctgatcgtgccagtcgtggacgaagggagagtgtggtatctgccgctgattatttcagtcgctccaatcgtaggggaagtgttgtctctgaggtggatgatatcagtatcccagatttgtccagcttggatgaaaaatctgacaaacagtatgctgaaaattatacaagaccttcatctcgaaattctgcctcagcaacaacccctctaagtggaaactcatccagacgaggaagtggggacaccagcagcttaatagatccagacacttcattaagtgaattgcgggatatctatgaccttaaggaccagatacaggatgtagaagggagatacatgcaggggcttaaagaactaaaggaatctttgtctgaagtggaagaaaaatacaagaaagccatggtttccaatgcacagttagacaatgagaagaacaatttgatctaccaagtagacacactcaaggatgttattgaagagcaggaggaacagatggcagaattttatagagaaaatgaagaaaaatcaaaggagttagaaaggcagaaacatatgtgtagtgtgctgcagcataagatggaagaacttaaagaaggcctgcggcaaagagatgagcttattgaggagaagcagcgcatgcagcagaaaatagacaccatgacaaaagaggtgtttgacctccaggagacacttctttggaaagataaaaaaattggggccctagagaaacagaaagaatacattgcctgccttaggaatgagcgagatatgctcagagaggagctggctgacctgcaggagacagtgaagacgggagagaaacatggcttagttataatccccgatggcactcccaatggtgatgtcagtcatgaaccagtggctggagccatcactgttgtgtctcaggaagctgctcaggtcttggagtcagcaggagaagggccattagatgtaaggctacgaaaacttgctggagagaaggaagaactactgtcacagattagaaaactgaagcttcagttagaggaggaacgacagaaatgctccaggaatgatggcacagtgggtgacctggcaggactgcagaatggctcagacttgcagttcatcgaaatgcagagagatgccaatagacaaattagcgaatacaaatttaagctttcaaaagcagaacaggatataactaccttggagcaaagtattagccggcttgagggacaggttctgagatataaaactgctgctgagaatgctgagaaagttgaagatgaattgaaagcagaaaaacggaagctacaacgagagttacgaacagcactggacaagattgaggagatggagatgaccaacagccacctggccaagcggctggagaagatgaaggccaataggacagcacttctggcccagcagtaggaaaaccacccttcaacctgggtgatgctccttggggccctacctagagggactgacttttgtccattgacacaaaccccttttagtactgttttgagttttgtcattaaaacagccacctttgtattttataatttatgacagaatgaagtcattttgaatctacatgaatgaacactttggattttgttgtagtttgattctagggtagaaccagtccatgctgtttttattttttatctccgtaattgtagaatcatgtttactcaacgtttttccccagctgcctcagtaactgggcactcggaggccttggcacgggttctggaggacagacagcaattctatgagtgctcactgagatacttgctggagacctcagaaaacacaagtgccttctccacggtgcaattcagacttcagtgatctccagtggtcaaaagacatttacccttaatatcagacaacatttatattttagtgaagaaacaagttctcgggtggggaatctatgtttcactcagatttatatgtttggaggaaaaaagcctttttttgtaaaatatttaaatttatataagaaaatgttagaaaaaaatatggggagtgtatataaaacttgctttattgcatggggcaggggaagtccaggcctaatactcctaaagtaagagttgggtcctttttttcttcaatacaactgtgctgtaccttgtaaagtattttatctgctgcttatttgtggaatgaaacctcaaacaaacccaaagggggagggtagggcagggcaggcagattggaaatctgcctgcagattctattaaatacacccttttgccaaccacaattggctactgacatgttcattttgttataggagactttaaaacaaatcatggcaaccacatccctcttcttttgtctccttctcaaggaaaaacaatctggaatgtagaacttttaaagacttgagtttcacctttagaggtaccctgtccaagaggtttttttaaaatcatggagtgcaactactttgcagaatttatgattctcttttgctcttagtacccaggtggttttatagaaatgattattgtatctttaaagtgcttacacagaaaatatattgggggaaaatctagtgactaaaggcacataagataataaaactagactttaaaaaggtaactcaaaagtgaataaaatctctaatatttgttccttttttaattagccc

SEQ ID NO: 35331 - DNA, 3549 bp, Homo sapiens
tcggccgctcaggctgcggctcctcccggggccggttcccgctgtctcagccgcggcgcagagggcacatcggcctgaccgactagccggctgccagtgccgggagccgccgcgtccatccccgcccgcctggccggggacccaggactgagtcgtccagctgcgcccctcgcccatagccccagcgggcgccgggcgggcgagcagctcttcggcccttcccggacagcgacgcagtcgcagcgcgcgccctaacacagatgtgggaagataaatgaaggggtctagatgtaaatgtcagtggaaaggagagctaccatcactaagggctgaaaacacagttaaatcactttcaaagttaaaagactattaagaacacaagatggggactcctgcttctggaaggaaaagaacacctgtgaaagaccgattttctgcagaagatgaagctttgagtaacattgccagagaggcagaggcaaggctggcagcaaaacgggctgcccgggcagaagcaagagatatacgcatgagagaactggaacgacaacaaaaagagtactctcttcattcctttgatcggaagtggggacagattcagaagtggctggaagattcggaaagggccaggtattcccaccggtccagtcaccatcgtccttatctgggagttgaggatgcattgtccattcgaagtgttggcagtcacaggtatgatatgttcaaggatagatcatcaagactttcatcattaaatcattcttacagtcactctcatggaatgaagaagaggtcttctgattctcataaagacctactgagtggcctctactttgaccagagaaactatagcagtcttagacatagcaaacccacctctgcctactacactcggcagtcttcttccctgtacagtgaccctctggcaacatataagagtgacagggcctctcctactgcaaattctggtctgctgagaagtgccagtctggcatcattgtacaatggtggattatataacccttatggtcctcgaactccatctgaatgcagttattattcatcaagaataagttcagcccgaagcagtccagggtttaccaacgatgacactgcaagcattgtgtcttctgatcgtgccagtcgtggacgaagggagagtgtggtatctgccgctgattatttcagtcgctccaatcgtaggggaagtgttgtctctgaggtggatgatatcagtatcccagatttgtccagcttggatgaaaaatctgacaaacagtatgctgaaaattatacaagaccttcatctcgaaattctgcctcagcaacaacccctctaagtggaaactcatccagacgaggaagtggggacaccagcagcttaatagatccagacacttcattaagtgaattgcgggatatctatgaccttaaggaccagatacaggatgtagaagggagatacatgcaggggcttaaagaactaaaggaatctttgtctgaagtggaagaaaaatacaagaaagccatggtttccaatgcacagttagacaatgagaagaacaatttgatctaccaagtagacacactcaaggatgttattgaagagcaggaggaacagatggcagaattttatagagaaaatgaagaaaaatcaaaggagttagaaaggcagaaacatatgtgtagtgtgctgcagcataagatggaagaacttaaagaaggcctgcggcaaagagatgagcttattgaggagaagcagcgcatgcagcagaaaatagacaccatgacaaaagaggtgtttgacctccaggagacacttctttggaaagataaaaaaattggggccctagagaaacagaaagaatacattgcctgccttaggaatgagcgagatatgctcagagaggagctggctgacctgcaggagacagtgaagacgggagagaaacatggcttagttataatccccgatggcactcccaatggtgatgtcagtcatgaaccagtggctggagccatcactgttgtgtctcaggaagctgctcaggtcttggagtcagcaggagaagggccattagatgtaaggctacgaaaacttgctggagagaaggaagaactactgtcacagattagaaaactgaagcttcagttagaggaggaacgacagaaatgctccaggaatgatggcacagtgggtgacctggcaggactgcagaatggctcagacttgcagttcatcgaaatgcagagagatgccaatagacaaattagcgaatacaaatttaagctttcaaaagcagaacaggatataactaccttggagcaaagtattagccggcttgagggacaggttctgagatataaaactgctgctgagaatgctgagaaagttgaagatgaattgaaagcagaaaaacggaagctacaacgagagttacgaacagcactggacaagattgaggagatggagatgaccaacagccacctggccaagcggctggagaagatgaaggccaataggacagcacttctggcccagcagtaggaaaaccacccttcaacctgggtgatgctccttggggccctacctagagggactgacttttgtccattgacacaaaccccttttagtactgttttgagttttgtcattaaaacagccacctttgtattttataatttatgacagaatgaagtcattttgaatctacatgaatgaacactttggattttgttgtagtttgattctagggtagaaccagtccatgctgtttttattttttatctccgtaattgtagaatcatgtttactcaacgtttttccccagctgcctcagtaactgggcactcggaggccttggcacgggttctggaggacagacagcaattctatgagtgctcactgagatacttgctggagacctcagaaaacacaagtgccttctccacggtgcaattcagacttcagtgatctccagtggtcaaaagacatttacccttaatatcagacaacatttatattttagtgaagaaacaagttctcgggtggggaatctatgtttcactcagatttatatgtttggaggaaaaaagcctttttttgtaaaatatttaaatttatataagaaaatgttagaaaaaaatatggggagtgtatataaaacttgctttattgcatggggcaggggaagtccaggcctaatactcctaaagtaagagttgggtcctttttttcttcaatacaactgtgctgtaccttgtaaagtattttatctgctgcttatttgtggaatgaaacctcaaacaaacccaaagggggagggtagggcagggcaggcagattggaaatctgcctgcagattctattaaatacacccttttgccaaccacaataaaatataataaaaaaaaaaatttataaaaatataaaaaatacaatattaaaaatatttacgtaactaatttattaataaattagtctatttattttaaattatatgtattttttatagacattgtttttcatcaattatatgggggatccct

SEQ ID NO: 35332 - DNA, 3716 bp, Homo sapiens
atcctgtacacatactcagttcctaattgtaagctcaattttggtattagcaaaagcatctgtcagtttttcctcaattactcgcacctcttcttgcctaaataaaacaaagaaacaaagaaaacaagtgtggtgtcattacacgtctcgggagttccccctggagggggaactccagagaaggggaacattaaatgttggagagatttgttaccatacattcatttatttaattaaagccgttttagttccttagcaaagcaactaatgctcacgctcacaactgaaggagaaataatatgccacaacacctaaaaacaccttggaacgcagtggagtggaaagggcagggactttaaataatgatgcttgggcttgtatccacttctactacctgttagtgtgtaaatggcagtgtctttatttgtacattggggatgttaatactatctttgtaggtaggtttaatatatggattaaatggaatactatatagaaaatgcctatcaaaattctcaaataggtgccaataaatattaatatctataaatgcaatcattattattattattgtgaataaaaataccattgcttgattttatcagtccttagcaaaacttcatacttgtaagcctgttttatctctgtggatgggcttctgaattcccttccttgagaagtattttaaagcaaggcaaacagtcagctgaagtaaggaatagatgatgaatgaggttaaaaaaaaatcacttattttaaaattaaataaatgtttgtggagtacctgttgtattcaaagccctgtgttaagtgctaggaatactattttaagccagtcagactagatttctgactttatggaatttatatcctcgtgaaagagatggaaaataagctagtaaagaaacaaaaagaaagaaatgtcagggactgtgaagagaacagataatgtgatagggaacctggaggggtctatgtgtgtgggttaccctttggatggggtgattagagatgcttctctgagaaactgacctttgagctgagacctgaaatgtgaggagccagttgcttgaagagctgggaggggagcgttctaggccagtgccaaggcctaaggtgagggagaactggtgtgtttggggaactaaaaagaggccggtatagtttatttccttcattattttgtcttacatttcctggtctttgggaatataaaaaaaggggaactgtgtaaactgagaaaaggtgcagtaaacaccctgcaaataattctgcattcagcatatatattcttaacagagttgatagctataatgaattataaattttgagaattatagtagaggtatatactgacctagaaatgcctctgttcagggtgataaatatcttaaacatgagagatttgctggtcctcaggaagtaaatgttctctgtagcataggactctagttaagatgagtaaaaaagctgattgtagagctgtgatttcatttaggaaccccttttcttttttatttttttgagtaggttaattgcagcagtttcctcattttatttcttggtactttatcacccatcaaaattttaaaaaacttttccctaattggccaatgttcttatttttttctttcttttttcttaaccttgaaagcatcttgttttttttctgaccgaaaggtatctgccgctgattatttcagtcgctccaatcgtaggggaagtgttgtctctgaggtggatgatatcagtatcccagatttgtccagcttggatgaaaaatctgacaaacagtatgctgaaaattatacaagaccttcatctcgaaattctgcctcagcaacaacccctctaagtggaaactcatccagacgaggaagtggggacaccagcagcttaatagatccagacacttcattaagtgaattgcgggatatctatgaccttaaggaccagatacaggatgtagaagggagatacatgcaggggcttaaagaactaaaggaatctttgtctgaagtggaagaaaaatacaagaaagccatggtttccaatgcacagttagacaatgagaagaacaatttgatctaccaagtagacacactcaaggatgttattgaagagcaggaggaacagatggcagaattttatagagaaaatgaagaaaaatcaaaggagttagaaaggcagaaacatatgtgtagtgtgctgcagcataagatggaagaacttaaagaaggcctgcggcaaagagatgagcttattgagaaacatggcttagttataatccccgatggcactcccaatggtgatgtcagtcatgaaccagtggctggagccatcactgttgtgtctcaggaagctgctcaggtcttggagtcagcaggagaagggccattagatgtaaggctacgaaaacttgctggagagaaggaagaactactgtcacagattagaaaactgaagcttcagttagaggaggaacgacagaaatgctccaggaatgatggcacagtgggtgacctggcaggactgcagaatggctcagacttgcagttcatcgaaatgcagagagatgccaatagacaaattagcgaatacaaatttaagctttcaaaagcagaacaggatataactaccttggagcaaagtattagccggcttgagggacaggttctgagatataaaactgctgctgagaatgctgagaaagttgaagatgaattgaaagcagaaaaacggaagctacaacgagagttacgaacagcactggacaagattgaggagatggagatgaccaacagccacctggccaagcggctggagaagatgaaggccaataggacagcacttctggcccagcagtaggaaaaccacccttcaacctgggtgatgctccttggggccctacctagagggactgacttttgtccattgacacaaaccccttttagtactgttttgagttttgtcattaaaacagccacctttgtattttataatttatgacagaatgaagtcattttgaatctacatgaatgaacactttggattttgttgtagtttgattctagggtagaaccagtccatgctgtttttattttttatctccgtaattgtagaatcatgtttactcaacgtttttccccagctgcctcagtaactgggcactcggaggccttggcacgggttctggaggacagacagcaattctatgagtgctcactgagatacttgctggagacctcagaaaacacaagtgccttctccacggtgcaattcagacttcagtgatctccagtggtcaaaagacatttacccttaatatcagacaacatttatattttagtgaagaaacaagttctcgggtggggaatctatgtttcactcagatttatatgtttggaggaaaaaagcctttttttgtaaaatatttaaatttatataagaaaatgttagaaaaaaatatggggagtgtatataaaacttgctttattgcatggggcaggggaagtccaggcctaatactcctaaagtaagagttgggtcctttttttcttcaatacaactgtgctgtaccttgtaaagtattttatctgctgcttatttgtggaatgaaacctcaaacaaacccaaagggggagggtagggcagggcaggcagattggaaatctgcctgcagattctattaaatacacccttttgccaaccacaat

SEQ ID NO: 35333 - DNA, 2505 bp, Homo sapiens
tcggccgctcaggctgcggctcctcccggggccggttcccgctgtctcagccgcggcgcagagggcacatcggcctgaccgactagccggctgccagtgccgggagccgccgcgtccatccccgcccgcctggccggggacccaggactgagtcgtccagctgcgcccctcgcccatagccccagcgggcgccgggcgggcgagcagctcttcggcccttcccggacagcgacgcagtcgcagcgcgcgccctaacacagatgtgggaagataaatgaaggggtctagatgtaaatgtcagtggaaaggagagctaccatcactaagggctgaaaacacagttaaatcactttcaaagttaaaagactattaagaacacaagatggggactcctgcttctggaaggaaaagaacacctgtgaaagaccgattttctgcagaagatgaagctttgagtaacattgccagagaggcagaggcaaggctggcagcaaaacgggctgcccgggcagaagcaagagatatacgcatgagagaactggaacgacaacaaaaagagttggatgaaaaatctgacaaacagtatgctgaaaattatacaagaccttcatctcgaaattctgcctcagcaacaacccctctaagtggaaactcatccagacgaggaagtggggacaccagcagcttaatagatccagacacttcattaagtgaattgcgggatatctatgaccttaaggaccagatacaggatgtagaagggagatacatgcaggggcttaaagaactaaaggaatctttgtctgaagtggaagaaaaatacaagaaagccatggtttccaatgcacagttagacaatgagaagaacaatttgatctaccaagtagacacactcaaggatgttattgaagagcaggaggaacagatggcagaattttatagagaaaatgaagaaaaatcaaaggagttagaaaggcagaaacatatgtgtagtgtgctgcagcataagatggaagaacttaaagaaggcctgcggcaaagagatgagcttattgagaaacatggcttagttataatccccgatggcactcccaatggtgatgtcagtcatgaaccagtggctggagccatcactgttgtgtctcaggaagctgctcaggtcttggagtcagcaggagaagggccattagatgtaaggctacgaaaacttgctggagagaaggaagaactactgtcacagattagaaaactgaagcttcagttagaggaggaacgacagaaatgctccaggaatgatggcacagtgggtgacctggcaggactgcagaatggctcagacttgcagttcatcgaaatgcagagagatgccaatagacaaattagcgaatacaaatttaagctttcaaaagcagaacaggatataactaccttggagcaaagtattagccggcttgagggacaggttctgagatataaaactgctgctgagaatgctgagaaagttgaagatgaattgaaagcagaaaaacggaagctacaacgagagttacgaacagcactggacaagattgaggagatggagatgaccaacagccacctggccaagcggctggagaagatgaaggccaataggacagcacttctggcccagcagtaggaaaaccacccttcaacctgggtgatgctccttggggccctacctagagggactgacttttgtccattgacacaaaccccttttagtactgttttgagttttgtcattaaaacagccacctttgtattttataatttatgacagaatgaagtcattttgaatctacatgaatgaacactttggattttgttgtagtttgattctagggtagaaccagtccatgctgtttttattttttatctccgtaattgtagaatcatgtttactcaacgtttttccccagctgcctcagtaactgggcactcggaggccttggcacgggttctggaggacagacagcaattctatgagtgctcactgagatacttgctggagacctcagaaaacacaagtgccttctccacggtgcaattcagacttcagtgatctccagtggtcaaaagacatttacccttaatatcagacaacatttatattttagtgaagaaacaagttctcgggtggggaatctatgtttcactcagatttatatgtttggaggaaaaaagcctttttttgtaaaatatttaaatttatataagaaaatgttagaaaaaaatatggggagtgtatataaaacttgctttattgcatggggcaggggaagtccaggcctaatactcctaaagtaagagttgggtcctttttttcttcaatacaactgtgctgtaccttgtaaagtattttatctgctgcttatttgtggaatgaaacctcaaacaaacccaaagggggagggtagggcagggcaggcagattggaaatctgcctgcagattctattaaatacacccttttgccaaccacaat

SEQ ID NO: 35334 - DNA, 2966 bp, Homo sapiens
tcggccgctcaggctgcggctcctcccggggccggttcccgctgtctcagccgcggcgcagagggcacatcggcctgaccgactagccggctgccagtgccgggagccgccgcgtccatccccgcccgcctggccggggacccaggactgagtcgtccagctgcgcccctcgcccatagccccagcgggcgccgggcgggcgagcagctcttcggcccttcccggacagcgacgcagtcgcagcgcgcgccctaacacagatgtgggaagataaatgaaggggtctagatgtaaatgtcagtggaaaggagagctaccatcactaagggtctcactctgatgcccacgctggagtccagtggtatgaacacagatcactgcagcctcgacttcctgggctcgggtgattctcccacctcagcctcccaagtagctgagactacatgcatacatcatcacacagggccaatttttgtattttttgtagaaacggggtgtccgcatgttgcccacgctggtctctaactcctgggctcacatcgttcacccaccttggcctcccaaagtgctgggattacaggcatgagccaccgctcctggctttctttaatgtaacttaaataaaatataaggttttactttatttgtgctttttggaaatgtctcctgatttttaataacagtttattatgccttgtaccagcttttttattaatatataaggtgcccactatattataccaattatgctgcttatatagttattcatatgcatctcaaaaccttccttaatgtacttataatgaggtaacaccatagcaaaattgcatctttttcattatctgcatttaatatctatagtttaccaacgatgacactgcaagcattgtgtcttctgatcgtgccagtcgtggacgaagggagagtgtggtatctgccgctgattatttcagtcgctccaatcgtaggggaagtgttgtctctgaggtggatgatatcagtatcccagatttgtccagcttggatgaaaaatctgacaaacagtatgctgaaaattatacaagaccttcatctcgaaattctgcctcagcaacaacccctctaagtggaaactcatccagacgaggaagtggggacaccagcagcttaatagatccagacacttcattaagtgaattgcgggatatctatgaccttaaggaccagatacaggatgtagaagggagatacatgcaggggcttaaagaactaaaggaatctttgtctgaagtggaagaaaaatacaagaaagccatggtttccaatgcacagttagacaatgagaagaacaatttgatctaccaagtagacacactcaaggatgttattgaagagcaggaggaacagatggcagaattttatagagaaaatgaagaaaaatcaaaggagttagaaaggcagaaacatatgtgtagtgtgctgcagcataagatggaagaacttaaagaaggcctgcggcaaagagatgagcttattgagaaacatggcttagttataatccccgatggcactcccaatggtgatgtcagtcatgaaccagtggctggagccatcactgttgtgtctcaggaagctgctcaggtcttggagtcagcaggagaagggccattagatgtaaggctacgaaaacttgctggagagaaggaagaactactgtcacagattagaaaactgaagcttcagttagaggaggaacgacagaaatgctccaggaatgatggcacagtgggtgacctggcaggactgcagaatggctcagacttgcagttcatcgaaatgcagagagatgccaatagacaaattagcgaatacaaatttaagctttcaaaagcagaacaggatataactaccttggagcaaagtattagccggcttgagggacaggttctgagatataaaactgctgctgagaatgctgagaaagttgaagatgaattgaaagcagaaaaacggaagctacaacgagagttacgaacagcactggacaagattgaggagatggagatgaccaacagccacctggccaagcggctggagaagatgaaggccaataggacagcacttctggcccagcagtaggaaaaccacccttcaacctgggtgatgctccttggggccctacctagagggactgacttttgtccattgacacaaaccccttttagtactgttttgagttttgtcattaaaacagccacctttgtattttataatttatgacagaatgaagtcattttgaatctacatgaatgaacactttggattttgttgtagtttgattctagggtagaaccagtccatgctgtttttattttttatctccgtaattgtagaatcatgtttactcaacgtttttccccagctgcctcagtaactgggcactcggaggccttggcacgggttctggaggacagacagcaattctatgagtgctcactgagatacttgctggagacctcagaaaacacaagtgccttctccacggtgcaattcagacttcagtgatctccagtggtcaaaagacatttacccttaatatcagacaacatttatattttagtgaagaaacaagttctcgggtggggaatctatgtttcactcagatttatatgtttggaggaaaaaagcctttttttgtaaaatatttaaatttatataagaaaatgttagaaaaaaatatggggagtgtatataaaacttgctttattgcatggggcaggggaagtccaggcctaatactcctaaagtaagagttgggtcctttttttcttcaatacaactgtgctgtaccttgtaaagtattttatctgctgcttatttgtggaatgaaacctcaaacaaacccaaagggggagggtagggcagggcaggcagattggaaatctgcctgcagattctattaaatacacccttttgccaaccacaat

SEQ ID NO: 35335 - DNA, 2461 bp, Homo sapiens
ggttggttatgttgtcccaggcttgtgactaacagctaatatgttagctattttataataaaagtgggattacaggcatgagccaccgctcctggctttctttaatgtaacttaaataaaatataaggttttactttatttgtgctttttggaaatgtctcctgatttttaataacagtttattatgccttgtaccagcttttttattaatatataaggtgcccactatattataccaattatgctgcttatatagttattcatatgcatctcaaaaccttccttaatgtacttataatgaggtaacaccatagcaaaattgcatctttttcattatctgcatttaatatctatagtttaccaacgatgacactgcaagcattgtgtcttctgatcgtgccagtcgtggacgaagggagagtgtggtatctgccgctgattatttcagtcgctccaatcgtaggggaagtgttgtctctgaggtggatgatatcagtatcccagatttgtccagcttggatgaaaaatctgacaaacagtatgctgaaaattatacaagaccttcatctcgaaattctgcctcagcaacaacccctctaagtggaaactcatccagacgaggaagtggggacaccagcagcttaatagatccagacacttcattaagtgaattgcgggatatctatgaccttaaggaccagatacaggatgtagaagggagatacatgcaggggcttaaagaactaaaggaatctttgtctgaagtggaagaaaaatacaagaaagccatggtttccaatgcacagttagacaatgagaagaacaatttgatctaccaagtagacacactcaaggatgttattgaagagcaggaggaacagatggcagaattttatagagaaaatgaagaaaaatcaaaggagttagaaaggcagaaacatatgtgtagtgtgctgcagcataagatggaagaacttaaagaaggcctgcggcaaagagatgagcttattgagaaacatggcttagttataatccccgatggcactcccaatggtgatgtcagtcatgaaccagtggctggagccatcactgttgtgtctcaggaagctgctcaggtcttggagtcagcaggagaagggccattagatgtaaggctacgaaaacttgctggagagaaggaagaactactgtcacagattagaaaactgaagcttcagttagaggaggaacgacagaaatgctccaggaatgatggcacagtgggtgacctggcaggactgcagaatggctcagacttgcagttcatcgaaatgcagagagatgccaatagacaaattagcgaatacaaatttaagctttcaaaagcagaacaggatataactaccttggagcaaagtattagccggcttgagggacaggttctgagatataaaactgctgctgagaatgctgagaaagttgaagatgaattgaaagcagaaaaacggaagctacaacgagagttacgaacagcactggacaagattgaggagatggagatgaccaacagccacctggccaagcggctggagaagatgaaggccaataggacagcacttctggcccagcagtaggaaaaccacccttcaacctgggtgatgctccttggggccctacctagagggactgacttttgtccattgacacaaaccccttttagtactgttttgagttttgtcattaaaacagccacctttgtattttataatttatgacagaatgaagtcattttgaatctacatgaatgaacactttggattttgttgtagtttgattctagggtagaaccagtccatgctgtttttattttttatctccgtaattgtagaatcatgtttactcaacgtttttccccagctgcctcagtaactgggcactcggaggccttggcacgggttctggaggacagacagcaattctatgagtgctcactgagatacttgctggagacctcagaaaacacaagtgccttctccacggtgcaattcagacttcagtgatctccagtggtcaaaagacatttacccttaatatcagacaacatttatattttagtgaagaaacaagttctcgggtggggaatctatgtttcactcagatttatatgtttggaggaaaaaagcctttttttgtaaaatatttaaatttatataagaaaatgttagaaaaaaatatggggagtgtatataaaacttgctttattgcatggggcaggggaagtccaggcctaatactcctaaagtaagagttgggtcctttttttcttcaatacaactgtgctgtaccttgtaaagtattttatctgctgcttatttgtggaatgaaacctcaaacaaacccaaagggggagggtagggcagggcaggcagattggaaatctgcctgcagattctattaaatacacccttttgccaaccacaat

SEQ ID NO: 35336 - DNA, 4054 bp, Homo sapiens
atcctgtacacatactcagttcctaattgtaagctcaattttggtattagcaaaagcatctgtcagtttttcctcaattactcgcacctcttcttgcctaaataaaacaaagaaacaaagaaaacaagtgtggtgtcattacacgtctcgggagttccccctggagggggaactccagagaaggggaacattaaatgttggagagatttgttaccatacattcatttatttaattaaagccgttttagttccttagcaaagcaactaatgctcacgctcacaactgaaggagaaataatatgccacaacacctaaaaacaccttggaacgcagtggagtggaaagggcagggactttaaataatgatgcttgggcttgtatccacttctactacctgttagtgtgtaaatggcagtgtctttatttgtacattggggatgttaatactatctttgtaggtaggtttaatatatggattaaatggaatactatatagaaaatgcctatcaaaattctcaaataggtgccaataaatattaatatctataaatgcaatcattattattattattgtgaataaaaataccattgcttgattttatcagtccttagcaaaacttcatacttgtaagcctgttttatctctgtggatgggcttctgaattcccttccttgagaagtattttaaagcaaggcaaacagtcagctgaagtaaggaatagatgatgaatgaggttaaaaaaaaatcacttattttaaaattaaataaatgtttgtggagtacctgttgtattcaaagccctgtgttaagtgctaggaatactattttaagccagtcagactagatttctgactttatggaatttatatcctcgtgaaagagatggaaaataagctagtaaagaaacaaaaagaaagaaatgtcagggactgtgaagagaacagataatgtgatagggaacctggaggggtctatgtgtgtgggttaccctttggatggggtgattagagatgcttctctgagaaactgacctttgagctgagacctgaaatgtgaggagccagttgcttgaagagctgggaggggagcgttctaggccagtgccaaggcctaaggtgagggagaactggtgtgtttggggaactaaaaagaggccggtatagtttatttccttcattattttgtcttacatttcctggtctttgggaatataaaaaaaggggaactgtgtaaactgagaaaaggtgcagtaaacaccctgcaaataattctgcattcagcatatatattcttaacagagttgatagctataatgaattataaattttgagaattatagtagaggtatatactgacctagaaatgcctctgttcagggtgataaatatcttaaacatgagagatttgctggtcctcaggaagtaaatgttctctgtagcataggactctagttaagatgagtaaaaaagctgattgtagagctgtgatttcatttaggaaccccttttcttttttatttttttgagtaggttaattgcagcagtttcctcattttatttcttggtactttatcacccatcaaaattttaaaaaacttttccctaattggccaatgttcttatttttttctttcttttttcttaaccttgaaagcatcttgttttttttctgaccgaaaggtatctgccgctgattatttcagtcgctccaatcgtaggggaagtgttgtctctgaggtggatgatatcagtatcccagatttgtccagcttggatgaaaaatctgacaaacagtatgctgaaaattatacaagaccttcatctcgaaattctgcctcagcaacaacccctctaagtggaaactcatccagacgaggaagtggggacaccagcagcttaatagatccagacacttcattaagtgaattgcgggatatctatgaccttaaggaccagatacaggatgtagaagggagatacatgcaggggcttaaagaactaaaggaatctttgtctgaagtggaagaaaaatacaagaaagccatggtttccaatgcacagttagacaatgagaagaacaatttgatctaccaagtagacacactcaaggatgttattgaagagcaggaggaacagatggcagaattttatagagaaaatgaagaaaaatcaaaggagttagaaaggcagaaacatatgtgtagtgtgctgcagcataagatggaagaacttaaagaaggcctgcggcaaagagatgagcttattgagaaacatggcttagttataatccccgatggcactcccaatggtgatgtcagtcatgaaccagtggctggagccatcactgttgtgtctcaggaagctgctcaggtcttggagtcagcaggagaagggccattagatgtaaggctacgaaaacttgctggagagaaggaagaactactgtcacagattagaaaactgaagcttcagttagaggaggaacgacagaaatgctccaggaatgatggcacagtgggtgacctggcaggactgcagaatggctcagacttgcagttcatcgaaatgcagagagatgccaatagacaaattagcgaatacaaatttaagctttcaaaagcagaacaggatataactaccttggagcaaagtattagccggcttgagggacaggttctgagatataaaactgctgctgagaatgctgagaaagttgaagatgaattgaaagcagaaaaacggaagctacaacgagagttacgaacagcactggacaagattgaggagatggagatgaccaacagccacctggccaagcggctggagaagatgaaggccaataggacagcacttctggcccagcagtaggaaaaccacccttcaacctgggtgatgctccttggggccctacctagagggactgacttttgtccattgacacaaaccccttttagtactgttttgagttttgtcattaaaacagccacctttgtattttataatttatgacagaatgaagtcattttgaatctacatgaatgaacactttggattttgttgtagtttgattctagggtagaaccagtccatgctgtttttattttttatctccgtaattgtagaatcatgtttactcaacgtttttccccagctgcctcagtaactgggcactcggaggccttggcacgggttctggaggacagacagcaattctatgagtgctcactgagatacttgctggagacctcagaaaacacaagtgccttctccacggtgcaattcagacttcagtgatctccagtggtcaaaagacatttacccttaatatcagacaacatttatattttagtgaagaaacaagttctcgggtggggaatctatgtttcactcagatttatatgtttggaggaaaaaagcctttttttgtaaaatatttaaatttatataagaaaatgttagaaaaaaatatggggagtgtatataaaacttgctttattgcatggggcaggggaagtccaggcctaatactcctaaagtaagagttgggtcctttttttcttcaatacaactgtgctgtaccttgtaaagtattttatctgctgcttatttgtggaatgaaacctcaaacaaacccaaagggggagggtagggcagggcaggcagattggaaatctgcctgcagattctattaaatacacccttttgccaaccacaattggctactgacatgttcattttgttataggagactttaaaacaaatcatggcaaccacatccctcttcttttgtctccttctcaaggaaaaacaatctggaatgtagaacttttaaagacttgagtttcacctttagaggtaccctgtccaagaggtttttttaaaatcatggagtgcaactactttgcagaatttatgattctcttttgctcttagtacccaggtggttttatagaaatgattattgtatctttaaagtgcttacacagaaaatatattgggggaaaatctagtgactaaaggcacataagataataaaactagactttaaaaaggt

SEQ ID NO: 35337 - DNA, 1916 bp, Homo sapiens
taaaaatgcacttaggcagtcagtaaggaaagctttattttactctggcttctctctttatcttccttttcctgttttatttttttcattgactggaaaagatttatttccctgcttgatgtgattaaacatgttttgccaaattgatgcatgagaaccagtttctatgagaagtctcttctggagatgtatatccatgtaactctgtatttcctcccatatctgactgtttgtttccaatcttttgactgctttcttgctttttatgcctttatctttgcttatttgaattaggtacttctctgctacctttcacctgctctttttctgtgccattgtttcccttgctaccttacctaaaaccaggccctagagaaacagaaagaatacattgcctgccttaggaatgagcgagatatgctcagagaggagctggctgacctgcaggagacagtgaagacgggagagaaacatggcttagttataatccccgatggcactcccaatggtgatgtcagtcatgaaccagtggctggagccatcactgttgtgtctcaggaagctgctcaggtcttggagtcagcaggagaagggccattagatgtaaggctacgaaaacttgctggagagaaggaagaactactgtcacagattagaaaactgaagcttcagttagaggaggaacgacagaaatgctccaggaatgatggcacagtgggtgacctggcaggactgcagaatggctcagacttgcagttcatcgaaatgcagagagatgccaatagacaaattagcgaatacaaatttaagctttcaaaagcagaacaggatataactaccttggagcaaagtattagccggcttgagggacaggttctgagatataaaactgctgctgagaatgctgagaaagttgaagatgaattgaaagcagaaaaacggaagctacaacgagagttacgaacagcactggacaagattgaggagatggagatgaccaacagccacctggccaagcggctggagaagatgaaggccaataggacagcacttctggcccagcagtaggaaaaccacccttcaacctgggtgatgctccttggggccctacctagagggactgacttttgtccattgacacaaaccccttttagtactgttttgagttttgtcattaaaacagccacctttgtattttataatttatgacagaatgaagtcattttgaatctacatgaatgaacactttggattttgttgtagtttgattctagggtagaaccagtccatgctgtttttattttttatctccgtaattgtagaatcatgtttactcaacgtttttccccagctgcctcagtaactgggcactcggaggccttggcacgggttctggaggacagacagcaattctatgagtgctcactgagatacttgctggagacctcagaaaacacaagtgccttctccacggtgcaattcagacttcagtgatctccagtggtcaaaagacatttacccttaatatcagacaacatttatattttagtgaagaaacaagttctcgggtggggaatctatgtttcactcagatttatatgtttggaggaaaaaagcctttttttgtaaaatatttaaatttatataagaaaatgttagaaaaaaatatggggagtgtatataaaacttgctttattgcatggggcaggggaagtccaggcctaatactcctaaagtaagagttgggtcctttttttcttcaatacaactgtgctgtaccttgtaaagtattttatctgctgcttatttgtggaatgaaacctcaaacaaacccaaagggggagggtagggcagggcaggcagattggaaatctgcctgcagattctattaaatacacccttttgccaaccacaat

SEQ ID NO: 35338 - DNA, 1587 bp, Homo sapiens
  misc_feature (48)..(48): n is a, c, g, or t
  misc_feature (50)..(51): n is a, c, g, or t
  misc_feature (70)..(70): n is a, c, g, or t
  misc_feature (77)..(77): n is a, c, g, or t
  misc_feature (111)..(111): n is a, c, g, or t
  misc_feature (115)..(115): n is a, c, g, or t
gggacccttcccaaggggaagaacaaccttcttttgggaaaagaatanannatgggctaagacagaaatnattgctncttaggaatgacgagatatctcagagaggactgnctgnctcaggagcagtgaagcgggagagaaacatggcttagttataatccccgatggcactcccaatggtgatgtcagtcatgaaccagtggctggagccatcactgttgtgtctcaggaagctgctcaggtcttggagtcagcaggagaagggccattagatgtaaggctacgaaaacttgctggagagaaggaagaactactgtcacagattagaaaactgaagcttcagttagaggaggaacgacagaaatgctccaggaatgatggcacagtgggtgacctggcaggactgcagaatggctcagacttgcagttcatcgaaatgcagagagatgccaatagacaaattagcgaatacaaatttaagctttcaaaagcagaacaggatataactaccttggagcaaagtattagccggcttgagggacaggttctgagatataaaactgctgctgagaatgctgagaaagttgaagatgaattgaaagcagaaaaacggaagctacaacgagagttacgaacagcactggacaagattgaggagatggagatgaccaacagccacctggccaagcggctggagaagatgaaggccaataggacagcacttctggcccagcagtaggaaaaccacccttcaacctgggtgatgctccttggggccctacctagagggactgacttttgtccattgacacaaaccccttttagtactgttttgagttttgtcattaaaacagccacctttgtattttataatttatgacagaatgaagtcattttgaatctacatgaatgaacactttggattttgttgtagtttgattctagggtagaaccagtccatgctgtttttattttttatctccgtaattgtagaatcatgtttactcaacgtttttccccagctgcctcagtaactgggcactcggaggccttggcacgggttctggaggacagacagcaattctatgagtgctcactgagatacttgctggagacctcagaaaacacaagtgccttctccacggtgcaattcagacttcagtgatctccagtggtcaaaagacatttacccttaatatcagacaacatttatattttagtgaagaaacaagttctcgggtggggaatctatgtttcactcagatttatatgtttggaggaaaaaagcctttttttgtaaaatatttaaatttatataagaaaatgttagaaaaaaatatggggagtgtatataaaacttgctttattgcatggggcaggggaagtccaggcctaatactcctaaagtaagagttgggtcctttttttcttcaatacaactgtgctgtaccttgtaaagtattttatctgctgcttatttgtggaatgaaacctcaaacaaacccaaagggggagggtagggcagggcaggcagattggaaatctgcctgcagattctattaaatacacccttttgccaaccacaat

SEQ ID NO: 35339 - DNA, 1373 bp, Homo sapiens
  misc_feature (35)..(36): n is a, c, g, or t
cggatctcgggaatcgtggtgctgctcaggtctgnnagtagcaggagaagggcattagatgtaaggctacgaaaacttgctggagagaaggaagaactactgtcacagattagaaaactgaagcttcagttagaggaggaacgacagaaatgctccaggaatgatggcacagtgggtgacctggcaggactgcagaatggctcagacttgcagttcatcgaaatgcagagagatgccaatagacaaattagcgaatacaaatttaagctttcaaaagcagaacaggatataactaccttggagcaaagtattagccggcttgagggacaggttctgagatataaaactgctgctgagaatgctgagaaagttgaagatgaattgaaagcagaaaaacggaagctacaacgagagttacgaacagcactggacaagattgaggagatggagatgaccaacagccacctggccaagcggctggagaagatgaaggccaataggacagcacttctggcccagcagtaggaaaaccacccttcaacctgggtgatgctccttggggccctacctagagggactgacttttgtccattgacacaaaccccttttagtactgttttgagttttgtcattaaaacagccacctttgtattttataatttatgacagaatgaagtcattttgaatctacatgaatgaacactttggattttgttgtagtttgattctagggtagaaccagtccatgctgtttttattttttatctccgtaattgtagaatcatgtttactcaacgtttttccccagctgcctcagtaactgggcactcggaggccttggcacgggttctggaggacagacagcaattctatgagtgctcactgagatacttgctggagacctcagaaaacacaagtgccttctccacggtgcaattcagacttcagtgatctccagtggtcaaaagacatttacccttaatatcagacaacatttatattttagtgaagaaacaagttctcgggtggggaatctatgtttcactcagatttatatgtttggaggaaaaaagcctttttttgtaaaatatttaaatttatataagaaaatgttagaaaaaaatatggggagtgtatataaaacttgctttattgcatggggcaggggaagtccaggcctaatactcctaaagtaagagttgggtcctttttttcttcaatacaactgtgctgtaccttgtaaagtattttatctgctgcttatttgtggaatgaaacctcaaacaaacccaaagggggagggtagggcagggcaggcagattggaaatctgcctgcagattctattaaatacacccttttgccaaccacaat

SEQ ID NO: 35340 - DNA, 4286 bp, Homo sapiens
atcctgtacacatactcagttcctaattgtaagctcaattttggtattagcaaaagcatctgtcagtttttcctcaattactcgcacctcttcttgcctaaataaaacaaagaaacaaagaaaacaagtgtggtgtcattacacgtctcgggagttccccctggagggggaactccagagaaggggaacattaaatgttggagagatttgttaccatacattcatttatttaattaaagccgttttagttccttagcaaagcaactaatgctcacgctcacaactgaaggagaaataatatgccacaacacctaaaaacaccttggaacgcagtggagtggaaagggcagggactttaaataatgatgcttgggcttgtatccacttctactacctgttagtgtgtaaatggcagtgtctttatttgtacattggggatgttaatactatctttgtaggtaggtttaatatatggattaaatggaatactatatagaaaatgcctatcaaaattctcaaataggtgccaataaatattaatatctataaatgcaatcattattattattattgtgaataaaaataccattgcttgattttatcagtccttagcaaaacttcatacttgtaagcctgttttatctctgtggatgggcttctgaattcccttccttgagaagtattttaaagcaaggcaaacagtcagctgaagtaaggaatagatgatgaatgaggttaaaaaaaaatcacttattttaaaattaaataaatgtttgtggagtacctgttgtattcaaagccctgtgttaagtgctaggaatactattttaagccagtcagactagatttctgactttatggaatttatatcctcgtgaaagagatggaaaataagctagtaaagaaacaaaaagaaagaaatgtcagggactgtgaagagaacagataatgtgatagggaacctggaggggtctatgtgtgtgggttaccctttggatggggtgattagagatgcttctctgagaaactgacctttgagctgagacctgaaatgtgaggagccagttgcttgaagagctgggaggggagcgttctaggccagtgccaaggcctaaggtgagggagaactggtgtgtttggggaactaaaaagaggccggtatagtttatttccttcattattttgtcttacatttcctggtctttgggaatataaaaaaaggggaactgtgtaaactgagaaaaggtgcagtaaacaccctgcaaataattctgcattcagcatatatattcttaacagagttgatagctataatgaattataaattttgagaattatagtagaggtatatactgacctagaaatgcctctgttcagggtgataaatatcttaaacatgagagatttgctggtcctcaggaagtaaatgttctctgtagcataggactctagttaagatgagtaaaaaagctgattgtagagctgtgatttcatttaggaaccccttttcttttttatttttttgagtaggttaattgcagcagtttcctcattttatttcttggtactttatcacccatcaaaattttaaaaaacttttccctaattggccaatgttcttatttttttctttcttttttcttaaccttgaaagcatcttgttttttttctgaccgaaaggtatctgccgctgattatttcagtcgctccaatcgtaggggaagtgttgtctctgaggtggatgatatcagtatcccagatttgtccagcttggatgaaaaatctgacaaacagtatgctgaaaattatacaagaccttcatctcgaaattctgcctcagcaacaacccctctaagtggaaactcatccagacgaggaagtggggacaccagcagcttaatagatccagacacttcattaagtgaattgcgggatatctatgaccttaaggaccagatacaggatgtagaagggagatacatgcaggggcttaaagaactaaaggaatctttgtctgaagtggaagaaaaatacaagaaagccatggtttccaatgcacagttagacaatgagaagaacaatttgatctaccaagtagacacactcaaggatgttattgaagagcaggaggaacagatggcagaattttatagagaaaatgaagaaaaatcaaaggagttagaaaggcagaaacatatgtgtagtgtgctgcagcataagatggaagaacttaaagaaggcctgcggcaaagagatgagcttattgagaaacatggcttagttataatccccgatggcactcccaatggtgatgtcagtcatgaaccagtggctggagccatcactgttgtgtctcaggaagctgctcaggtcttggagtcagcaggagaagggccattagatgtaaggctacgaaaacttgctggagagaaggaagaactactgtcacagattagaaaactgaagcttcagttagaggaggaacgacagaaatgctccaggaatgatggcacagtgggtgacctggcaggactgcagaatggctcagacttgcagttcatcgaaatgcagagagatgccaatagacaaattagcgaatacaaatttaagctttcaaaagcagaacaggatataactaccttggagcaaagtgtaagtacttctatatggtactaagttatttaaatgtccttcctgcatctaagtggctaacaacccatgagtgcctgggttgcctttgcagttggatcaataatagttctgtattaaaatagaaaagccagcagagagcacttgttgggacattttagccttctgttttctctaaaaccataggaaactatagctatcagtttttgtagatatttcaggagaattcaagatcatcatttgtaataaaatcccttacgcattccaaaaagtgtaagaacttttccatttagtgtctcttcctatattgctttggcacttaaacaatatggtcataataaaacttagcatgggaaattggccctaaaatgactctacagctgtaatcctctctggggacattacttgatttataaatagcaactgagttctgagaggacttatgagtcacccttaggggacttgttagtagattacttggcatttataatgacattgtatttccatcctggctaccaaaaagtggtgacttctagtgcccagtactagaggcctatgttctcatacttacagattagccggcttgagggacaggttctgagatataaaactgctgctgagaatgctgagaaagttgaagatgaattgaaagcagaaaaacggaagctacaacgagagttacgaacagcactggacaagattgaggagatggagatgaccaacagccacctggccaagcggctggagaagatgaaggccaataggacagcacttctggcccagcagtaggaaaaccacccttcaacctgggtgatgctccttggggccctacctagagggactgacttttgtccattgacacaaaccccttttagtactgttttgagttttgtcattaaaacagccacctttgtattttataatttatgacagaatgaagtcattttgaatctacatgaatgaacactttggattttgttgtagtttgattctagggtagaaccagtccatgctgtttttattttttatctccgtaattgtagaatcatgtttactcaacgtttttccccagctgcctcagtaactgggcactcggaggccttggcacgggttctggaggacagacagcaattctatgagtgctcactgagatacttgctggagacctcagaaaacacaagtgccttctccacggtgcaattcagacttcagtgatctccagtggtcaaaagacatttacccttaatatcagacaacatttatattttagtgaagaaacaagttctcgggtggggaatctatgtttcactcagatttatatgtttggaggaaaaaagcctttttttgtaaaatatttaaatttatataagaaaatgttagaaaaaaatatggggagtgtatataaaacttgctttattgcatggggcaggggaagtccaggcctaatactcctaaagtaagagttgggtcctttttttcttcaatacaactgtgctgtaccttgtaaagtattttatctgctgcttatttgtggaatgaaacctcaaacaaacccaaagggggagggtagggcagggcaggcagattggaaatctgcctgcagattctattaaatacacccttttgccaaccacaat

SEQ ID NO: 35341 - DNA, 3429 bp, Homo sapiens
atcctgtacacatactcagttcctaattgtaagctcaattttggtattagcaaaagcatctgtcagtttttcctcaattactcgcacctcttcttgcctaaataaaacaaagaaacaaagaaaacaagtgtggtgtcattacacgtctcgggagttccccctggagggggaactccagagaaggggaacattaaatgttggagagatttgttaccatacattcatttatttaattaaagccgttttagttccttagcaaagcaactaatgctcacgctcacaactgaaggagaaataatatgccacaacacctaaaaacaccttggaacgcagtggagtggaaagggcagggactttaaataatgatgcttgggcttgtatccacttctactacctgttagtgtgtaaatggcagtgtctttatttgtacattggggatgttaatactatctttgtaggtaggtttaatatatggattaaatggaatactatatagaaaatgcctatcaaaattctcaaataggtgccaataaatattaatatctataaatgcaatcattattattattattgtgaataaaaataccattgcttgattttatcagtccttagcaaaacttcatacttgtaagcctgttttatctctgtggatgggcttctgaattcccttccttgagaagtattttaaagcaaggcaaacagtcagctgaagtaaggaatagatgatgaatgaggttaaaaaaaaatcacttattttaaaattaaataaatgtttgtggagtacctgttgtattcaaagccctgtgttaagtgctaggaatactattttaagccagtcagactagatttctgactttatggaatttatatcctcgtgaaagagatggaaaataagctagtaaagaaacaaaaagaaagaaatgtcagggactgtgaagagaacagataatgtgatagggaacctggaggggtctatgtgtgtgggttaccctttggatggggtgattagagatgcttctctgagaaactgacctttgagctgagacctgaaatgtgaggagccagttgcttgaagagctgggaggggagcgttctaggccagtgccaaggcctaaggtgagggagaactggtgtgtttggggaactaaaaagaggccggtatagtttatttccttcattattttgtcttacatttcctggtctttgggaatataaaaaaaggggaactgtgtaaactgagaaaaggtgcagtaaacaccctgcaaataattctgcattcagcatatatattcttaacagagttgatagctataatgaattataaattttgagaattatagtagaggtatatactgacctagaaatgcctctgttcagggtgataaatatcttaaacatgagagatttgctggtcctcaggaagtaaatgttctctgtagcataggactctagttaagatgagtaaaaaagctgattgtagagctgtgatttcatttaggaaccccttttcttttttatttttttgagtaggttaattgcagcagtttcctcattttatttcttggtactttatcacccatcaaaattttaaaaaacttttccctaattggccaatgttcttatttttttctttcttttttcttaaccttgaaagcatcttgttttttttctgaccgaaaggtatctgccgctgattatttcagtcgctccaatcgtaggggaagtgttgtctctgaggtggatgatatcagtatcccagatttgtccagcttggatgaaaaatctgacaaacagtatgctgaaaattatacaagaccttcatctcgaaattctgcctcagcaacaacccctctaagtggaaactcatccagacgaggaagtggggacaccagcagcttaatagatccagacacttcattaagtgaattgcgggatatctatgaccttaaggaccagatacaggatgtagaagggagatacatgcaggggcttaaagaactaaaggaatctttgtctgaagtggaagaaaaatacaagaaagccatggtttccaatgcacagttagacaatgagaagaacaatttgatctaccaagtagacacactcaaggatgttattgaagagcaggaggaacagatggcagaattttatagagaaaatgaagaaaaatcaaaggagttagaaaggcagaaacatatgtgtagtgtgctgcagcataagatggaagaacttaaagaaggcctgcggcaaagagatgagcttattgagaaacatggcttagttataatccccgatggcactcccaatggtgatgtcagtcatgaaccagtggctggagccatcactgttgtgtctcaggaagctgctcaggtcttggagtcagcaggagaagggccattagatgtaaggctacgaaaacttgctggagagaaggaagaactactgtcacagattagaaaactgaagcttcagttagaggaggaacgacagaaatgctccaggaatgatggcacagtgggtgacctggcaggactgcagaatggctcagacttgcagttcatcgaaatgcagagagatgccaatagacaaattagcgaatacaaatttaagctttcaaaagcagaacaggatataactaccttggagcaaagtattagccggcttgagggacaggttctgagatataaaactgctgctgagaatgctgagaaagttgaagatgaattgaaagcagaaaaacggaagctacaacgagagttacgaacagcactggacaagattgaggagatggagatgaccaacagccacctggccaagcggctggagaagatgaaggccaataggacagcacttctggcccagcactgcctcagtaactgggcactcggaggccttggcacgggttctggaggacagacagcaattctatgagtgctcactgagatacttgctggagacctcagaaaacacaagtgccttctccacggtgcaattcagacttcagtgatctccagtggtcaaaagacatttacccttaatatcagacaacatttatattttagtgaagaaacaagttctcgggtggggaatctatgtttcactcagatttatatgtttggaggaaaaaagcctttttttgtaaaatatttaaatttatataagaaaatgttagaaaaaaatatggggagtgtatataaaacttgctttattgcatggggcaggggaagtccaggcctaatactcctaaagtaagagttgggtcctttttttcttcaatacaactgtgctgtaccttgtaaagtattttatctgctgcttatttgtggaatgaaacctcaaacaaacccaaagggggagggtagggcagggcaggcagattggaaatctgcctgcagattctattaaatacacccttttgccaaccacaat

SEQ ID NO: 35342 - DNA, 2177 bp, Homo sapiens
atcctgtacacatactcagttcctaattgtaagctcaattttggtattagcaaaagcatctgtcagtttttcctcaattactcgcacctcttcttgcctaaataaaacaaagaaacaaagaaaacaagtgtggtgtcattacacgtctcgggagttccccctggagggggaactccagagaaggggaacattaaatgttggagagatttgttaccatacattcatttatttaattaaagccgttttagttccttagcaaagcaactaatgctcacgctcacaactgaaggagaaataatatgccacaacacctaaaaacaccttggaacgcagtggagtggaaagggcagggactttaaataatgatgcttgggcttgtatccacttctactacctgttagtgtgtaaatggcagtgtctttatttgtacattggggatgttaatactatctttgtaggtaggtttaatatatggattaaatggaatactatatagaaaatgcctatcaaaattctcaaataggtgccaataaatattaatatctataaatgcaatcattattattattattgtgaataaaaataccattgcttgattttatcagtccttagcaaaacttcatacttgtaagcctgttttatctctgtggatgggcttctgaattcccttccttgagaagtattttaaagcaaggcaaacagtcagctgaagtaaggaatagatgatgaatgaggttaaaaaaaaatcacttattttaaaattaaataaatgtttgtggagtacctgttgtattcaaagccctgtgttaagtgctaggaatactattttaagccagtcagactagatttctgactttatggaatttatatcctcgtgaaagagatggaaaataagctagtaaagaaacaaaaagaaagaaatgtcagggactgtgaagagaacagataatgtgatagggaacctggaggggtctatgtgtgtgggttaccctttggatggggtgattagagatgcttctctgagaaactgacctttgagctgagacctgaaatgtgaggagccagttgcttgaagagctgggaggggagcgttctaggccagtgccaaggcctaaggtgagggagaactggtgtgtttggggaactaaaaagaggccggtatagtttatttccttcattattttgtcttacatttcctggtctttgggaatataaaaaaaggggaactgtgtaaactgagaaaaggtgcagtaaacaccctgcaaataattctgcattcagcatatatattcttaacagagttgatagctataatgaattataaattttgagaattatagtagaggtatatactgacctagaaatgcctctgttcagggtgataaatatcttaaacatgagagatttgctggtcctcaggaagtaaatgttctctgtagcataggactctagttaagatgagtaaaaaagctgattgtagagctgtgatttcatttaggaaccccttttcttttttatttttttgagtaggttaattgcagcagtttcctcattttatttcttggtactttatcacccatcaaaattttaaaaaacttttccctaattggccaatgttcttatttttttctttcttttttcttaaccttgaaagcatcttgttttttttctgaccgaaaggtatctgccgctgattatttcagtcgctccaatcgtaggggaagtgttgtctctgaggtggatgatatcagtatcccagatttgtccagcgtgagtgtattgcatggggtggttggttatgttgtcccaggcttgtgactaacagctaatatgttagctattttataataaaagtgggaacttgatttattgtcttaagaaatatttgtttgggccgggcatggtggctcacacttgtaatcccagcactttgagagaccagaacaggcagatcacctgaggtcaggagttcgagaccagcctggccaacgtggtgaaactctgtctctattaaaaatacaaaaaaaattagctgggtgtgggggcgcacacctgtaatcccagctactctggaggctgaggcaggaatatcgcttgaacctaggaggtggaggttgcagtgagccgagaccacaccactgcactgtatcctgggcaacagagtgagactccatctc

SEQ ID NO: 35343 - DNA, 2901 bp, Homo sapiens
atcctgtacacatactcagttcctaattgtaagctcaattttggtattagcaaaagcatctgtcagtttttcctcaattactcgcacctcttcttgcctaaataaaacaaagaaacaaagaaaacaagtgtggtgtcattacacgtctcgggagttccccctggagggggaactccagagaaggggaacattaaatgttggagagatttgttaccatacattcatttatttaattaaagccgttttagttccttagcaaagcaactaatgctcacgctcacaactgaaggagaaataatatgccacaacacctaaaaacaccttggaacgcagtggagtggaaagggcagggactttaaataatgatgcttgggcttgtatccacttctactacctgttagtgtgtaaatggcagtgtctttatttgtacattggggatgttaatactatctttgtaggtaggtttaatatatggattaaatggaatactatatagaaaatgcctatcaaaattctcaaataggtgccaataaatattaatatctataaatgcaatcattattattattattgtgaataaaaataccattgcttgattttatcagtccttagcaaaacttcatacttgtaagcctgttttatctctgtggatgggcttctgaattcccttccttgagaagtattttaaagcaaggcaaacagtcagctgaagtaaggaatagatgatgaatgaggttaaaaaaaaatcacttattttaaaattaaataaatgtttgtggagtacctgttgtattcaaagccctgtgttaagtgctaggaatactattttaagccagtcagactagatttctgactttatggaatttatatcctcgtgaaagagatggaaaataagctagtaaagaaacaaaaagaaagaaatgtcagggactgtgaagagaacagataatgtgatagggaacctggaggggtctatgtgtgtgggttaccctttggatggggtgattagagatgcttctctgagaaactgacctttgagctgagacctgaaatgtgaggagccagttgcttgaagagctgggaggggagcgttctaggccagtgccaaggcctaaggtgagggagaactggtgtgtttggggaactaaaaagaggccggtatagtttatttccttcattattttgtcttacatttcctggtctttgggaatataaaaaaaggggaactgtgtaaactgagaaaaggtgcagtaaacaccctgcaaataattctgcattcagcatatatattcttaacagagttgatagctataatgaattataaattttgagaattatagtagaggtatatactgacctagaaatgcctctgttcagggtgataaatatcttaaacatgagagatttgctggtcctcaggaagtaaatgttctctgtagcataggactctagttaagatgagtaaaaaagctgattgtagagctgtgatttcatttaggaaccccttttcttttttatttttttgagtaggttaattgcagcagtttcctcattttatttcttggtactttatcacccatcaaaattttaaaaaacttttccctaattggccaatgttcttatttttttctttcttttttcttaaccttgaaagcatcttgttttttttctgaccgaaaggtatctgccgctgattatttcagtcgctccaatcgtaggggaagtgttgtctctgaggtggatgatatcagtatcccagatttgtccagcttggatgaaaaatctgacaaacagtatgctgaaaattatacaagaccttcatctcgaaattctgcctcagcaacaacccctctaagtggaaactcatccagacgaggaagtggggacaccagcagcttaatagatccagacacttcattaagtgaattgcgggatatctatgaccttaaggaccagatacaggatgtagaagggagatacatgcaggggcttaaagaactaaaggaatctttgtctgaagtggaagaaaaatacaagaaagccatggtttccaatgcacagttagacaatgagaagaacaatttgatctaccaagtagacacactcaaggatgttattgaagagcaggaggaacagatggcagaattttatagagaaaatgaagaaaaatcaaaggagttagaaaggcagaaacatatgtgtagtgtgctgcagcataagatggaagaacttaaagaaggcctgcggcaaagagatgagcttattgagaaacatggcttagttataatccccgatggcactcccaatggtgatgtcagtcatgaaccagtggctggagccatcactgttgtgtctcaggaagctgctcaggtcttggagtcagcaggagaagggccattagatgtaaggctacgaaaacttgctggagagaaggaagaactactgtcacagattagaaaactgaagcttcagttagaggaggaacgacagaaatgctccaggaatgatggcacagtgggtgacctggcaggactgcagaatggctcagacttgcagttcatcgaaatgcagagagatgccaatagacaaattagcgaatacaaatttaagctttcaaaagcagaacaggatataactaccttggagcaaagtattagccggcttgagggacaggttctgagatataaaactgctgctgagaatgctgagaaagttgaagatgaattgaaagcagaaaaacggaagctacaacgagagttgcgaacagcactggactgatgggagaagatgccagtcttctcccatcagccagtcttgctcccatctacgtcattgtgtgacacgtcattggactgctgttattgataaccaacagaggtcatgtatagaatccgctgatgg

SEQ ID NO: 35344 - DNA, 1529 bp, Homo sapiens
tcggccgctcaggctgcggctcctcccggggccggttcccgctgtctcagccgcggcgcagagggcacatcggcctgaccgactagccggctgccagtgccgggagccgccgcgtccatccccgcccgcctggccggggacccaggactgagtcgtccagctgcgcccctcgcccatagccccagcgggcgccgggcgggcgagcagctcttcggcccttcccggacagcgacgcagtcgcagcgcgcgccctaacacagatgtgggaagataaatgaaggggtctagatgtaaatgtcagtggaaaggagagctaccatcactaagggtctcactctgatgcccacgctggagtccagtggtatgaacacagatcactgcagcctcgacttcctgggctcgggtgattctcccacctcagcctcccaagtagctgagactacatgcatacatcatcacacagggccaatttttgtattttttgtagaaacggggtgtccgcatgttgcccacgctggtctctaactcctgggctcacatcgttcacccaccttggcctcccaaagtgctgggattacaggcatgagccaccgctcctggctttctttaatgtaacttaaataaaatataaggttttactttatttgtgctttttggaaatgtctcctgatttttaataacagtttattatgccttgtaccagcttttttattaatatataaggtgcccactatattataccaattatgctgcttatatagttattcatatgcatctcaaaaccttccttaatgtacttataatgaggtaacaccatagcaaaattgcatctttttcattatctgcatttaatatctatagtttaccaacgatgacactgcaagcattgtgtcttctgatcgtgccagtcgtggacgaagggagagtgtggtgagcatgatttgcatgcaaagaaataagatgagttttaaatgacagcaatgcatgatcacatgaagtctgttggaaagtgaagtttgcatttgacaaaaagagcattttcctcaaatttagttatataaatattttgccttataaaacatgttgagaacacatattctctgtgggctgtgcaagctttcattaataatttgcctttttacatctcttaggagtgaatcattatttgaaaagtttttactttttcttctttgttgctgttttatgcacatacatgtgtgtgcagttcaccaaagacaaatttcttcagcaaaattaatgtttccatattgtataaaactcataactatggattacaaatcatgttaccattaattgctttctatattgttgtatttagatttaaccagtgtttatccacctgttaagacctgtaatccagtcagggtggctcatgcctataatcccagctacttgggagactgaggtgggaggattgcttgagcccaggagtttgaggctgcagtgagctatgattgcatcactgcactccagtgtgggtagcaaagtgagactgtgcctctcaaaag

SEQ ID NO: 35345 - DNA, 180 bp, Homo sapiens
aggactgcagaatggctcagacttgcagttcatcgaaatgcagagtaggtaccaggggacaggccagtcccagtctgtatatagactgtgtcccaggggtgggtttgtcagcaggttgctggtatcttgtaatacacttttcttttttttttttttttgagatgggagtctcactctgtc

SEQ ID NO: 35346 - DNA, 304 bp, Homo sapiens
tgtatttcctcccatatctgactgtttgtttccaatcttttgactgctttcttgctttttatgcctttatctttgcttatttgaattaggtacttctctgctacctttcacctgctctttttctgtgccattgtttcccttgctaccttacctaaaaccaggccctagagaaacagaaagaatacattgcctgccttaggaatgagcgagatatgctcagagaggagctggctgacctgcaggagacagtgaagacgggagaggtatgttagcattagcctggaattcaggtccctcactgttt

SEQ ID NO: 35347 - DNA, 256 bp, Homo sapiens
taggcttcaaacatcattgaacttggaaaactcaagatcacttttttcctcccaaaaaaagtcaacttgctaagcatctttactgatttttatctttgttcttttctagttggatgaaaaatctgacaaacagtatgctgaaaattatacaagagtgagtatgtaaattcctaagggaaattctcaaggtcaattaaacttgctatctgtaacttgttcattatttattttacaacaattggtctgatgtagctgc

SEQ ID NO: 35348 - DNA, 497 bp, Homo sapiens
ttttttttgagatggagtcttgctctgtcgcccaggctggagtgcagtggcacgatctcagctcattgcaacctccgcctcccaggttcaagtgattcttctgcctcagcctcccgagtacctgggactacaggcgctcgccaccaagcccagctaatttttgcatttttagtagagacagggtttcaccatattggccaggctggtctcgaactcctgacctcgtgatccacccactttggcttcccaaaatgcagggattacaggtgtgagccaccgcgcctggctgtaacacaataatttaagatgacaacattcgaggaagttagaactgagaagagggtacacagcattttctgcgagattgactcaactttgattccatcaaggaaacaaaaatattgtatagaaatttactcttcattctctcccaaaacatttaagagtttttcatttttctttgtaagaatataaaaggttttcctaaactctttgca

SEQ ID NO: 35349 - DNA, 628 bp, Homo sapiens
aggtggtagaaatcataactgcctccagaaatcaggagggcccacgcagtacaggacttggcaggccctggtggcctaaggtcagccagagtgcagatgcaatgcagcaactatagtaccagcattattctagaaagttcttacttcttggaagtactgacttgtaagtaaaagagcattttaacttgatcatattcactctggagtcttctacatctgaatctaaaggggaactgtattcttcctgcaaatttgggattctctaaataaagttccagggcaccagaggttccactgggttagacctttgatttattttaatgaagagcccttcttctttgttgatgtctgacagcacattcacagtgatccagtcatttttggggtaagatagaaggaatccaggtagaatacaatataaaaatgtctcaaactaggcaagagaagagtctagtcctgtggtaggtcatatttgtcaaaatatttgctaccctcttagctgttcatcctcactgagcctctctcttcaaaagattatccttcatatcccaacactgtgaggcttgagcacgtgctttgctttgaacaatgaaatacaagggaagcaatgtaatccatttctgagcca

SEQ ID NO: 35350 - DNA, 380 bp, Homo sapiens
atatgaaacaaaaagtggcaattattgcaggtttccttttagtttacaaaagtactggaaactaaatcatatttcttccctccaaatttcacccattcctgactttgaatcaattgcagaaatgcaggtgtgttactttgttgatcaataactttggaacaattatggatcaattctatggtcactctgaattttcatgtcattaatcacataaaaattgataatacctcattctgtattacaatatgattttattttgccaaaggcaagacacctatagttgagctgtattttgggggattgggtgaggaaggacttctgatcttatctcaacaaaaaactggccagtatttttgttaatgtaaagcttccttttcttt

SEQ ID NO: 35351 - DNA, 179 bp, Homo sapiens
gtctctaccaaaaaaattttttttaaaagttagccaggcatggtggcacgtgcctgtagtcccagttacttgggaagagtgggagaatccgttaagcctgggaggttgaggctgctgtaggctgaaatcacatcactgcactccagcctgggtgacagagtgagaccctgtctcttaaa

SEQ ID NO: 35352 - DNA, 856 bp, Homo sapiens
acacaccccagctgtggctgccctgaatagtggactgcagtggttgatggcacgtgttaaattgtgtctttgttatgggaggtgagaatttggctggggacaggaagttgaccgaaattttcctattaagatcagccacttctggtgatagtagctttgtccaacctcatccacctgggcacaggaatacacttttatgaaaaggcttttgcccttgagcctgtggtagttgactcttttggagaactgggctggaccacccagaagatccattttacaatgacgaatggcataaccaagtacccttaaccaaagcaagctgagtgacttccccctttcattgacgaccttgattccactctggtggaaagagaagttaaattcgaggaaactttgccaagaaagagtagccaaggcaagggggaagagtgaattactccctgaagcctggaggtgagtgctcctcccaccttcaggagacatgtctttctgccagccaccagagaagaagcatgggggtgtggcttttggctgtttttttaataacctcccaggttttgtctgcttatagaaaatgaaaggcttagtaccagtgaatgaccaaatgttatttagcccatctgtagaataccacactctctctacatctagattttttcctctttccaaatatatttatcaatacagatgttagtactttcttctcttttaatattttctaattatatttaatcagtactctaaatataattcaacaggtgactttgcagaagtagactgtcagagtaacctacatattaaaaattgacagtaataaaaatggtaaagagttttaaccttgatgtttattgttatg

SEQ ID NO: 35353 - DNA, 717 bp, Homo sapiens
ggaggaaagaggtgagcctaattagcgcccatgttcccttccaagcctgttctgcagttgtcactaatacacagtagacatcactttttgctgttagtgtgttcccgaacaaactcttttttaatccaactattgtaaaggctgtaaatggctttgctggttcagtaaccccatgctaaattctttttttccttgttttcaatcctgctccttctgtatgtaaattattttttaaagaaaaaaaaataccttgagaaataggatagcacaatggttaaggagcatggactttgcagctagactgcctagtttagaatcctggctctgccatgtattagtcatgtggccttggtcatgttacttaacctttctatacttctgttacctcacctgtaaaatggggataataacagtacctgtctcatagagttgtgagggttaaatgaatatgtaaaagtgtttggcacatggcttggcatgtagtaagtgctataaaatgtttgctctgattactgttattgttgctataatttactctgttgacctgggcctttcatatgttggtaggctttaaaggatttttctccaagcattcgtcattctgctgcgtgagcacataccttgtgattagatgtttgactatttaaacaggcaaaactaggaatacatttctgcatatatatcaattttacattcttagagggatcagaatgtttg

SEQ ID NO: 35354 - DNA, 490 bp, Homo sapiens
cacataagagcctgccaatgaccacagattctcagaggaaccttttttttaaaactccacccacagctaacactaagattacttccttcctgaatacatatcaccagacgctctcctttgtcccattgtcgctatattgccaaatgccttctctcgatttttggtcaaagtcctaatcatttcaggtccaattaaaaactcagtatctcttgagccttccccacaccatatgttgcaaaattatctggtctttccacattcacagcgttcacaggccactgttgcattacctattagtctgtgagtgtacacgttcggaccccacactggattctgagctttttgaaagcccagagctgtatcatttatttctggagccccagttcctggctcactgttgtgcagagtagttgtttcatagatatttattgatcaaatagaatttatggcaaaaccagtacttctcttctttttgaatagtaataaaaaa

SEQ ID NO: 35355 - DNA, 517 bp, Homo sapiens
ctgcaggtcaccatctccttgtccaccgctgtggtcccagtacctaggctggggcctgacaggtggtagatgctccacagaggtgctcgctgccctccccgcattctcttgtttcatcttcacagctccactgtgtgagtgctgccgttatccccactttccgaatgcagaaaccgagactcagaaggggaggtggcttgccagagccaggcaggtaggcaaggggtggggagaatggtgggaatcacgattttaacccaggtctttttgactccaaagtccgaacagcatgcctcaccctctggacaggtgtttaaacaggcatgtgcatgtcacccagtcagagccagtgactcatcagcaacgttggttggagcttccaggaaagagatgccatctgccccactggagagcctcgggttgaaggcgaagccgtggaagacggaccagagcctggaggggatcaggcctgcagtggcatcgtcggaggcactgcatcacgcctcacctgaacgag

SEQ ID NO: 35356 - DNA, 647 bp, Homo sapiens
tcacaaatattttcgaggtccttgcccccaagagggtagacagaataaaaaggaggaaggaagtgacttggaaaaaattaagttgggtaaggaatataagagaatgctacgtagaaggatgtgtgttgtgaatgcaatagtttctgtagtattgtcaaagttctctgatcatttcagtatgtgaaggtaaacttagataactgggggaaggaactatatatttactacattgtaaaagaataattgtagacagaagatctactttgggtgattaaatgttgaaaacaagtggtgggagagagaagttagtgttgattgtgatcacacacttttctatacagtaatttgtttgatcactcatgataatgccttacattttgtatgtactaaataaatgagttctctagaaattctatgttgtggtgataaagaattacgttcagattgaagattcgaacagctgtgcaaccttctcaacatttaagaaactgcgaacaagcatagaaagaagattaaagccttttaaataagattcttttttttcagcctctttttggaacattttattgtgaaaaggtttcataaatactgtcaatacatcacgttcagtcatttgcaattgtatttcaaaaattcagttggcctgc

SEQ ID NO: 35357 - DNA, 1165 bp, Homo sapiens
gcaatgatgatgaaaactggaaacaagcaggtggccattaccgcaattaaggctaaaatctaggttaagaaaggggagagagaactgcaaatgaaaagggcaaagatgcagtgaggatgagaagttacaaaagctaaaaagaaggaagtaatactaagaggtgttacagagtccagctcaaaggacagaaaaaaggaggaacttcagataacaatttttaaaatacttattaacagccaattatgagtcaggtactttacaaggtgttcaatggacattatctattttacttatttttattttatctttttggtttactttttttctttttttttcattttacattatctattttaatcctcacaatatccctgtaaggtaggtatattaccttcagtttccagatcaagaaactgaagtgcacagaagtttgaagtaacttactcaaaccacttcactaataaccagggtaggcaggactcaaatacagacagtttgcctccaaaatacatggtcctaatcacctccctatgttgtgtccatgcagtcacgagtttggcatgaggagagctggaggaagagcccaggagacagtgaagaggaagcaagaggctgtatatgtagccagctgggtttgggggcacctcatgagtatcccatagcacaaacgggcaaactctgttactggcacattaactaaaagacaaaactccacataaacctgagtccttccaaccaacccggagacttacccaaatctaatctaaataacaacaacaaaaaagaaaaaatcactatgagcctgtaagtcattaagggggtacatcttcaaatgacatgctatcactaaccatggcttaaaaccccacagatccctaaaacttaaagtataataataaataaaaataaaaaaatttaaaaattaaaaaaaaattttacatttatctttaagaatttgtgtttgagaataattagctcttgccattctactactctgtatgtatgtgggttatcattcttgtgtctttcttctgcttgagtaaataaaaagcaagaacaacaacaaaaaaccccacagaggagaagacttagcaattgtagtgaatatgggctgaattcaaaaagtggcctggagattttgccttgaattacttgggtgggataa

SEQ ID NO: 35358 - DNA, 264 bp, Homo sapiens
cgcacaaccaaccaggccctcaaaaccttcgccctggtggcggctggccgctccctcctggccagctcctccgtggggtcctcgtagcaaaggcgaatttaagggttgcccgggcgcccctcgctccaggcgggtagctgtggggacctacacccgcggtactccctgagcggccggtccctgcctggagtgccctggtagggccggcggcggctccgtttgggacggatcctgcgttgaatttgacttttcgagggcggccgc

SEQ ID NO: 35359 - DNA, 280 bp, Homo sapiens
gaaacctaaagtattttgcagtgacttagtcttattatctgaaatgtaattgttaaaggctgatcttaatttgcttcctctactgatggcagagagctaagagagtatacctagcaacttaaatttaccttttccatgacctttcccaccacacacacacacacacacacacacgcaatcaagatctggactagatgaattgctgcatgctcagctggcccagtttaacccttttgggagaatttgtatttgtcaaggaatgctgagtaactatattgca

SEQ ID NO: 35360 - DNA, 303 bp, Homo sapiens
tctgcaatgcccatcctccatgtctctcttcctgtctctgtgtcactgtctctctcgtcttgttgcacctagttctatccatctaccaacgacaaagaggctatcaaacccacactgctttcacagcatcatccccctgcctaagaacctcccatggctccctcctgcctcacagataccatctacacctcctggtttgacattcaagtgcttctgccacccaccatacccaggtccttcttcagcctcatctctacacacttggccagtcctctaacttcctcccaccctgaatcttataag

SEQ ID NO: 35361 - DNA, 531 bp, Homo sapiens
aatcaaggtaattagcacatcgcctcatgcatttagcacttctttgtcttgtgaacattcaaaatcctctcttctagctttgtaaaaatgcacaataaattatagttaactatattcaccttacagtactacagaaacatttaaaacattatttcttgagatcttggttctttaggtgactgttgtggtggtgattaatcagtatcatgaaaatacttatgtttgtctatcatggtatttcagaagactacagttatagagctggggtgcatacaattgcccaaccacaatgatatccatttacatatttcaccttttgacctatttcttcatgaatatagttcatctgtttataactcttatacttgtgtgactgttgatagaaggcctgaatgtttatgcttgcaaaaatgtgtgttatcgcttattttattgtgtaaggtgatctttgaagtgttctgttgtgtttttatttttgtgtttttatatgttactcaaataaataccttttaaaaatgtaaataaatatat

SEQ ID NO: 35362 - DNA, 360 bp, Homo sapiens
gagttcgagaccagtcaggccaacatggtgaaacctcatctctactaaaaatacaaaaattacctgggcgtggtggtgcacacctgtagtcccagctactcaggaggctgaggtatgagaatcgcttgaacctgggaggcagaggttgcagtgagcaaagatcatgccactgcaccccagcctgggtgacagagcaagactccattttgaaaaaaaaaaaaagtgacttaattataaaaaaagagaatgagacttgaatatagaaggacaggatagaaataatctaattaggctgggcaaggtggcccacgcctgtaatcccagcacttggggaggccaaggcaggcagatcactggagg

SEQ ID NO: 35363 - DNA, 562 bp, Homo sapiens
cagcctgggcaacagagtgagactccatctcaaaaaaaagaaagatactatgccagtgctatcagacagatgaaacacttcagcctggtgtgcccaagtaaggctttctggtagatgatgcctgaactgagtcctaaaggacggagtaaatgttcatcaggaaagagggagggaaagggtattgtagacagtgtagccagtaaaaaagacttggaaatgtgagcatggagtgtgaatccggtctaagaagaggagtaagacgaaaaaagactggctgggcttggtggctcacacctgtaatcccaacaggttgggaggccaaggctggtcgattatttgcgtccaggagttcaagaccagtttgggcaacagggcaaaaccctgtctctactaaaaacataaaaaattagctgggcatggtggtatacgcctgtggtcccagatactcaagaggccgaggtgggaagatcacttcagcccgggaggcagaggttgcagtgagctgagatcacaccactgaactccaatgtgggtgacagagtgagaccatgtctcaaaaaaa

SEQ ID NO: 35364 - DNA, 368 bp, Homo sapiens
agaaagagagccctcaccacaaactgaccttgccagaccttgatctgggacttcgaacatccacagctgtgagaaaattaatgttctgttgtttaagccccctagtctgtatctgcaatattttgctatcacagcctaagcagactaatgcaggctccaaattggtttccttctccataattaccctagcgccatgtccaaaccatctgaagcactattccagagtgacctttataaaaatgccattttgatcacattattcctatatgtaagaaaaaaaaaatcaatcaatggctgtctccactgccagagtccaaacagtttcctctctaatggccttatctaccctcactacatcattgcctacc

SEQ ID NO: 35365 - DNA, 321 bp, Homo sapiens
gtgtagacattgcatcatgtttatttgaaatggataaatagaaaaagggactgaatggattagtattctagatgtgtgccttatagtaaagaagaggataacgatgacactatggaattacgtttttttaggaatatagaaccccaagaagattttgttcattaggttttattctgttgatctgatatggataagatctctgggaaatcatatatggtataactatatagattgaattatagtttaaggtacatagatttagtttctagccctaactcattttgtaaaaacaatttcttctgcctccttttcagagagtac

SEQ ID NO: 35366 - DNA, 816 bp, Homo sapiens
caggattcaataaaagaagtgctaagagggaaatgttacagtgataaatacctacattaaaaaataagaaagatctaactcgaacaacctaactttacaaataaacaattagaaaaagagaaactaactaaacccaaagttagcataatgaagtaaataataaagattagaatataaataaaataactataaaatagaaaacaatagaaaaatcaacaaagttagagttgaatttttggaaatacaaacaaaaataacagacccttagctacactaagaaaaaaagagaaactcaagtaaatataatcagaaatgaaaatggagacattataggaaatgtacaggaatacaaatgattataaaggacaattaagcgattatatgccaataaattggataacctagaataaatggataaattcttagaaagatgcaatctaccaaaatggaacaaaaaagaaatagaacagaccaaaagcaagcaaagagatttaatcagtaatcaataatttcccaacaaagaaaagcccaggtgcagatgctttcatgggcaacttctaccaaacattcaaagaagaactaacaccaaaacttcttaaactcttcagaaaaaatagaagagagaatactctcaaactcatttcatgaggccgatgttaccatgacttaaaagctagacgaagacaacacaagaaaaaataattacagaccagtatccttaacgaatatagatgcaaaaattctcagtaaaatactaactagcaaactgaattcaaaagcacattgaaaaggtcatacaccatgaccaattgtaac

SEQ ID NO: 35367 - DNA, 2115 bp, Homo sapiens
agaaaaccacagggcgcggggccagggcggcggcccccagggagttggcaggatggcagagggcaaggcaggcggcgcggccggcctcttcgccaagcaggtgcagaagaagtttagcagggcccaggagaaggtgctgcagaaattggggaaagctgtagaaaccaaagatgaacgatttgaacaaagcgctagcaacttctaccaacaacaggcagaaggccacaagctgtacaaggacctgaagaacttccttagtgcagtcaaagtgatgcatgaaagttcaaaaagagtgtcagaaaccctgcaggagatctacagcagcgagtgggacggtcatgaggagctgaaggccatcgtatgggagagaattgccaagcggggtcggaaactcgtggactatgacagtgcccgacaccacctggaggcagtgcagaatgccaagaagaaagatgaggccaagactgccaaggcagaggaagagttcaacaaagcccagactgtgtttgaagatctgaaccaagaactactagaggagctgcctattctttataatagtcgtattggctgctatgtgaccatcttccaaaacatttccaacttgagggatgtcttctacagggaaatgagcaagctgaaccacaatctctacgaggtgatgagcaaactggagaagcaacattccaataaagtctttgtggtgaagggactgtcaagcagcagcaggcgctctttagtcatttctcccccagttcgaacagctacagtctccagtcctcttacctcacctactagtccctctacactttccttgaagagtgagagtgaatctgtctcagcaactgaagatctggcacctgatgcagcccaaggggaagacaattctgagatcaaggagctcttagaagaggaggaaatagagaaggaaggatctgaagcaagctcctctgaggaagatgagcctctaccagcctgcaatggccccgcccaggcccagccctctcctaccactgaaagggccaagtcccaggaggaagttctccccagctccacaactccatcaccaggcggagccctgagcccttcagggcagccttcatcatctgccacagaagtagtcctccgaacccgcaccgcaagtgaaggatctgaacaaccaaagaagagagcctctatccagaggacctcagcaccccctagtaggcctcctccacccagagccactgcaagccccaggccctcctcagggaacataccttccagccctacagcctctggagggggttcacccaccagccctagggcctccttggggactgggactgcaagtcctaggacctccctagaggtctctcctaatccagaaccaccagagaagccagtaagaactcctgaggccaaagaaaatgaaaacatccacaatcagaaccctgaagaactttgtacttcccccaccttaatgacatctcaggttgcttcagagcctggagaggcaaagaagatggaagacaaggaaaaggataataagcttatctcagctgactcctcggagggccaagaccagcttcaagtctccatggtaccagaaaacaacaacctcacagcacctgaacctcaagaagaggtatccacaagtgaaaatccacaactctgaagagaaactaccaagactcctcctgccccaaacctcgccagagaagctcttcaaccagagggtataggtcagagggatataagagccagcatccatccctgggttctcagtaggaatgctggtgctgtctaaagacctggcattaatggaggcggaggagcagccttacgggagggatggagggaggcaggctggggagaagagaacattagactcagggaatatttaattctggttttagcattattagaataagactttatacattaactaaagtggagctttaatcactataaaaagcaaaagtatctatagacacagacacttgcctatacagagacataaccacacacactcagaggatagtgaacaaatctgtctttgacttacgacccattttgcaagacttaaagccggaagaacacattttcagattgttaaataaagtctgattctgacta

SEQ ID NO: 35368 - DNA, 1008 bp, Homo sapiens
agaaaaccacagggcgcggggccagggcggcggcccccagggagttggcaggatggcagagggcaaggcaggcggcgcggccggcctcttcgccaagcaggtgcagaagaagtttagcagggcccaggagaagaatattttctttgcttctaacctgagcctctgctctccacctaccaaccctctagtagacaaggcggtttgggaagacatgtcagccagaagaaagagcgagggaagaaagacaagaaggacctgagatagagtttcggttttcctttttttctctctctctttattaagcccaacctgccttctacaacggagaagttttggttttctaagagctgatggacttagaagcatttggatgaacagctctgcttaccaactgaaatatccctattatcttctaaaagtggagcactgctttgagccctgggaaggcttaaaggcaaccagctctcccgagttgatttatcagcagaaaactgatggaatgtagatgtagctcctgactttaagagaccacaatggaagggaggttattttctatcatttgaggtcatgtgaaagagaggaggaaaagggaaagagttcgtgtagccagacttcgttacttcacttaccctaacttcaccttgatcctagtttcagcctctctgaagacttacaaatctggtagacccgagagcagggcctatgggaaggtctagctcgaaacagtgtgggcgagcaggaggtactggagagaaggccacactgtggttgaaaaaaaaaaaaccctaaaagacaaaacactcatgaatgatagtaattttaaaaagacataccagccaggcacagtggctcactcctgtaatcccagcactttgggaggccaaggtgggaggactgcttgagcccaggagatcaagactgcagtgagcagtgatcacaccacaccacactcaagcagagggagactctgtctcaaaaaataaaaataaatacataaaaataaaagac

SEQ ID NO: 35369 - DNA, 859 bp, Homo sapiens
agaaaaccacagggcgcggggccagggcggcggcccccagggagttggcaggatggcagagggcaaggcaggcggcgcggccggcctcttcgccaagcaggtgcagaagaagtttagcagggcccaggagaaggtgctgcagaaattggggaaagctgtagaaaccaaagatgaacgatttgaacaaagcgctagcaacttctaccaacaacaggcagaaggccacaagctgtacaaggacctgaagaacttccttagtgcagtcaaagtgatgcatgaaagttcaaaaagagtgtcagaaaccctgcaggagatctacagcagcgagtgggacggtcatgaggagctgaaggccatcgtatgggtaagagtggcttgagttttacaacttattggcacttactcctgtttgcatctcaacctcagcttagcttctctatccaagaaaataggaaaacaaaggagccagttcacactgtgcatttgtgtagcctcagtcactgggtggtaggaagaagctacaactgttaaggtaaaaacaagttttccctaatctgtggatccctctaattttgaccctcttctcctctttaaaacattatgggaagttttacctcctaaagattggttgttttttaaaacaaacttcatgcagttatacactcttaaactttcccatctaagctctggagtccaaggctttgaccttgtgccctgttcttaatctctgaatgtatgttcagactcccatagagcagttccttggggtaggggctgtctcttttcttcctctgactagtccccagaatccaacatggtattctaaatacggtgctacaaaaaaggtttttgcagggag

SEQ ID NO: 35370 - DNA, 418 bp, Homo sapiens
accagcctctgactctatcctacagaataatgatctcctttgggaagactacgaggagaaactggctgaccaggctgtaaggaccatggaaatctatgttgcccagttcagtgaaattaaggagagaattgccaagcggggtcggaaactcgtggactatgacagtgcccgacaccacctggaggcagtgcagaatgccaagaagaaagatgaggccaagactgccaagctgccccctctctcctcgggatcgggtccccagagccaccatctcctgagcctcccaccccgctgcctgggccctgtggttgctgggcctcccacctcaaggaggggaaggttgtacagcccgaacccgtggagcaatgccctgtctggcctccaaaaccaaaataaaactgggtcactttaaaaaaaa

SEQ ID NO: 35371 - DNA, 2357 bp, Homo sapiens
agaaaaccacagggcgcggggccagggcggcggcccccagggagttggcaggatggcagagggcaaggcaggcggcgcggccggcctcttcgccaagcaggtgcagaagaagtttagcagggcccaggagaaggtgctgcagaaattggggaaagctgtagaaaccaaagatgaacgatttgaacaaagcgctagcaacttctaccaacaacagtttgtttgtttgttttgagatggagtcttgctctgtcaccgaggctggagtacagtggcgtgatccgatctcagctcactgcagtcttcgcctcccaggttcaagcgatccttctacctcagcctcctgcgtagctgggactacaggcagaaggccacaagctgtacaaggacctgaagaacttccttagtgcagtcaaagtgatgcatgaaagttcaaaaagagtgtcagaaaccctgcaggagatctacagcagcgagtgggacggtcatgaggagctgaaggccatcgtatggaataatgatctcctttgggaagactacgaggagaaactggctgaccaggctgtaaggaccatggaaatctatgttgcccagttcagtgaaattaaggagagaattgccaagcggggtcggaaactcgtggactatgacagtgcccgacaccacctggaggcagtgcagaatgccaagaagaaagatgaggccaagactgccaaggcagaggaagagttcaacaaagcccagactgtgtttgaagatctgaaccaagaactactagaggagctgcctattctttataatagtcgtattggctgctatgtgaccatcttccaaaacatttccaacttgagggatgtcttctacagggaaatgagcaagctgaaccacaatctctacgaggtgatgagcaaactggagaagcaacattccaataaagtctttgtggtgaagggactgtcaagcagcagcaggcgctctttagtcatttctcccccagttcgaacagctacagtctccagtcctcttacctcacctactagtccctctacactttccttgaagagtgagagtgaatctgtctcagcaactgaagatctggcacctgatgcagcccaaggggaagacaattctgagatcaaggagctcttagaagaggaggaaatagagaaggaaggatctgaagcaagctcctctgaggaagatgagcctctaccagcctgcaatggccccgcccaggcccagccctctcctaccactgaaagggccaagtcccaggaggaagttctccccagctccacaactccatcaccaggcggagccctgagcccttcagggcagccttcatcatctgccacagaagtagtcctccgaacccgcaccgcaagtgaaggatctgaacaaccaaagaagagagcctctatccagaggacctcagcaccccctagtaggcctcctccacccagagccactgcaagccccaggccctcctcagggaacataccttccagccctacagcctctggagggggttcacccaccagccctagggcctccttggggactgggactgcaagtcctaggacctccctagaggtctctcctaatccagaaccaccagagaagccagtaagaactcctgaggccaaagaaaatgaaaacatccacaatcagaaccctgaagaactttgtacttcccccaccttaatgacatctcaggttgcttcagagcctggagaggcaaagaagatggaagacaaggaaaaggataataagcttatctcagctgactcctcggagggccaagaccagcttcaagtctccatggtaccagaaaacaacaacctcacagcacctgaacctcaagaagaggtatccacaagtgaaaatccacaactctgaagagaaactaccaagactcctcctgccccaaacctcgccagagaagctcttcaaccagagggtataggtcagagggatataagagccagcatccatccctgggttctcagtaggaatgctggtgctgtctaaagacctggcattaatggaggcggaggagcagccttacgggagggatggagggaggcaggctggggagaagagaacattagactcagggaatatttaattctggttttagcattattagaataagactttatacattaactaaagtggagctttaatcactataaaaagcaaaagtatctatagacacagacacttgcctatacagagacataaccacacacactcagaggatagtgaacaaatctgtctttgacttacgacccattttgcaagacttaaagccggaagaacacattttcagattgttaaataaagtctgattctgacta

SEQ ID NO: 35372 - DNA, 1743 bp, Homo sapiens
catgttagccaggatggtcttgatctcctgacttcatgatacgcccaccttggcctcccaaagtgctgggattacaggcgtgagccactgtgcccagcgggatggctttcatttaggagccttggtggctggttttggcttaagtcctactttgtatttcaaacaaagaactcctttcccatgccttactcgtatgtgtttgtggttttgcttcctaatagtcgtattggctgctatgtgaccatcttccaaaacatttccaacttgagggatgtcttctacagggaaatgagcaagctgaaccacaatctctacgaggtgatgagcaaactggagaagcaacattccaataaagtctttgtggtgaagggactgtcaagttcgaacagctacagtctccagtcctcttacctcacctactagtccctctacactttccttgaagagtgagagtgaatctgtctcagcaactgaagatctggcacctgatgcagcccaaggggaagacaattctgagatcaaggagctcttagaagaggaggaaatagagaaggaaggatctgaagcaagctcctctgaggaagatgagcctctaccagcctgcaatggccccgcccaggcccagccctctcctaccactgaaagggccaagtcccaggaggaagttctccccagctccacaactccatcaccaggcggagccctgagcccttcagggcagccttcatcatctgccacagaagtagtcctccgaacccgcaccgcaagtgaaggatctgaacaaccaaagaagagagcctctatccagaggacctcagcaccccctagtaggcctcctccacccagagccactgcaagccccaggccctcctcagggaacataccttccagccctacagcctctggagggggttcacccaccagccctagggcctccttggggactgggactgcaagtcctaggacctccctagaggtctctcctaatccagaaccaccagagaagccagtaagaactcctgaggccaaagaaaatgaaaacatccacaatcagaaccctgaagaactttgtacttcccccaccttaatgacatctcaggttgcttcagagcctggagaggcaaagaagatggaagacaaggaaaaggataataagcttatctcagctgactcctcggagggccaagaccagcttcaagtctccatggtaccagaaaacaacaacctcacagcacctgaacctcaagaagaggtatccacaagtgaaaatccacaactctgaagagaaactaccaagactcctcctgccccaaacctcgccagagaagctcttcaaccagagggtataggtcagagggatataagagccagcatccatccctgggttctcagtaggaatgctggtgctgtctaaagacctggcattaatggaggcggaggagcagccttacgggagggatggagggaggcaggctggggagaagagaacattagactcagggaatatttaattctggttttagcattattagaataagactttatacattaactaaagtggagctttaatcactataaaaagcaaaagtatctatagacacagacacttgcctatacagagacataaccacacacactcagaggatagtgaacaaatctgtctttgacttacgacccattttgcaagacttaaagccggaagaacacattttcagattgttaaataaagtctgattctgacta

SEQ ID NO: 35373 - DNA, 1168 bp, Homo sapiens
tgcactgcaaccttgatactcctggcctcaagtgatcctcctgcctcagcctctcaaggagctgggactacaggtgtgcacccctgcacgtggtctagactgggcttcctacaccttgggttcccatctcagaacctaaaatttttcccaaagaaattattttaccacttgcttctcctaactgcgtgtcatgaattaggatcacttaagtgtgagagttgcagtacattcttgaggacggttcatctaaaagtggcaggtagtaattttaagacctcgcactcccttatagatacacatccacaccatgtcacacagattacatggtgtttgatcatggaaacaactcaggaattcaaagacctggtttcctgtcccagcaagtctttttaccctttgaatcttagtttattcatctgtaaaagaggatggatgaaagcctttcccgatgccttcaggctctggtgaaacaacactgtattttgccctttgtaatagtacaaatactgagacccttgtaaagtataaggcacagaagacacttctatgctgagaggctggaaaggttgagccacctcttactggcagaactcttctctttgtagggccaagaccagcttcaagtctccatggtaccagaaaacaacaacctcacagcacctgaacctcaagaagaggtatccacaagtgaaaatccacaactctgaagagaaactaccaagactcctcctgccccaaacctcgccagagaagctcttcaaccagagggtataggtcagagggatataagagccagcatccatccctgggttctcagtaggaatgctggtgctgtctaaagacctggcattaatggaggcggaggagcagccttacgggagggatggagggaggcaggctggggagaagagaacattagactcagggaatatttaattctggttttagcattattagaataagactttatacattaactaaagtggagctttaatcactataaaaagcaaaagtatctatagacacagacacttgcctatacagagacataaccacacacactcagaggatagtgaacaaatctgtctttgacttacgacccattttgcaagacttaaagccggaagaacacattttcagattgttaaataaagtctgattctgacta

SEQ ID NO: 35374 - DNA, 2211 bp, Homo sapiens
agaaaaccacagggcgcggggccagggcggcggcccccagggagttggcaggatggcagagggcaaggcaggcggcgcggccggcctcttcgccaagcaggtgcagaagaagtttagcagggcccaggagaaggtgctgcagaaattggggaaagctgtagaaaccaaagatgaacgatttgaacaaagcgctagcaacttctaccaacaacaggcagaaggccacaagctgtacaaggacctgaagaacttccttagtgcagtcaaagtgatgcatgaaagttcaaaaagagtgtcagaaaccctgcaggagatctacagcagcgagtgggacggtcatgaggagctgaaggccatcgtatggaataatgatctcctttgggaagactacgaggagaaactggctgaccaggctgtaaggaccatggaaatctatgttgcccagttcagtgaaattaaggagagaattgccaagcggggtcggaaactcgtggactatgacagtgcccgacaccacctggaggcagtgcagaatgccaagaagaaagatgaggccaagactgccaaggcagaggaagagttcaacaaagcccagactgtgtttgaagatctgaaccaagaactactagaggagctgcctattctttataatagtcgtattggctgctatgtgaccatcttccaaaacatttccaacttgagggatgtcttctacagggaaatgagcaagctgaaccacaatctctacgaggtgatgagcaaactggagaagcaacattccaataaagtctttgtggtgaagggactgtcaagcagcagcaggcgctctttagtcatttctcccccagttcgaacagctacagtctccagtcctcttacctcacctactagtccctctacactttccttgaagagtgagagtgaatctgtctcagcaactgaagatctggcacctgatgcagcccaaggggaagacaattctgagatcaaggagctcttagaagaggaggaaatagagaaggaaggatctgaagcaagctcctctgaggaagatgagcctctaccagcctgcaatggccccgcccaggcccagccctctcctaccactgaaagggccaagtcccaggaggaagttctccccagctccacaactccatcaccaggcggagccctgagcccttcagggcagccttcatcatctgccacagaagtagtcctccgaacccgcaccgcaagtgaaggatctgaacaaccaaagaagagagcctctatccagaggacctcagcaccccctagtaggcctcctccacccagagccactgcaagccccaggccctcctcagggaacataccttccagccctacagcctctggagggggttcacccaccagccctagggcctccttggggactgggactgcaagtcctaggacctccctagaggtctctcctaatccagaaccaccagagaagccagtaagaactcctgaggccaaagaaaatgaaaacatccacaatcagaaccctgaagaactttgtacttcccccaccttaatgacatctcaggttgcttcagagcctggagaggcaaagaagatggaagacaaggaaaaggataataagcttatctcagctgactcctcggagggccaagaccagcttcaagtctccatggtaccagaaaacaacaacctcacagcacctgaacctcaagaagaggtatccacaagtgaaaatccacaactctgaagagaaactaccaagactcctcctgccccaaacctcgccagagaagctcttcaaccagagggtataggtcagagggatataagagccagcatccatccctgggttctcagtaggaatgctggtgctgtctaaagacctggcattaatggaggcggaggagcagccttacgggagggatggagggaggcaggctggggagaagagaacattagactcagggaatatttaattctggttttagcattattagaataagactttatacattaactaaagtggagctttaatcactataaaaagcaaaagtatctatagacacagacacttgcctatacagagacataaccacacacactcagaggatagtgaacaaatctgtctttgacttacgacccattttgcaagacttaaagccggaagaacacattttcagattgttaaataaagtctgattctgacta

SEQ ID NO: 35375 - DNA, 647 bp, Homo sapiens
catgttagccaggatggtcttgatctcctgacttcatgatacgcccaccttggcctcccaaagtgctgggattacaggcgtgagccactgtgcccagcgggatggctttcatttaggagccttggtggctggttttggcttaagtcctactttgtatttcaaacaaagaactcctttcccatgccttactcgtatgtgtttgtggttttgcttcctaatagtcgtattggctgctatgtgaccatcttccaaaacatttccaacttgagggatgtcttctacagggaaatgagcaagctgaaccacaatctctacgaggtgatgagcaaactggagaagcaacattccaataaagtctttgtggtgaagggactgtcaagcagcagcaggcgctctttagtcatttctcccccagttcgaacagctacagtctccagtcctcttacctcacctactagtccctctacactttccttgaagagtgagagtgaatctgtctcagcaactgaagatctggcacctgatgcagcccaaggggaagacaggaggtggtggagctattgttagctcgaggggcaaataaagagcacaggaatgtttctgattacacacctctaagtctggctgcttctggtggctatgtgaac

SEQ ID NO: 35376 - DNA, 371 bp, Homo sapiens
tacagtccacagtcctgaagtcaggttccagaacgtcagatgtctggccttaaattcccaaccaactcttcaaaatgagtttacacataggaaggagaccaaaatgggaagagggcctaaacaccataaggaacaattgaggaaacctgtgagaaaggcttggtcaagggcacatgcaagttgtcttcaagcatgtgtggaagagaaattagatctactctatgagtacagaaggccaacccaagactaataggaaaaagtttgtttgtttgttttgagatggagtcttgctctagtctcgctctgtcgcccaggctggagtgcagtggcacgatctcggctcactgcaacctctgcctaccaggttcaag

SEQ ID NO: 35377 - DNA, 2135 bp, Homo sapiens
agaaaaccacagggcgcggggccagggcggcggcccccagggagttggcaggatggcagagggcaaggcaggcggcgcggccggcctcttcgccaagcaggtgcagaagaagtttagcagggcccaggagaaggtgctgcagaaattggggaaagctgtagaaaccaaagatgaacgatttgaacaaagcgctagcaacttctaccaacaacaggcagaaggccacaagctgtacaaggacctgaagaacttccttagtgcagtcaaagtgatgcatgaaagttcaaaaagagtgtcagaaaccctgcaggagatctacagcagcgagtgggacggtcatgaggagctgaaggccatcgtatggaataatgatctcctttgggaagactacgaggagaaactggctgaccaggctgtaaggaccatggaaatctatgttgcccagttcagtgaaattaaggagagaattgccaagcggggtcggaaactcgtggactatgacagtgcccgacaccacctggaggcagtgcagaatgccaagaagaaagatgaggccaagactgccaaggcagaggaagagttcaacaaagcccagactgtgtttgaagatctgaaccaagaactactagaggagctgcctattctttataatagctgaaccacaatctctacgaggtgatgagcaaactggagaagcaacattccaataaagtctttgtggtgaagggactgtcaagcagcagcaggcgctctttagtcatttctcccccagttcgaacagctacagtctccagtcctcttacctcacctactagtccctctacactttccttgaagagtgagagtgaatctgtctcagcaactgaagatctggcacctgatgcagcccaaggggaagacaattctgagatcaaggagctcttagaagaggaggaaatagagaaggaaggatctgaagcaagctcctctgaggaagatgagcctctaccagcctgcaatggccccgcccaggcccagccctctcctaccactgaaagggccaagtcccaggaggaagttctccccagctccacaactccatcaccaggcggagccctgagcccttcagggcagccttcatcatctgccacagaagtagtcctccgaacccgcaccgcaagtgaaggatctgaacaaccaaagaagagagcctctatccagaggacctcagcaccccctagtaggcctcctccacccagagccactgcaagccccaggccctcctcagggaacataccttccagccctacagcctctggagggggttcacccaccagccctagggcctccttggggactgggactgcaagtcctaggacctccctagaggtctctcctaatccagaaccaccagagaagccagtaagaactcctgaggccaaagaaaatgaaaacatccacaatcagaaccctgaagaactttgtacttcccccaccttaatgacatctcaggttgcttcagagcctggagaggcaaagaagatggaagacaaggaaaaggataataagcttatctcagctgactcctcggagggccaagaccagcttcaagtctccatggtaccagaaaacaacaacctcacagcacctgaacctcaagaagaggtatccacaagtgaaaatccacaactctgaagagaaactaccaagactcctcctgccccaaacctcgccagagaagctcttcaaccagagggtataggtcagagggatataagagccagcatccatccctgggttctcagtaggaatgctggtgctgtctaaagacctggcattaatggaggcggaggagcagccttacgggagggatggagggaggcaggctggggagaagagaacattagactcagggaatatttaattctggttttagcattattagaataagactttatacattaactaaagtggagctttaatcactataaaaagcaaaagtatctatagacacagacacttgcctatacagagacataaccacacacactcagaggatagtgaacaaatctgtctttgacttacgacccattttgcaagacttaaagccggaagaacacattttcagattgttaaataaagtctgattctgacta

SEQ ID NO: 35378 - DNA, 523 bp, Homo sapiens
caggcttttccttaaagcatacatagtaaacattttgggttttgcaggccaaaaagcaaatgaacaactatacgtaataggtccttacaaaaccatttaaaaatgtgaagactattcttagttcatgggcaggaaaaatacaggcaactggcgagatgtggtgccatagtttgctgactcttgcttttaagtatttgtatcgttgacaagaaaattgttttgtttagccatccccaaagttagtattttattctgatttgggcctataagaaatatctgggccgaggcgagtggatcacaaggtcaggagatcgagaccatcctggctaacatggtgaaaccccgtctctactaaaaatacaaaaaaattagccgggcatggtggcgggcgcctgtagtcccagctactcgggaggctgaggcaggagaatggcgtgaacccgggaagcggagcttgcagtgagccgagattgcgccactgcactccagcatgggcgacaaagcaagactccatctcaaaaaa

SEQ ID NO: 35379 - DNA, 154 bp, Homo sapiens
taagcaacccacagattgctccctgtgaagaggagcctgccaggggagcagcattccaccagaccctgatttagcaagatatttccgtatcattcccccaaccagctggaagtcctccactgctcttgtgtaaaaatctaactcatctcgctga

SEQ ID NO: 35380 - DNA, 438 bp, Homo sapiens
attactcctattttacaaactgaaaactgagacattacaaggttaataagtctaaggtctaaaagctaaaatgatgctatactttatgactatgtggagaaagcttacatattggcaatcaaggaatcatcagtttatctcctactcggaggatctctcaactttctttcttaaatatgcagatattatagctctaataagcaactttaatataacactcatgacattggggcaacatagtgagactcccactctttaccaaaaaaaaaatttaaaaattagccaggcagggtggcacgcacctgtagtcccagctactcgggaggctgagatgggaggattgcttgagcccaggagatcaaggctgcagtgagctgtgatcacatcactgcactccagcctgggtgacagtgtaagactctctctttttaaaaaaaa

SEQ ID NO: 35381 - DNA, 411 bp, Homo sapiens
gtttaaaattacatgcctagttatttgcagagttgggcatagagtccattttgactgatcccagattcagttatctttccccactgaaataggtctcttatccctcactaagcttggcctaaaggtaactctaatgtatcctggtcagagaggcaacaaatttcagttgtcactcagccctgccactcactagagaagttatagtggcaaattcacattaagccttgacttcatcccatgtaacatgttgctagtacccgtgttataaggccctatggggaattaaattgtgtagtgtgtgtgttacgaagcccaacatattctaagccttcatacatgatggtatgcttatgtaactcctttaaaaattattctcttaatgttcattgtgaaatgtataatatgtagatt

SEQ ID NO: 35382 - DNA, 264 bp, Homo sapiens
gcctcaagtgattgtcccaccttggcctcccaaagcactgggattacagacctgagccacagcacctgacccagcaattaattgctttttgtttttgtttttacttctgaggcagggtctcaccatcacccaggctggagtacagtggtgcgataatggctcattgcagccttgacctccctggcctcaggtgatcctcccacctcagcctcctgagtagctgggcctacaggtgtgtgccatcatgcccagctaatttttgta

SEQ ID NO: 35383 - DNA, 407 bp, Homo sapiens
tgaatgtgtcttaatctctttgtcactcagttgcttcatttttaaagtgggtataacacctgatctttctactggttaggactattccaagaatagaaggagaacctgtacataaaaaagtccttacaaacagaaaaagtgctatttaactctaaatattatcagtattatttctgctatgactattttattatttctgaccttggtcatggggcaatgtgtacagcacatgcataatgtgcagatgagaaacagagatgtttatcccaataattcaagaccccccaagcccagattacctctgttattcaaatctcaatttattaagatttaaatcctcatgcttatattggaagggcctcgagacagcttacaggataaaacagtgcaaaataaacaggagagaa

SEQ ID NO: 35384 - DNA, 465 bp, Homo sapiens
aacccaaccgtgtcgactggcatcctgatctgactttcagcctctacgctgtgttctgctgtgtaagccaccaggtccatgattttttttttctggcagcctgagctgactaatacaagtggctttgatggaattatccctaaaatcctttccagctccaaattctttgaacctatgtgtaattcataaatgtcttcttgtgttggtgcgggcggtagatgggtaggggtgagtgaaattgttaaaagttagataattttaaaaaatgacataacgataacctatcaaaactctcaaaggtggcaaagccctgttctgagacttatcagatgcaacttctaccttaactccttcaaatatgagttctcactattagaatcttctgattggccaaactttcgatgctttggtggccccttacctaaatgcacactactgataaaccaaacaaacaaacaaaaatac

SEQ ID NO: 35385 - DNA, 108 bp, Homo sapiens
gtgacctggggcaaatgttttaccccccagtaatagtcacaggtttcagagagttagaggtgagtttggagaaacgaggcatggcacggaagtggtgacaggaggaac

SEQ ID NO: 35386 - DNA, 3872 bp, Homo sapiens
  misc_feature (1313)..(1313): n is a, c, g, or t
tctgctgtgaaaatgctccttcgattagtttataactgagtgtaaaatttggcatttcactcttgattatagtctttttctgtatattcacccccaattctttgagaatgaggagtaccctaattttgtaagcaaaattttggggggctttggggtgaaaactaatttaaatgcttattttctcagttgcctacctccatttaaaaatcagttttgagggctataaaaaaaccttatgatattaaggcctttttttctgtataaaaataacatacaatttattttttccatttattcaaaagactgaattacactagccaagaaatgatcagtctcgtgtaaaagaataacacacgttctccttgaatcaagactactctgagattcagaaatgccagtagcggagggtggggtgtgaccccttaagtaagtgtgactagttaaaggtgtatggatattctttgtggaaagcgggctgccagatacaatttcaggctgtttcatattacttcacacggtgctttcaaactgtttattttctctcttggcactagtgagtacagctcataactggccagataatatctaagtctaggaccaggacagtgaatgggttttaccatgatttgatcaaaagtaaacaagaaaacaaaagcagaggaaaaaaaaaaaaagagaaggcatcacatttttctcattgtggggctaaaatgctgcatgttgaattttcactttctgattagaacccacagttgaacagatctgatttatttttttggggtcaggaagaaactgtcaaattttagtttgactgttcttttctttaggtctcccccctttcttcccctaccttttttttttttttaagcattactatattaatcagatagcagccactgtttgacatgtccttctgtggtggctgcagattaagtctgaaccgtgccagaaatctcgttgcattttttgatgtagcagaaatgaacctggttcattccatcttaacagctttagccaaatggctcagaagggatctacccgatttcataaagaagagttaatgtgcagtctggtttaatacaggtgcccttaaaatacatttttgttttgttttgttttctcacttccaagtttaacatgtccatggacattggctttagtttccccaagatgagtccatgaatgaccttgttccagtatcccttgctgatttgagttcccaagtaataagcctgggaatgttttcagtgcagcagccgggagaagaagggggattcagcagttgctgttcaatgcatttactctctacctgntggcttcaaacagtattaactttatgtgctccttgtgcattgtgtttaattaaaagcagttctcttcacagaggcacttgtaggatttttttttttttttttttttgccctgaaacgaataaaacaaataggcgtctggtatttgttttgtataacacaatccccataaaatgaagagtaataaaacataattatctgtaaaggcttgttttataagcctgagaatgggcttgtttctaccaggtttttatgttcattcataggagaaagaatctctttgtacattaatatgtaacaacaataagaacaaatgcttcccaattacatgcatgaatcaaacttatcttttattaaaaaattttttttctgttgtagtaaaagtttgtcattaaattctttctgtgtaaacacattagattgaaggaaaatgttttccttcaatattctgttcaactggcataactttatgatttttttctccccagcataattaaagaaacaactttatggttggttattgacttttttaggtcagagagcactctgtggattctaaaaccgccttccagaaaagtacacatcaaacttctacgtacgtttttatagggtttgtagagctctgatccttggttaaagatccctgacaatgtctaatagctgttttgaaaactgtacctccaatctgaagctaaggttttagttttagttttagtatgtgaatatctgatgaaacgattcaatggttttgtagcattggattcaatttcagggttgggctcctttctaggaatagaggaatattcttatctcaggaaaaaaaattcagagtgtgggaagtacgaaaattattaattcaaaggtgtatttgctgtcagattggatggcagtacccacatccctaggggctcctgttcccaagactgttttcattgtttctatccagcgctgggcacgagccttgaagtggcgaattcatcctctgaagttgtgtgtccattgctgcaagaataaaagaagcagtaacagaatcatgcagcgcagtatttcatggtgacagttttatgtggttgtgtgatgttgcagagtcttgtaggtgatatctacccttttcttttgaatcaaaacacggggttttactggaggagggaagtttcagaaacaacctagtctaacacaaaattaagctcctaaatagttatcccattctgtctactacaaaactaattgcttacaggaagtagaagtacacatatctaatatttatatcctgtttgagtagtggtttctaattttagatttctaacccctttttacattatctttttgcattgaaattatactgaaacattcatattattatgaatgcaagctgaattaaatagaccaagattctcggtttctcccttcatgttgtcatctactagagaatgaacagcttaaaataagtgcatcagttcctcatccaaagggaagctgaatattccaattcaagatcactttgcgtgcttactggaaataccatttttgaacgtacttggcaacttaaagtgcccaattaaaagctctgttgaaagaggaagtctgtggatgtgcaattagtccttaggattcagagcatttcctttatgtgtggaaggccataatatgaaatcactggtcacaatagctttatgccaggtgcttagactagaaggcattttcaggatggattatttctgtactcttgctcctaaaatggtttacctaaagaggctcccaagtccataaaaatactggtgatgtcaagaaattttggaggtggcctttcacaaattttaggcagtcaataaatataactagccatgtacgtgataggcaatacacaagacttgcttatattcctagactttctattttatctgattgacagtgttcctcttcccacctttttattcatttatttatttttaaaagatgaggattgggtaccagaaaattagccagtattgtgtgcttttccttactaaaaaaatgaggcctcgctgagtagggccagatgagctgtatattctgagattatttatagtgtttatgatagagagaccaaaaacagtaagcacttaatagctttccttatttacaagtcagattcatctaagggatatttttcttttatttttctggtgcttgaaatgttcctttaaaatagattatcagaggatacacagtgacacaaaatttgttgcttgtgaaaatgcagagtggattaagcttttctttttcaaggctctgcaacaaaacaggtacatttttatttcagtaaaaacactgctttttttttttgcctccgtcacacacacgagtaacataggatagatatgtgtatgtgaacatgtggctcttgttcccagttgtgtaatggatgcattcccttaaagtttgcagtaaagtgaatgtttattaagcaaattgtttttccccagtgacttctactgtaaaaatggcattgtctttcagtaggctctgaatatagtatgttcccatattctttggtaagatgaccaatcaaccaaaaaaaaa

SEQ ID NO: 35387 - DNA, 1445 bp, Homo sapiens
atcagaacacagttatgacgtgagagtaggaatttcacagagagaacctagtatctaccaggagatcggtctcctaaatagttatcccattctgtctactacaaaactaattgcttacaggaagtagaagtacacatatctaatatttatatcctgtttgagtagtggtttctaattttagatttctaacccctttttacattatctttttgcattgaaattatactgaaacattcatattattatgaatgcaagctgaattaaatagaccaagattctcggtttctcccttcatgttgtcatctactagagaatgaacagcttaaaataagtgcatcagttcctcatccaaagggaagctgaatattccaattcaagatcactttgcgtgcttactggaaataccatttttgaacgtacttggcaacttaaagtgcccaattaaaagctctgttgaaagaggaagtctgtggatgtgcaattagtccttaggattcagagcatttcctttatgtgtggaaggccataatatgaaatcactggtcacaatagctttatgccaggtgcttagactagaaggcattttcaggatggattatttctgtactcttgctcctaaaatggtttacctaaagaggctcccaagtccataaaaatactggtgatgtcaagaaattttggaggtggcctttcacaaattttaggcagtcaataaatataactagccatgtacgtgataggcaatacacaagacttgcttatattcctagactttctattttatctgattgacagtgttcctcttcccacctttttattcatttatttatttttaaaagatgaggattgggtaccagaaaattagccagtattgtgtgcttttccttactaaaaaaatgaggcctcgctgagtagggccagatgagctgtatattctgagattatttatagtgtttatgatagagagaccaaaaacagtaagcacttaatagctttccttatttacaagtcagattcatctaagggatatttttcttttatttttctggtgcttgaaatgttcctttaaaatagattatcagaggatacacagtgacacaaaatttgttgcttgtgaaaatgcagagtggattaagcttttctttttcaaggctctgcaacaaaacaggtacatttttatttcagtaaaaacactgctttttttttttgcctccgtcacacacacgagtaacataggatagatatgtgtatgtgaacatgtggctcttgttcccagttgtgtaatggatgcattcccttaaagtttgcagtaaagtgaatgtttattaagcaaattgtttttccccagtgacttctactgtaaaaatggcattgtctttcagtaggctctgaatatagtatgttcccatattctttggtaagatgaccaatcaaccaaaaaaaaa

SEQ ID NO: 35388 - DNA, 107 bp, Homo sapiens
ctgaggtcacactatgtgtggcaaatgcaaaccagagccctccaagagcccagggccctcactgggacatgctgccagccaccaagacctcaagatcctgaggctca

SEQ ID NO: 35389 - DNA, 347 bp, Homo sapiens
aatgcaagtaatggatttaatatcagcaatgtaaatgtttcatttatagtaattcttttaattttgtttttgttaatgttttatttaccataaatggtagatttttatgaagttaagtcatttttacttaaggaaaatttgtttaaaataatatagatttaaaatagaaggaagccatgaaagcacaaatttaggaatttgtaaatttaggaattatttcataattggtcaggctaatattattagtttttgcaaaagaaaaaatcagtgcttgcaaatcagattaattgcttctggagagcacaattattctagctgggatatcattatcacttagagaaaaaaaa

SEQ ID NO: 35390 - DNA, 232 bp, Homo sapiens
cctccaaattaggtgttcattttgtctgtgacatattgcattcacccttttgtgattttatgatctccttcacttattagatgcctggagaagttctgcactttacagaatttatatgcctggcacagtgtcttgtgccagctacttgtgaggctgagattggaggactgtttgaggccaggagtttgagaccagactggacaacatagagagaccctgtctaaaaaaaata

SEQ ID NO: 35391 - DNA, 457 bp, Homo sapiens
tcatttctccccactaaagtctcccaaattcagttctattctgacacttcttgctaaaaaaatatttaaaataaagcttattttccttcaatccaaacctctaagataggtggtattaccatcgttttacaagtcaaaaaaatgaatcgttccctgtgtctccagccatagatgttgctggcatttgtgttcaaggttttcccattgcaaatgcactttctgccattccacaccacctagacagtcctgctgtgtttctctccaccatatgtaagccagattttgtttctattaactttctatgactatcttaggtctttctcttttatctgtctttgacaccatggtctaatggtttcaatcaaacaatcacatccagcacaattttatggataaaggacagaaaattagtcatcctctgccttcaggacacacagaaaagcagaatatctgtcca

SEQ ID NO: 35392 - DNA, 410 bp, Homo sapiens
ctggaagtggcagaactgagatttgcgttccaagtccattcccatccttccatatcaccctgattttctcgggttcagagtcctggttcatttcctggctgttccgcagacatgtcacaaactccagaaccttcatttctccatctgcaaatggcaattgtaattcttgctctgtcaacctcacagatttctctcgaaggcatacacacacacacacacacacacacacacacacacacacacacacactagaaaactgtaaagagatgtaaaccttaccgaataattacagggtattttgattggtatttttactatgattatttttgctaatcaaagaaaccagacaggtagtgtcagggaattgtctaaagcaatgagacattcttgaaaagtctgtatcagatctc

SEQ ID NO: 35393 - DNA, 408 bp, Homo sapiens
gtgaatagtgcctcagtgaacagggggtgttaatatctctgagattccgatttcagttattttgggtatatacccacatatgtcttgaattcttaaagaaaaccaactttgctcacattggcatttctttttgtcttgcccttcccttcacagtcccttctgagcaagtgtcatcaacactgtaacctctgtttccctgcctctttcctctgctcctcaaccatgtgtgtcttaaccttgcatgtcacccagtacaaagcgacctctcctcatttcccctcgtgcaagacacatcacagattcccacctgtttcctggagttcttgcttcccttgacttcttgggccacagcaatcagccacctacccatctgatgagcagccctgacttgacacttcagcattcata

SEQ ID NO: 35394 - DNA, 1050 bp, Homo sapiens
actgttctcagcctatgatggtttctctttctaaacctgttcttctaggttcagctcaaacatcctctcctatagaaacctttccccaacctcccagtcagaactaataatttcttttcacttcaactgtacttagtttataatttatatgactataatttaataactgagactcttctgatagtacaaacaggtgctatcataattacctctgggcaacaggcaaaaatcaagattgtccttagtaaaccaggattcataccaggtcatctgatgtttacctctagtatagcactcacccgactctgccttacattgcttatttaaaatgtctgcctccccttctaggttttataaaagttcttggctcacagtaactcttagtataagtttctgaaataaacactttgttatcacttttgaattgatggcttacatttttgttttggcatttaacttcacatttgtgcattcatgtgtatgcatttcaactcatctgcaagcttatatccctcaaagtttgctgctgggctaagagcagccactcaaaaaataataataggccaggcgcagtggctcacgcctgtaatcccagcgctttgggaagctgaggctggtggatcacttgaggtcaggagttcaagaccagcctggccaacatgatgaaacctcatctctactaaaaatacataaattagccgggcgtggtggtgggagcccagctactcagggctcctcagctactcagctattcagctactcaggaggctgaggcaggagaattgcttgaacccaggaggcggaggtttcggtgagcgaagattgcgccactgcactccagcctgggcaagagtgagattccgtctcaaaaaaataaataaataaataaaaacaaaaaagaaataaatagtttttaaaaaatcttgacagcataccagcatacattcattgataaagtcgacaagaaagtattggagattaaagattgccaaaacctaagtgcttttcttggcatcattgtccttgacctcaaggagttctcagtgtaat

SEQ ID NO: 35395 - DNA, 244 bp, Homo sapiens
ttttttctttcaaaaggggtctttctagatagaaagaaaatatatatgtctctgtgtgtataatctgattgcatagatgtttggctgttttaaaacagtaacacagaaaaagggaaaaacaagagctcttgagataagaaaatagacacaattgtagactgagtatacaaattgcacagagaatcttaagaaaacataaaaaggcatagatatttccttgtgtttgtttttcatttaattactc

SEQ ID NO: 35396 - DNA, 305 bp, Homo sapiens
ggtttcaccatgttggccaggatggtctcaatctcttgaccttgtgatccgcccgtctaggcttcccaaagtgctgggattacaggtgtgagcccccgcgccctgctgcaacctattttttaacaagccctccctgtgattctgatgcccactaaagtttgagaaacaatatctttagagtagtggccctgtgaggtccttaacagctcaggaaaattaagatgaacctaagtcgggctaccagagtagataccttgaatagataaagactattggagagatgtacttaacaaaatacagcaacg

SEQ ID NO: 35397 - DNA, 491 bp, Homo sapiens
catttgatgggaatacctggtttaaataccaagttttaagggccacaggtaggctcaaaatttgggctgcagagagccaaaggtttggagtcagacagaagcaaggactttagagggagaaaaaaggttcagcgtgacagcaggccaggaataaaagaaggtgtccacaatgactgctgcgaaggtgcacccctttctcagctcctcaaccaaccccatcaggaggctacgtgaaaggctctggtgagagtcgagggtatgtaaataggctggtaaatagttatgctgggtcttaagcttgcaatggatatatggatgtttattatgttgtaatttaatttacttcccccccaatgtgaacataaactccatgaagacagttgtttttttttttttaagagacagggtcttgctctgaccctgtctggagtgcagtggtgtgactgtaactaactcactgtaagctcaaactcctgggtttaagccatcct

SEQ ID NO: 35398 - DNA, 103 bp, Homo sapiens
gtgcttccatacaaaggggacagaagagatgatggaaggcctcagtactgcaggaggggagacggatgtcatctacaatcacacaatacatgggaggtcacag

SEQ ID NO: 35399 - DNA, 442 bp, Homo sapiens
tcacaaggccgtggtgagatgagaaattacacgaggagtacttggtccacttcaggtcagcatacagcacttcttagatccagatgtcctgtttccctgacccaacaaggtggccaatggaacagatcccaccacagccttgtgaggtagatattgtcatgccattttacaggacagccacacatatgccaagtgccagagagtaaatggcaacagcaggaccagacccagatttactgtccagtgcagttttgctgagagcggtgagaagtggaggaggcatctaaagggcttgctttacaatgttgcctggagccagtccacatctgagccatgggaggtcacaagaaatgtgagttgggagatcctttaacggagtgggatgggtggatttacaaagaagcttccataacccgccacgttctccaagtaaccttgggtg

SEQ ID NO: 35400 - DNA, 406 bp, Homo sapiens
aaactcaggaagaaacacagggtcgctggcagcaaaggtggtacccccagaaaatgtctccccctctctccaagtaaattttgtcaataaaactgcaggagctgctaagtaatttcatcactgcctctcttttattagatttctaattaatcacaatctgatatgtccagggtcatctacatccaacaggtggatgaatttctaaaatgatgcttgtaggtatcacccacagggctgcctacagcagagtagccaagtccaatagcaataacacataacaagacgcaagatgaaagaaaatctttctgattccaaccccgttgccaagctttgaaaaaacgttaaagttccccaatgataggaatactctgatgccatcgtccaaataagaaatacacagttttat

SEQ ID NO: 35401 - DNA, 654 bp, Homo sapiens
cttcatgcaaaggaagcctagttccttcagacacttcttgtttgacactgtcttgccttcttctgcatgacctcctctgtggcggtgtttcccaaaaattattatagatgagagaattgaatgtgacataagttctactatacgcgtgacttctttgggtacgatttcactactacatttttaggaaacctttatgaaaggaattacttagcactggagattctgtattgtagtgacaataaccctgtgaaaatgtaggaaggtttcaaagacattttggaagaaagaggaaatcagagtctgatttttaaaaattcgtttttgtagctgaagcttcttcatttaatttgatgtggccacctccctgaccctcatatttgtaaggccgtttctggttctttgccaccaggagctccttggaatatcacaggccttaggctggaagaggttgacagcagtttaattatttataattataacctaatttccaatgtttaggaataacaaattatgaagaatactccttaatccaagaaactattgaagaaaagaaagaggaaggaacgggcacactcaaaaaagacaggacactgttacgagatgagaggaaaatggagaagttgaaggccaagctgcacacagatgatgaccgta

SEQ ID NO: 35402 - DNA, 384 bp, Homo sapiens
cttctgactatggactctttctttcggatgaagacccgaggaaagggatttggctggaagcgggcagaacactggattactacatgttgcggaatggggatattttggaatataaaaagaaacagagacctcagaaaatccggatgctggatggatctgtgaagacagtgatggtggatgattccaagactgtgggggagctcctggtcactatttgtagcagaataggaataacaaattatgaagaatactccttaatccaagaaactattgaagaaaagaaagaggaaggaacgggcacactcaaaaaagacaggacactgttacgagatgagaggaaaatggagaagttgaaggccaagctgcacacagatgatgaccgta

SEQ ID NO: 35403 - DNA, 393 bp, Homo sapiens
ttttttgttttaaggctgtgtatgtgtgtgtgtgtgtgtgtggttgtgtgtataagatagttggcaatccttggcacatgtgccaaatgagtttatgtgctgaaaaaggtatgtataccagcacaaatgcacgtgccaaatgaggtaaggagatagcatctgaagttaggattcaaaattgtggaatccttgcgggcagttaactgtttcttgcttatcttttgattatgagaagatacctccatgcctgactcagaacacataaccagtgattgttggttgggtgagtaaatgactgaacttatcaatgagcttatgcaagggccctccccactttttgccaacccccacggtggggcaactgcacacactatatacctaaagggtgaaggt

SEQ ID NO: 35404 - DNA, 450 bp, Homo sapiens
gttctcgtctcctctgaagtgcagacgacgctggcccacatccttgtcgggcagaggggctgccgactggcccctggccatggctcttgctgggagccgtgtggcctgggcttggacccacatccacctcttgctggttacttatcagttacaaagggcaaagtggtaactttactgtgagaagcttgtggatgccagtttaaccagaggatcaaaggtaccgttgccgctggtgggcagccagcgtcccgagtgctgggaaggatgcctggctcttggtgccaatctgttcatgcagaaatgtcaggaacgctcaatgcggggacaatctacaaaacaaccggtttgcattcttcaaaagtttcagtgtcataaaagatttttaaaaagacaggcccaatgtatataccgtgaaaatagtaaaacaataaaatataaaagtaaaaagac

SEQ ID NO: 35405 - DNA, 891 bp, Homo sapiens
gaaattatattttgtaactataaatgatgtttcacagaccttcacaatgtttgggtccatttaaggggaaaaaatccctacaaattccaatattgatttaaattatatttattataatattatttaaatatgtataaacaaaaaccagctataaattcttgtgctcttgcacaattctacagccaaaccaagagagccacaaaatcagtgaaactcaagtaaatgttaatttggtagatactgttgttggggttttaaaaatgtattattactgtactgttaaatatcatgagataacttgttctcccaccaattttcttttctttcttaaatgatgtcccttaagtcatatcccactaactttctatatatttctatatttccaacattaatttttatgatgcattacttgatttgcccagaatgtattatggatatatgttcttatcacctttttttctccattaacctgatgtatttatttagccagatatgctgtttatcaacaaagaaaatatatgtggtttatccttgacctcacctggtctttatttggatgccggtagaatccctttctgagatctatagggagggtgggttatgtgcatagcttttgagccagagtctaatgtttagattctagatactaaaatagattatttttctgtttcacatctgttggactaaactagaatcttctataactgtgggagtacaaagaaagatttcctatcactccattggttgtttggttgattgactaattgattgggagccacgcctccctgaaaggatcacaccattgcatgcctatctggcctcctcatctttccccactcccaagctcttggcctagcatttactgggagttgtagtctgaaaaattactag

SEQ ID NO: 35406 - DNA, 614 bp, Homo sapiens
gagtaattatcaaaactccatatttgtgttctgaaattggcagaatttgaatttgcagtccataggtcagcagatttctctgactttccttattttctttgcttagccacagaaaaacagaaaaatcagtgagtttacatgcacagaattaaatgtacagactattctctgaaagagctcagttctatgtgaaaatgaataatgtaataaatattcttatgagtgtagtaatagtagctattgtttattgagtacttcttatgtgcatggcactttatactgcatgctttatgtcatttgagcctaacaaaatactatcattattattatctcatttttatagatattttctttttttaataaactcttttatttgcacgtttgtgtcttgggttattcgtggggtgagaaacctccacacttccaatcccagccatctggtacaatctggtgttgtggtccagctgtcggcaaagggtagaggtgggtgcagggctggccccccagtctgcaccaacctcttcagagcagggagctcagaccatggttgtacttgcactgcttcagggcctcgctgaagccttcacacagggacaggtcactctgcgtggtcg

SEQ ID NO: 35407 - DNA, 454 bp, Homo sapiens
agatgacattccctacaccccttcctctatgaagagtttcacaaaagacgtctttagaaggtaaatctagcctatgaaatattttaagcaaaagacagaaagaagtctcaaatgtatgtggtgtatgtggggtgtgtgtgtgtgtgagagagagaaagagagagggaaagaaagacacagagacagagacagacagacactacagtcatgtcatttttacccgagcataacccaggcatcctggtgggtacagttggatttacacactcctcaaagacatgctgaacatgcaaataatgggtattcaagagtttcaaaatgagctaacattgcaacccaaactcagcctccaaaataagccattttttaaaaaatcactaaaaacttatgaaagatatttccatgtacaaactctcattggctgttgtttcaacagtgtaaccttaattacaga

SEQ ID NO: 35408 - DNA, 473 bp, Homo sapiens
atagattcctggagaatgttgctctccagctccatccccacccaatgaaatatgatccagagagtcttgcaaagagacaagcctcattttccacaattagctctaaagtgcctccaggaaatgattttctcagctcatctctctgtattccctgttttggatcacagggcaatctgtttaaatgactaattacagaaatcattaaaggcaccaagcaaatgtcatctctgaatacacacatcccaagctttacaaatcctgcctggcttgacagtgatgaggccacttaacagtccagcgcaggcggatgttaaaaaaaataaaaaggtgaccatctgcggtttagttttttaactttctgatttcacacttaacgtctgtcattctgttactgggcacctgtttaaattctattttaaaatgttaatgtgtgttgtttaaaataaaatcaagaaagagagaaaaaaaaataa

SEQ ID NO: 35409 - DNA, 1616 bp, Homo sapiens
agagtgtgcaaatcctgcagcagcaactgacatatccaggttctatgatcaggactgactaggtggttgccgtgacccatagagaacaaggaaagatgggctggtggattggcccacctgggagccacatggggcaaggggagccctcaccctcagccagccaagggaggcagtgagtgagcatgctacccagcctgggaaactgctttttccatggatctttgcaatccacagatcagaagatcccactcatgagaccacaccacgagggccttgggtgccaaccacagagccatgcagattctcaacagccactcagctggagtctgcctaaaactaccgagttcccaagttggggaggggtggtcatcatcactgtggctgcctgctgcctaaaccctctgagttccctgggggagggggagcaatcatcactgtggttgctggctgcctaagacaactgagcttcccaagagaggggcagtcatcatcactgcagctgcctgctgcctgaggaaactgagctccctaagaagggacagcagccatcactgtggctgctagctgcctaagacactgaactcctggggaggaagggcggcagccatttctacagatccaggctgctgtttttcctttgctgatgccaggaagactggacggcttggtcccaagaggtattccccacagcgcagcatactggctgtggcagatcatggccagactgcctctttaggctgaccctgacccatccctcctcactgggtggggcctccctgcaggaactccagcaactcaagccagggaattagggagagaactctgatctctctaggtctgagtccctagtgggaggggtggctggctgttgtctccacaaaccggaagacttgttctttccccctgctcactctgaggattccaggcagcccagatgagtgggattttccccggcacagcatacccccttcccaaagggacaatcaaagtgcttcattaagcaagtcctggatcctgtgcccctcaactgggtgaaacaccccagtgggtcaccagacaccttatacaggagcatttctactggcatcaggtgggtgcccctcaaggacagagatcccagaggaaggagtggggtcccatctttgctgttctccagcaccctctggtgacatcttcaggtgtgggagggacccagataaatagggcttgaagtgaatccccagcaaaccacagcagccctacagaagaggtacctgactgtcgaaagaaaaacagaaagcaacaacaacatcaaccaaaaagtccccacgaaaacctcatctaaaggtcagcagcctcaaagatcaaaatgagacaaactcatgaagatgagaaaggaatgaaaaacccctaacaactcaaaaggccagagtgacttgtttactccaaatgatcacaacacctctacagcaagggcacagtcctgggtggaggttgagatggatgaattgacagaagtaggcttcagaaggtgggtagtagcaaacttcactgagctaaaggagtacgctctaacccaacatattggaacgaatcccagaacttaaagattggttctctaaaataagacagacaaa

SEQ ID NO: 35410 - DNA, 521 bp, Homo sapiens
cggtacccttgtatcagcacgctggagtctgcctaaaactaccgagttcccaagttggggaggggtggtcatcatcactgtggctgcctgctgcctaaaccctctgagttccctgggggagggggagcaatcatcactgtggttgctggctgcctaagacaactgagcttcccaagagaggggcagtcatcatcactgcagctgcctgctgcctgaggaaactgagctccctaagaagggacagcagccatcactgtggctgctagctgcctaagacactgaactcctggggaggaagggcggcagccatttctacagatccaggctgctgtttttcctttgctgatgccaggaagactggacggcttggtcccaagaggtattccccacagcgcagcatactggctgtggcagatcatggccagactgcctctttaggctgaccctgacccatccctcctcactgggtggggcctccctgcaggaactccagcgtgctataaaagggatgctctagatca

SEQ ID NO: 35411 - DNA, 817 bp, Homo sapiens
tacagattcaatgcaatctacagattcaatgcaatcccgactgaaatgccagtcagtttttacatgaacaggaaaaaaaatcctaaaatttgtaggaaaccataaaaaatgccaaatagccaatgcaatctgtagcgaaagaacaaaagtggaagaatcaaacttcaaaatatactacaaagctgtcgtaaccaaaacagcatggtactgtcataaaaatagacccaaagaccaatggaacagaagagagaacccacaaataaatccatgtatttatagtcaactgatggttgacaaaggtgccaagaacagacatagggaaaaggacacgctgttcaataaatggtgctgggaaaactggttatccatatagtgaagaatgaaactagactgtatctctcaccatatacaaaaataaactcaaaatgaattaaatacttaactataagaccccaaattataaagctactgcaggaaaacataggggaaacacttcagaagaataggcaaatatattttagataagacctcaaagatattttcaataagggtcaacaacaaaaaaatagacaaattggactatattgaactaaaatgcttctgcacagcaaaggaaacaatcagcagagtgaagagacctgtagaatgggagaaaatatttgcaaactcttcacctgaggaagggactaatatccaggaattaacaagggaagcaaaaaaacttaataggcagtgccatagcggctcttaactgttattcccagcacattggggagggccaagtcaggaggatcacttgaggccaggagttcaagac

SEQ ID NO: 35412 - DNA, 319 bp, Homo sapiens
ggcctgttttctttattggggattatctttgctcagctgcttggtatcatttgacactgaacagcacgtcacatgatgacttcctggctgtcccctcctgttagatgatacatgaccagtgacttggtttaggtggtgctcaggttctgtgagagcacagagggccccccgaccatgactaggtgtgtccacttaaagccagaatacctaatgaaattagactaggtcttaaatattttgatttgtatcctaactatatttccaaaaggaagtgagagacaaatgcaaattgcagataccacagaagcatgaaaacaaa

SEQ ID NO: 35413 - DNA, 1448 bp, Homo sapiens
tgcagtttggtagctcagtgcgaatatcttggtcagatttggccagttctctcttatcgtttttaatgtaatttccgtaaagggagagccatatgtataacaaggcttttgggctgatttccttttgtggtgactcagaacgtctcctcaatcattatattgagaataaaagtaaaaccttctaagattttgctcctcaagaacatttaggtcttagtataatgttcttgtagattgcaggccccccactggttaatgcttaccaacatgttcacacttagcttcactattttgcatttttctttcttccttccttcctttcattctttttacttgttctatgaagaggcctaacttgaaaatgtgacatatggcaaataggagaaaattattcttgcaaataaaaatcatccttttaaggaatccctgcatgtgagtatagggcagaagtggcaaacaaggagcccataaaccaaagtaagcttaaaggcagctgttatttgactattgccagaaaataaaaaataaaactatttaagttagttattgacagttaaaaattcaagagattttatatgaacatcagtatttctggcctcttttggaagattctgaatatctggcagccctaggtctgcgttcacgcatgtcaacacctgttggagctctgtagtggctgctgctgttagggcaagcttcgcactttgccacagtcaccactcctccttattacttatacccagcctgctatcctcatttctattctctcctggcccctcctgtagtctttgagtttgccaccgttgaaatagaattttttttttcattttaccttaattcctttttgcaaacctcagcctttggatctctaatactttccttatctgattcatgaagtcagcctactgattgggattaaaagatgtggtgtagaaactgatagtgcatttcacgttctaaaggtgtttgaggaaattggtagtgataatgagttggaatggtgtaatagccaaaatatacaccctaagaagaaaaaaagtaaaaactgcttggtgtttttaatttcataactgatttcctattgttttagacctccttggaaggtaccttgaagtattctgtgaatcaccaaagtggtaatgatttatcaggatacctaactcggataaaacccacaagtcttctttttagtgttccaaatggatttagtagcactatctactggaacttagaaaagaaattggtatgattaataaataactcctattgctgtttaattaaaaagataacatctcaataaggttaaaaattaataatcaatgttaacaacaataactgttttcatttttgtatgactggtttttgtttacatgaatatatactttatattgttatcattacattgtttaagccatgaacattatatcacaagcttttccatgttgcta

SEQ ID NO: 35414 - DNA, 574 bp, Homo sapiens
tttttttttttttgagatggagtcttgctctgtcacccagggtaggactttttaaaactcaagtttaggccgggtgcggtggctcacgcctgtaatcccagcactctgggaggccaaggcgggtggatcacgaggtcaggagatcgagaccatcctggccccgtctctactaaaaatacaaaaaaattagctgggcttcgtggcaggcgcctgtagtcccagctacttgggaggctgaggcaggagaatggtgtgaacccaggaggtggagcttgcagtgagccgagacagcaccactgcactccagcctgggcaacagagcgagactctgtctcaaaaaaaaaaaaaaaaaaaagtcaagttcattggctgggcacatggctcacccaaattttaccattctatttcatcaacaaaggatcttgtagtgattgctgctgtaacagactgaagcagccttacaaagtttcagagggcaatattacatttttaaaaatcgtgttaaaatacattctaagatccaattattttaaaataggtcaaaatagtttagaaaatccacttttacaatctg

SEQ ID NO: 35415 - DNA, 344 bp, Homo sapiens
tcctctcaaagccctatgagctggctctttatcactaggctcagagaggttgagtgactcgtccaagatcacacagccccaggtcttcctgctttgggagctcaaccctgtttactcctttctagggaagattactattattttccacatttctttcaagtctgttattcaccgaatcaagttgagtaacagaggctttatgtccaaatcacacgggctttgcattgctatttcgtaaggaggatggggtagaccggattcttggctcctagttggatttcccttcttgggttccatttctttttacctacaacccagaccctgacagccccgaactgcccgca

SEQ ID NO: 35416 - DNA, 181 bp, Homo sapiens
ctctgccccattgttgaacattatggactgtacattgtgttccttggtctgaagaaatgatagttggccctctaactccatacactgtcttatctttctttctttttttttttatggcactctgagcatttttgtattccattgcataagcaaagcccggtccagagtcaatgtctattcc

SEQ ID NO: 35417 - DNA, 503 bp, Homo sapiens
aaaccccaaggggtagcattttcttccttttcataatgagaagccagagccaggaatattttttcccctttgtcattgtgtctttctacctgtgggaaaccacttgaaacttctgggtagagcatcaggaaatgacctcacagatgaactgcaactacggactaaaaacaatggcactcgaaaacaattcaggattagacctgaagatactgagtaagttcggtggaaaactgcagtggaggaagttaagtgggtggattgaaaccaatgcagctggcctctgggagagtcctggagacaaagaaaatcaactgcacatgacacaagttagaaagaagtccttcagaaatgcctctttggggagtcacatgtgcagggccctccctggagattctaaaattgacttggttcaggatgtggatcctgctcgccctctgcctcccacactcacagagcagtgaagcattcttgttttcctaagagtttctgctcctcaatatgcc

SEQ ID NO: 35418 - DNA, 291 bp, Homo sapiens
aaaagacagattagatgttgtaaattattcaaaaatgttttgttagcactaacgcaacagagaagttatgatggtagtggaaggcaagcaaatttaaaacagtagtaagatacagaaggactataccaacaaaatgtaatacagcatccacagacatgtaaagaaaataaaggtaggcaggttcagtggctctcatctgtaatctcagtactctgggaagccaatgcaagaggaatgcttgaagccaagagttcaagaccaacctgggcaacacagcaagacccctgtctc

SEQ ID NO: 35419 - DNA, 143 bp, Homo sapiens
tgtgtgattcacacgtgtccatgtgcctttgcttgcggctctgttcaccttcctgatgcctgaatttcgagctcctgaaaaggaaactttctggtattcactggcattgaataaagacaggaaataagtgtctcagcacagaa

SEQ ID NO: 35420 - DNA, 644 bp, Homo sapiens
  misc_feature (20)..(20): n is a, c, g, or t
  misc_feature (26)..(26): n is a, c, g, or t
  misc_feature (562)..(562): n is a, c, g, or t
  misc_feature (602)..(602): n is a, c, g, or t
tggatcccttcgacggtgtnctgggngatgaaacagaggaagaagaaacaaagcccattgagctccctgtcaaagaggaagaaccccctgaaaaaactgttgatgtggcagcagagaagaaagtggtgaaaattacatctgaaataccacagactgagagaatgcagaagagggctgaacgattcaatgtacctgtgagcttggagagtaagaaagctgctcgggcagctaggtttgggatttcttcagttccaacaaaaggtctgtcatctgataacaaacctatggttaacttggataagctgaaggaaagagctcaaagatttggtttgaatgtctcttcaatctccagaaagtctgaagatgatgagaaactgaaaaagaggaaggagcgatttgggattgtcacaagttcagctggaactggaaccacagaggatacagaggcaaagaagaggaaaagagcagagcgctttggcattgcctgatgaagaggttcttgatactttctgttctccagtgttttccatttctctccttcttcttggtcacatatatgccnaatgcacgtcatgtgcctacgtcctgcctcgcatgagggngcatgtaccccacggtacatcctgtctgcgcagcgttgacgt

SEQ ID NO: 35421 - DNA, 1548 bp, Homo sapiens
caagtttgaatgcttcatttgcataaatgaacctgattgggaacctgggtgtgaattttctctataaaagcaaaactctccctttgttctctggatggcacctttcctttacattgaagtttgcatcttccaagtttgcaatcacttctctggaataaagtctctttcctcaaaattcctttttagagaacttttgttcacatgtgcccagggtaacaaagctaggaagtggtaagcttgggagttaacctagactggtttactctcatattgcttatgtggtcagattcaccaaattggattttgtttcttcagatttttcttttaccaaagttacactgcagtaaagtaactgcttccctttttctcagactaaactttttacagccccaatatttatttattgggtgcttccaacacaccctattatattctgcaaatttatattctgcaaatcactatttggtggatatttacaaattctctacaaatggcttgtatgtgaagacctcagtccggtgggcaccagttccactttctcagagcagtggatttgggggccagtgtgcctctgtttgcatctgagggagggtggcctcgagacagatacctggggtgagagttactgctgtggtttcagtccatttcttggaagatgtcctggcttctccaactggtggactccttgtccttccctaacaacgtgtctctaatgtttgtgtgactctgggtcatagttccttctgtttcatgtaccatgaatgctgtttcttgactctttgcatgtaaaaactcactcaaagcctagctcaaatgttacatttattttctgggtttttatagtcctttgactaactcttcacctttcttcatgtgggcacagtttttctgaagtatacagttagttgaggagtgtttgtcagtctctcaacttcaaatctctgctactagctatgcaatactgagaaggccacttaatccttccatgcctatgtttctgtgttgataattttggagatgatatttacttcatggctaagaatgttatgcagcaatgttggttgtgaaagtgcttggcagattagaaggtgtggtattcactgctgggtggctgatccaacctttattcccaattctttcctcccctggcttcccttttacctcctaataggcctagaaatgctaaatgctcactctcccagcttccccttggcagctaaggctggcctatggaacctaggaagaaccaaaggagcacacacggaggtcctctgggaggctctgcacagtgcttgaagtgaaagcagttatatgatagcaatgcaacaagttaacacaaaaacaatgatctctagcctttttgtcatgtgatataactaatgtctttaagccactattatttgtgtattccattacttgtggttaaaaagcattcctgatagtgtagattcccaataagtgtttactgaatatgaatctgtattgcattgtgagtcttgggggcaaaattcaataaaattatcatctctgctctctacaaaaaaaaat

SEQ ID NO: 35422 - DNA, 412 bp, Homo sapiens
catatactgaggacttacaaatgtatatactcagcgcagacctctcctctgaattctagactcatatatccgaatgtcttcttgacaaattcttttcaatgtctagtaattcaaacttagctaatatgtccaaaacctgagctttaacccccaacaagatcctccagtttttctcatttcagtaaataattccattcttcccttacagttattgagcccaaaaaccttggagctattcttgactccctaactctctctcctcccccaggccagtatgcgagcaaatcctgttggctttaaaatgtagccaaaatcagccaggagcggtggctcacccctgtaatcccagcactttgagatgcagaggcgggcggatcatttgaggccaggagttcgagaccaacctgccaac

SEQ ID NO: 35423 - DNA, 1012 bp, Homo sapiens
aaaaagcagctgtaccgtccgaatcccggatgcgcgagccagcggcagcggcggcggcgatgagacagaagcactaccttgaggctgcagcgcggggactgcacgacagctgcccgggccaagcccgctacctcctctgggcctacacttcgtcgcacgatgataagagcacttttgaagaaacgtgtccatactgtttccagctgttggttctggataactctcgagtgcgtctcaaacccaaagccaggttgacacccaaaatacagaaacttcttaatcgagaagcgagaaactatacactcagttttaaagaagcaaaaatggtgaaaaagttcaaagactccaaaagtgtattgttgatcacttgtaaaacatgcaacagaacagtgaaacatcatggtaaaagtagaagctttgtgtcaacattgaagagcaatcctgccactcctacaagtaaactcagcctgaagacaccagagagaaggactgcaaacccaaatcatgacatgtctggctcgaaaggcaagagcccagcatcggttttcagaacacctacatctggacagtcagtatctacttgctcctcaaagaacaccagcaaaacaaagaaacacttctctcaactaaaaatgttacttagtcagaatgaatcccaaaagattccaaaggtggacttcagaaatttcttatcttctctgaagggtggacttttaaaataagaaatgcctgatgtcaattctgaaactaaagttggtaaaacaactttttaaactcttattcattttttgaatacatggaaactagatctgaatgcaaacttttcttggcatccttcagtgtttatggggaaaatacctcattagtgtgaatacctgaaacctgcctacctcataggacagctgtgaggatcaaaaaatatatgaaagttccttgtagatacatatctatagatatatatgtgtatgtatataaagatagatatatacattgagtagtggcattactgttt

SEQ ID NO: 35424 - DNA, 1057 bp, Homo sapiens
agcttgagtccggacaccaacgacggggacgctgggaagccgacttccggcgccctattttctcacctggttcccgcggcgagccagcggcagcggcggcggcgatgagacagaagcactaccttgaggctgcagcgcggggactgcacgacagctgcccgggccaagcccgctacctcctctgggcctacacttcgtcgcacgatgataagagcacttttgaagaaacgtgtccatactgtttccagctgttggttctggataactctcgagtgcgtctcaaacccaaagccaggttgacacccaaaatacagaaacttcttaatcgagaagcgagaaactatacactcagttttaaagaagcaaaaatggtgaaaaagttcaaagactccaaaagtgtattgttgatcacttgtaaaacatgcaacagaacagtgaaacatcatggtaaaagtagaagctttgtgtcaacattgaagagcaatcctgccactcctacaagtaaactcagcctgaagacaccagagagaaggactgcaaacccaaatcatgacatgtctggctcgaaaggcaagagcccagcatcggttttcagaacacctacatctggacagtcagtatctacttgctcctcaaagaacaccagcaaaacaaagaaacacttctctcaactaaaaatgttacttagtcagaatgaatcccaaaagattccaaaggtggacttcagaaatttcttatcttctctgaagggtggacttttaaaataagaaatgcctgatgtcaattctgaaactaaagttggtaaaacaactttttaaactcttattcattttttgaatacatggaaactagatctgaatgcaaacttttcttggcatccttcagtgtttatggggaaaatacctcattagtgtgaatacctgaaacctgcctacctcataggacagctgtgaggatcaaaaaatatatgaaagttccttgtagatacatatctatagatatatatgtgtatgtatataaagatagatatatacattgagtagtggcattactgttt

SEQ ID NO: 35425 - DNA, 916 bp, Homo sapiens
taaaaatacaaaaaaattacctggcatggtggtgcacgcctgtaatcccagctactcgagaggatgataagagcacttttgaagaaacgtgtccatactgtttccagctgttggttctggataactctcgagtgcgtctcaaacccaaagccaggttgacacccaaaatacagaaacttcttaatcgagaagcgagaaactatacactcagttttaaagaagcaaaaatggtgaaaaagttcaaagactccaaaagtgtattgttgatcacttgtaaaacatgcaacagaacagtgaaacatcatggtaaaagtagaagctttgtgtcaacattgaagagcaatcctgccactcctacaagtaaactcagcctgaagacaccagagagaaggactgcaaacccaaatcatgacatgtctggctcgaaaggcaagagcccagcatcggttttcagaacacctacatctggacagtcagtatctacttgctcctcaaagaacaccagcaaaacaaagaaacacttctctcaactaaaaatgttacttagtcagaatgaatcccaaaagattccaaaggtggacttcagaaatttcttatcttctctgaagggtggacttttaaaataagaaatgcctgatgtcaattctgaaactaaagttggtaaaacaactttttaaactcttattcattttttgaatacatggaaactagatctgaatgcaaacttttcttggcatccttcagtgtttatggggaaaatacctcattagtgtgaatacctgaaacctgcctacctcataggacagctgtgaggatcaaaaaatatatgaaagttccttgtagatacatatctatagatatatatgtgtatgtatataaagatagatatatacattgagtagtggcattactgttt

SEQ ID NO: 35426 - DNA, 1091 bp, Homo sapiens
aaaaagcagctgtaccgtccgaatcccggatgcgcgagccagcggcagcggcggcggcgatgagacagaagcactaccttgaggctgcagcgcggggactgcacgacagctgcccgggccaagcccgctacctcctgtaagaggactggaggggaagcgggaggcgagcgggtaggtgttcctttgctcctcacaagtctctttctcttttacagctgggcctacacttcgtcgcacgatgataagagcacttttgaagaaacgtgtccatactgtttccagctgttggttctggataactctcgagtgcgtctcaaacccaaagccaggttgacacccaaaatacagaaacttcttaatcgagaagcgagaaactatacactcagttttaaagaagcaaaaatggtgaaaaagttcaaagactccaaaagtgtattgttgatcacttgtaaaacatgcaacagaacagtgaaacatcatggtaaaagtagaagctttgtgtcaacattgaagagcaatcctgccactcctacaagtaaactcagcctgaagacaccagagagaaggactgcaaacccaaatcatgacatgtctggctcgaaaggcaagagcccagcatcggttttcagaacacctacatctggacagtcagtatctacttgctcctcaaagaacaccagcaaaacaaagaaacacttctctcaactaaaaatgttacttagtcagaatgaatcccaaaagattccaaaggtggacttcagaaatttcttatcttctctgaagggtggacttttaaaataagaaatgcctgatgtcaattctgaaactaaagttggtaaaacaactttttaaactcttattcattttttgaatacatggaaactagatctgaatgcaaacttttcttggcatccttcagtgtttatggggaaaatacctcattagtgtgaatacctgaaacctgcctacctcataggacagctgtgaggatcaaaaaatatatgaaagttccttgtagatacatatctatagatatatatgtgtatgtatataaagatagatatatacattgagtagtggcattactgttt

SEQ ID NO: 35427 - DNA, 722 bp, Homo sapiens
taggctcgggcctggttggctcgggttagcagaaatggtgaaaaagttcaaagatccaaaagtgtattgttgatcacttgtaaaacatgcaacagaacagtgaaacatcatggtaaaagtagaagctttgtgtcaacattgaagagcaatcctgccactcctacaagtaaactcagcctgaagacaccagagagaaggactgcaaacccaaatcatgacatgtctggctcgaaaggcaagagcccagcatcggttttcagaacacctacatctggacagtcagtatctacttgctcctcaaagaacaccagcaaaacaaagaaacacttctctcaactaaaaatgttacttagtcagaatgaatcccaaaagattccaaaggtggacttcagaaatttcttatcttctctgaagggtggacttttaaaataagaaatgcctgatgtcaattctgaaactaaagttggtaaaacaactttttaaactcttattcattttttgaatacatggaaactagatctgaatgcaaacttttcttggcatccttcagtgtttatggggaaaatacctcattagtgtgaatacctgaaacctgcctacctcataggacagctgtgaggatcaaaaaatatatgaaagttccttgtagatacatatctatagatatatatgtgtatgtatataaagatagatatatacattgagtagtggcattactgttt

SEQ ID NO: 35428 - DNA, 315 bp, Homo sapiens
aaaaagcagctgtaccgtccgaatcccggatgcgcgagccagcggcagcggcggcggcgatgagacagaagcactaccttgaggctgcagcgcggggactgcacgacagctgcccgggccaagcccgctacctcctgtaagaggactggaggggaagcgggaggcgagcgggccagtatgcgagcaaatcctgttggctttaaaatgtagccaaaatcagccaggagcggtggctcacccctgtaatcccagcactttgagatgcagaggcgggcggatcatttgaggccaggagttcgagaccaacctgccaac

SEQ ID NO: 35429 - DNA, 373 bp, Homo sapiens
atagttgtcaaaacttcgggtactattttaacatacatcagcacttgttaatttgctgtaattccctcaatagaacaccaagctttagttttcagtatgtttcttgggcaagtgaggtggtaggtggccatgtactagatcaaacttgattttctagggattgttttcccacttttagagaataccattcttaggctaaactcaattacagaatctactgcatgctatacagccctctatagaaatattcaccctgagtagttaattatgtttcttaatgggtaaatgttttatctagtccctctttttttttaatttcataaaatccagatctctcagagcttaaatacacttcctcttattttccctacaa

SEQ ID NO: 35430 - DNA, 258 bp, Homo sapiens
tgcaggtctgccccgtgccatcactgctgttggtatcactgttccccctgcttgcccctgggacccagcccaaaaggccgcaaagtacaacagaaagggcacgtttgctgtgggaatacatcgaaaagaaaaaggaggcacctgctgcaactattttttcgtggtttttgtttctcaaatattgacaattatgccttcaagaatgcttccaaaattgttaaaaaaaaaattctttaaataaaattttaattaaccctt

SEQ ID NO: 35431 - DNA, 539 bp, Homo sapiens
caaagaaatacctgtgcaagtagaatagcttgcttcaaacagatgagatttgtcctcccaacatcaaaacatatcacaaaactacagtaattaagtccctttgaggccagcactgactgagataagcaaatagataaatgggatgtaacaggccttatttcaaactaataggttgttcaccaactcctagttggataccctgctatccattatgaaaaagaaaaaaaggtaagttctcatcttacaccatacttaaatttcagatgaattaagtattaaacataaaaattaaatgaaacatgggtttccctgggtattctaagcctaactccaaacttggaagctgcaaagtttggctttgtggctctacatggaaaaaaaaaatagaagctgcaaaggagaatattttacctatttgactacataaaagcttaaaattactacatgacaaggtactgtaaaaatagttaaaggataaatggcaaactaatagaaaacacttgcaacaaagggttaataaaacataaagagaaaaaaaa

SEQ ID NO: 35432 - DNA, 383 bp, Homo sapiens
tctcagctcactgcaaccaccacttcccagctcaaatgatcctccagcctcagcctcctgagtagctgggactataggcacaagccactatgcccagataatttttgtattttttgcagagatggggttttgcccaggctggtcttgaactactgagcttaaagtgatctgcccacttctgcctcccaaagtgctaggattacatatgtgagtcaccatacccagcccataatattcttttattatacttttaatgtccatgagatctgtagtgatgtctcctctttcacttgtgacattagtaatttgtttttttttcttagttagcatggcttagaggcttatcaatcttactgatctttttaaagaaacagcttttggtc

SEQ ID NO: 35433 - DNA, 739 bp, Homo sapiens
catcaacatcacctggcaacttgttagaaattccaattctacgggtaaaatcaaggtctaggggtagggcccagtgatcacggttctaaagcccttcaggtgattctaatgtttgcttaagtttgagagttacagactagtttcataaagctcaggctgctttgtcctgcaaggagcaggaaatcctaaagagcaggaaagctatgtgtcccaggtatatggcctctacagcacctagcacagtatcatacacacggtaggcattcacacttgctgaataggttaattcagtctcacataaccgatgactgactagacaacagcatcatcagtttcacagaggtcagaaatttgggggactatttgcattaactaataataagtacatgatgcacacatatcagtaactgttaaataactgggaaagccctgggcctctggtactttggccaataacattaccaggcttacgaagtgtcatatcctttgaaattcaggtgaaaaatatgtttctcattttgccagtatagaaaaaggatgtatccgtggctccatataactatagaacataaactgaaatgcaaactgtttggttgcctttaaaaagcatattttgaccaggtacagtggctcacgcctgtaatcccagcactttgggaggccaaggcgggcggatcacctgaggtcaggagtttgagaacagcctggccaacatggcgaaaccccatctctactaaaa

SEQ ID NO: 35434 - DNA, 377 bp, Homo sapiens
agtaggagggaagagggccagagctgagagctctggggtggagtccagtgccagtcctaccactgactcatcatgtgagtcacctctcttgagacccagtcacctctacttgtccattttatagtacccttggaaagttcccatgagttaatgggtatggaaggacctggtaaataaatcaagtgcccctgagttgtagggtgctataactatcattagctgagcaaggaggttaccaacagccccatcccattcctgatgcatcttggggctatttatggcgagtccccaggcctgctaccgccatcgtgtcctcagcacatcagggcttgcttgttcacatacccctccctgtgtacaagcctgaaactcaggga

SEQ ID NO: 35435 - DNA, 668 bp, Homo sapiens
ggtttcaccatcttggccaggatggtctctatctcctgaccttgtgatctgcccaccttggcctcccaaagtgctgggatcctaagtacagacgtgagccaccgtgcccggccattcttaacctcttgaaactccttaagactttggtgaaagccatagacctctcttcccagaagaatgaacacgtggtttgccggcaccttaggaacccccaaagcccatgagacaaagccctggatctataaggccctgtcccatctgacccccggccttcccctgggcacatacctccagctacacagggctttcatacacactgcccctttgcctggtccagctctgctcatccttcaagtctcacccttccctgacttccagcttagattaggtcgccctgctagacatgcgtcccccaccctgaatttagcactgatcaccgggataactaagtgattcttcgtgcatgttatccgaccctccccaagctccgtgttggtatttgttgagtaaatctctgaggcccctccagctatgacattctgagactgatctataagtttgcagatgtgtcataagagagtccctgagcttgtatttcctatgacattcgacacgtggtggcctttgccttcgatgatttcctccaggcctggacaggaaagttactt

SEQ ID NO: 35436 - DNA, 1176 bp, Homo sapiens
agaatgaagctgctctggtggtgtgactggcttccagaaaggtctcatgtgttcactcagaggtagttatgtgtactgattctgtgatctgtgaagtttgtcagtctctgaatgtaatttgtgtctggcttgcatttatgaaaatgagaagaaaaatcacgaatataccttacatatttttagatttagcctctttaaaaatagtggatttataacttaggatctttttttttctattaacctgattatatagcctttcgggatatttattagtttataaaatgtaatgcaaggagatagtcttaaaaagttgaaacacaggttgtaggctaaacgttttttttaacccatttgtaactcaaaactcattgttccacagaaccatgttgataggaatcttgagttttccacaccagcctgttaattctgtttacctgaaaagtgtattactgctaataatgtaggctctaaccgctatggaaattttatttctatggggaattgtgtctggattctaatgcagtatgctgggaatgcaccttctttttagcaggacagggctcttgagtgtgggggcttcctttggcctctttttcgcagttggggaggacaggggtttctattttgtcctggactgttacagaacatgactaagtcttagagacttctacctcccctctactccggcgcctaaggcaagccttgtaaagccttctgtggactcacgctcccagatttgcaagaacagaggaaggcttatcccacatctcctaccatagccccactctagtcagcaccactcctgccccacctgaaaccagcttttacttagaccagaggttctcaaccgtctatgtctcacttgtggcgtacactaaaaagtttacttaacatgctgttttcatacgctgttgatccatcagcaagtcctgttagctctacctccaaaagatatctgaaatctgtccatgtttctcccatcaccattactaagtcctggaggctataacctcgtcaaaaccagtgtcattttttgcctggaacactacagaaaccacctaacttacttcctgttctggccctcttacagtctatttaccagatcactcaacagtttttaaaagtataaatcaggtcatgccatttccctgtttaaaataaccctgtggaaaagca

SEQ ID NO: 35437 - DNA, 347 bp, Homo sapiens
ggcacgagaccatgagtcaataccctgtagtcacgctgttgcgacgagcgggagccgggccagatcgcgaggtcactcgtggagttccgggtacctcctgcaaggccgtccaccgagcctcgagtcccgcccatggggctacattctgagcccgtcgcgcacagacgcgccacatagtgccaccaaccccccacacccctctctgaactggtagcagtttcccaggatctccaggctgtttcttccatccttccatgcctccacatatgctttcctcttacttccctgttgtgcctggctcctctgccatcacctgaagacccccacggcgagccctatgcagtctt

SEQ ID NO: 35438 - DNA, 488 bp, Homo sapiens
gatttgaggctgcacgacgttcaccatggtcttgtgtgggaggatcctggcgtaacgggccagaacattggcattttccatgatggcgagggctgagggggtgtgttccccaatcttcagcagtgatcaagcttcggcaaggtgctgcttggagagctgaagggcagaggagagtactttgccatcaaggccctcaagaaggatgtggtcctgatcgacgacgacgtggagtgcaccatggttgagaagcgggtgctgacacttgccgcagagaatccctttctcacccacctcatctgcaccttccagaccaagaccacctgtctttgtgatgagtcctcacggggggactgatgtacacatcagacaagcccccttgacttacgtgcacgtttatgcctgaatatgtgtgatgcattctacacacaggcatcattacaggacctcaactgacatgtgctgtgacggatgcaatcagatcgacttga

SEQ ID NO: 35439 - DNA, 2611 bp, Homo sapiens
cgtgacgcgtgggtcgacccacgtcgtcgacccccggcgcccgcccgccgcgcggaggcccgggccacacctcactggccgcttggcccatcccagtcagcgccgcgccgaaccccgtccgcgcgcgccggggagcggcgcccccgccgctgccgccgcgacccttggcgcctgcccctgcaacgggagccccactgcaggccccaccatggcgccgttcctgcgcatcgccttcaactcctatgagctgggctccctgcaggccgaggacgaggcgaaccagcccttctgtgccgtgaagatgaaggaggcgctcagcacagagcgtgggaaaacactggtgcagaagaagccgaccatgtatcctgagtggaagtcgacgttcgatgcccacatctatgaggggcgcgtcatccagattgtgctaatgcgggcagcagaggagccagtgtctgaggtgaccgtgggtgtgtcggtgctggccgagcgctgcaagaagaacaatggcaaggctgagttctggctggacctgcagcctcaggccaaggtgttgatgtctgttcagtatttcctggaggacgtggattgcaaacagtctatgcgcagtgaggacgaggccaagttcccaacgatgaaccgccgcggagccatcaaacaggccaaaatccactacatcaagaaccatgagtttatcgccaccttctttgggcaacccaccttctgttctgtgtgcaaagactttgtctggggcctcaacaagcaaggctacaaatgcaggcaatgtaacgctgccatccacaagaaatgcatcgacaagatcatcggcagatgcactggcaccgcggccaacagccgggacactatattccagaaagaacgcttcaacatcgacatgccgcaccgcttcaaggttcacaactacatgagccccaccttctgtgaccactgcggcagcctgctctggggactggtgaagcagggattaaagtgtgaagactgcggcatgaatgtgcaccataaatgccgggagaaggtggccaacctctgcggcatcaaccagaagcttttggctgaggccttgaaccaagtcacccagagagcctcccggagatcagactcagcctcctcagagcctgttgggatatatcagggtttcgagaagaagaccggagttgctggggaggacatgcaagacaacagtgggacctacggcaagatctgggagggcagcagcaagtgcaacatcaacaacttcatcttccacaaggtcctgggcaaaggcagcttcgggaaggtgctgcttggagagctgaagggcagaggagagtactttgccatcaaggccctcaagaaggatgtggtcctgatcgacgacgacgtggagtgcaccatggttgagaagcgggtgctgacacttgccgcagagaatccctttctcacccacctcatctgcaccttccagaccaaggaccacctgttctttgtgatggagttcctcaacgggggggacctgatgtaccacatccaggacaaaggccgctttgaactctaccgtgccacgttttatgccgctgagataatgtgtggactgcagtttctacacagcaagggcatcatttacagggacctcaaactggacaatgtgctgttggaccgggatggccacatcaagattgccgactttgggatgtgcaaagagaacatattcggggagagccgggccagcaccttctgcggcacccctgactatatcgcccctgagatcctacagggcctgaagtacacattctctgtggactggtggtctttcggggtccttctgtacgagatgctcattggccagtcccccttccatggtgatgatgaggatgaactcttcgagtccatccgtgtggacacgccacattatccccgctggatcaccaaggagtccaaggacatcctggagaagctctttgaaagggaaccaaccaagaggctgggagtgacgggaaacatcaaaatccaccccttcttcaagaccataaactggactctgctggaaaagcggaggttggagccacccttcaggcccaaagtgaagtcacccagagactacagtaactttgaccaggagttcctgaacgagaaggcgcgcctctcctacagcgacaagaacctcatcgactccatggaccagtctgcattcgctggcttctcctttgtgaaccccaaattcgagcacctcctggaagattgaggttcctggacagatcaggctagccctgccctccacccacacctgcccgctccccacgataagcaccagtgggactgtggtgacttctgctgctggccccgcccctgcccccagagcgtccttggctgccgtctggccgggctctcatggtacttcctctgtgaactgtgtgtgaatctgcttttcctctgccttcggagggaaattgtaaatcctgtgtttcattacttgaatgtagttatctattgaaaatatatattatatacatagacatatatatatatataataggctgtatatattgctcagtagagaaaaaccatgggggactggtgatatgttgatctttttcaaaaaaatatatatatgaca

SEQ ID NO: 35440 - DNA, 2706 bp, Homo sapiens
tgccgcggcgccggagcccgaggcggctgtagcccacatctcccgagcgacccccggcgcccgcccgccgcgcggaggcccgggccacacctcactggccgcttggcccatcccagtcagcgccgcgccgaaccccgtccgcgcgcgccggggagcggcgcccccgccgctgccgccgcgacccttggcgcctgcccctgcaacgggagccccactgcaggccccaccatggcgccgttcctgcgcatcgccttcaactcctatgagctgggctccctgcaggccgaggacgaggcgaaccagcccttctgtgccgtgaagatgaaggaggcgctcagcacagagcgtgggaaaacactggtgcagaagaagccgaccatgtatcctgagtggaagtcgacgttcgatgcccacatctatgaggggcgcgtcatccagattgtgctaatgcgggcagcagaggagccagtgtctgaggtgaccgtgggtgtgtcggtgctggccgagcgctgcaagaagaacaatggcaaggctgagttctggctggacctgcagcctcaggccaaggtgttgatgtctgttcagtatttcctggaggacgtggattgcaaacagtctatgcgcagtgaggacgaggccaagttcccaacgatgaaccgccgcggagccatcaaacaggccaaaatccactacatcaagaaccatgagtttatcgccaccttctttgggcaacccaccttctgttctgtgtgcaaagactttgtctggggcctcaacaagcaaggctacaaatgcaggcaatgtaacgctgccatccacaagaaatgcatcgacaagatcatcggcagatgcactggcaccgcggccaacagccgggacactatattccagaaagaacgcttcaacatcgacatgccgcaccgcttcaaggttcacaactacatgagccccaccttctgtgaccactgcggcagcctgctctggggactggtgaagcagggattaaagtgtgaagactgcggcatgaatgtgcaccataaatgccgggagaaggtggccaacctctgcggcatcaaccagaagcttttggctgaggccttgaaccaagtcacccagagagcctcccggagatcagactcagcctcctcagagcctgttgggatatatcagggtttcgagaagaagaccggagttgctggggaggacatgcaagacaacagtgggacctacggcaagatctgggagggcagcagcaagtgcaacatcaacaacttcatcttccacaaggtcctgggcaaaggcagcttcgggaaggtgctgcttggagagctgaagggcagaggagagtactttgccatcaaggccctcaagaaggatgtggtcctgatcgacgacgacgtggagtgcaccatggttgagaagcgggtgctgacacttgccgcagagaatccctttctcacccacctcatctgcaccttccagaccaaggaccacctgttctttgtgatggagttcctcaacgggggggacctgatgtaccacatccaggacaaaggccgctttgaactctaccgtgccacgttttatgccgctgagataatgtgtggactgcagtttctacacagcaagggcatcatttacagggacctcaaactggacaatgtgctgttggaccgggatggccacatcaagattgccgactttgggatgtgcaaagagaacatattcggggagagccgggccagcaccttctgcggcacccctgactatatcgcccctgagatcctacagggcctgaagtacacattctctgtggactggtggtctttcggggtccttctgtacgagatgctcattggccagtcccccttccatggtgatgatgaggatgaactcttcgagtccatccgtgtggacacgccacattatccccgctggatcaccaaggagtccaaggacatcctggagaagctctttgaaagggaaccaaccaagaggctgggagtgacgggaaacatcaaaatccaccccttcttcaagaccataaactggactctgctggaaaagcggaggttggagccacccttcaggcccaaagtgaagtcacccagagactacagtaactttgaccaggagttcctgaacgagaaggcgcgcctctcctacagcgacaagaacctcatcgactccatggaccagtctgcattcgctggcttctcctttgtgaaccccaaattcgagcacctcctggaagattgaggttcctggacagatcaggctagccctgccctccacccacacctgcccgctccccacgataagcaccagtgggactgtggtgacttctgctgctggccccgcccctgcccccagagcgtccttggctgccgtctggccgggctctcatggtacttcctctgtgaactgtgtgtgaatctgcttttcctctgccttcggagggaaattgtaaatcctgtgtttcattacttgaatgtagttatctattgaaaatatatattatatacatagacatatatatatatataataggctgtatatattgctcagtagagaaaaaccatgggggactggtgatatgttgatctttttcaaaaaaatatatatatgacaaaaaaaaaaaaggagcacaagctgtttgaaccaccaggtttatttgtgtgtctaaataaacaccaaatagtacca

SEQ ID NO: 35441 - DNA, 2713 bp, Homo sapiens
tgccgcggcgccggagcccgaggcggctgtagcccacatctcccgagcgacccccggcgcccgcccgccgcgcggaggcccgggccacacctcactggccgcttggcccatcccagtcagcgccgcgccgaaccccgtccgcgcgcgccggggagcggcgcccccgccgctgccgccgcgacccttggcgcctgcccctgcaacgggaggctggagtgcagtggcaagatctcggctcactgcaacctctacctcccgggttcaagtgattcttctgcctcagcctcccagccccactgcaggccccaccatggcgccgttcctgcgcatcgccttcaactcctatgagctgggctccctgcaggccgaggacgaggcgaaccagcccttctgtgccgtgaagatgaaggaggcgctcagcacagagcgtgggaaaacactggtgcagaagaagccgaccatgtatcctgagtggaagtcgacgttcgatgcccacatctatgaggggcgcgtcatccagattgtgctaatgcgggcagcagaggagccagtgtctgaggtgaccgtgggtgtgtcggtgctggccgagcgctgcaagaagaacaatggcaaggctgagttctggctggacctgcagcctcaggccaaggtgttgatgtctgttcagtatttcctggaggacgtggattgcaaacagtctatgcgcagtgaggacgaggccaagttcccaacgatgaaccgccgcggagccatcaaacaggccaaaatccactacatcaagaaccatgagtttatcgccaccttctttgggcaacccaccttctgttctgtgtgcaaagactttgtctggggcctcaacaagcaaggctacaaatgcaggcaatgtaacgctgccatccacaagaaatgcatcgacaagatcatcggcagatgcactggcaccgcggccaacagccgggacactatattccagaaagaacgcttcaacatcgacatgccgcaccgcttcaaggttcacaactacatgagccccaccttctgtgaccactgcggcagcctgctctggggactggtgaagcagggattaaagtgtgaagactgcggcatgaatgtgcaccataaatgccgggagaaggtggccaacctctgcggcatcaaccagaagcttttggctgaggccttgaaccaagtcacccagagagcctcccggagatcagactcagcctcctcagagcctgttgggatatatcagggtttcgagaagaagaccggagttgctggggaggacatgcaagacaacagtgggacctacggcaagatctgggagggcagcagcaagtgcaacatcaacaacttcatcttccacaaggtcctgggcaaaggcagcttcgggaaggtgctgcttggagagctgaagggcagaggagagtactttgccatcaaggccctcaagaaggatgtggtcctgatcgacgacgacgtggagtgcaccatggttgagaagcgggtgctgacacttgccgcagagaatccctttctcacccacctcatctgcaccttccagaccaaggaccacctgttctttgtgatggagttcctcaacgggggggacctgatgtaccacatccaggacaaaggccgctttgaactctaccgtgccacgttttatgccgctgagataatgtgtggactgcagtttctacacagcaagggcatcatttacagggacctcaaactggacaatgtgctgttggaccgggatggccacatcaagattgccgactttgggatgtgcaaagagaacatattcggggagagccgggccagcaccttctgcggcacccctgactatatcgcccctgagatcctacagggcctgaagtacacattctctgtggactggtggtctttcggggtccttctgtacgagatgctcattggccagtcccccttccatggtgatgatgaggatgaactcttcgagtccatccgtgtggacacgccacattatccccgctggatcaccaaggagtccaaggacatcctggagaagctctttgaaagggaaccaaccaagaggctgggagtgacgggaaacatcaaaatccaccccttcttcaagaccataaactggactctgctggaaaagcggaggttggagccacccttcaggcccaaagtgaagtcacccagagactacagtaactttgaccaggagttcctgaacgagaaggcgcgcctctcctacagcgacaagaacctcatcgactccatggaccagtctgcattcgctggcttctcctttgtgaaccccaaattcgagcacctcctggaagattgaggttcctggacagatcaggctagccctgccctccacccacacctgcccgctccccacgataagcaccagtgggactgtggtgacttctgctgctggccccgcccctgcccccagagcgtccttggctgccgtctggccgggctctcatggtacttcctctgtgaactgtgtgtgaatctgcttttcctctgccttcggagggaaattgtaaatcctgtgtttcattacttgaatgtagttatctattgaaaatatatattatatacatagacatatatatatatataataggctgtatatattgctcagtagagaaaaaccatgggggactggtgatatgttgatctttttcaaaaaaatatatatatgaca

SEQ ID NO: 35442 - DNA, 2155 bp, Homo sapiens
ccagccggcccgtaagatcgcagacgtaagcccggcaagccaaggcgcgccgcatcgccccgcgccccgcgtcgggtccatccggcccatcgtgcgctgcccacggtgggccggatgggaccgagtggattgcaaacagtctatgcgcagtgaggacgaggccaagttcccaacgatgaaccgccgcggagccatcaaacaggccaaaatccactacatcaagaaccatgagtttatcgccaccttctttgggcaacccaccttctgttctgtgtgcaaagactttgtctggggcctcaacaagcaaggctacaaatgcaggcaatgtaacgctgccatccacaagaaatgcatcgacaagatcatcggcagatgcactggcaccgcggccaacagccgggacactatattccagaaagaacgcttcaacatcgacatgccgcaccgcttcaaggttcacaactacatgagccccaccttctgtgaccactgcggcagcctgctctggggactggtgaagcagggattaaagtgtgaagactgcggcatgaatgtgcaccataaatgccgggagaaggtggccaacctctgcggcatcaaccagaagcttttggctgaggccttgaaccaagtcacccagagagcctcccggagatcagactcagcctcctcagagcctgttgggatatatcagggtttcgagaagaagaccggagttgctggggaggacatgcaagacaacagtgggacctacggcaagatctgggagggcagcagcaagtgcaacatcaacaacttcatcttccacaaggtcctgggcaaaggcagcttcgggaaggtgctgcttggagagctgaagggcagaggagagtactttgccatcaaggccctcaagaaggatgtggtcctgatcgacgacgacgtggagtgcaccatggttgagaagcgggtgctgacacttgccgcagagaatccctttctcacccacctcatctgcaccttccagaccaaggaccacctgttctttgtgatggagttcctcaacgggggggacctgatgtaccacatccaggacaaaggccgctttgaactctaccgtgccacgttttatgccgctgagataatgtgtggactgcagtttctacacagcaagggcatcatttacagggacctcaaactggacaatgtgctgttggaccgggatggccacatcaagattgccgactttgggatgtgcaaagagaacatattcggggagagccgggccagcaccttctgcggcacccctgactatatcgcccctgagatcctacagggcctgaagtacacattctctgtggactggtggtctttcggggtccttctgtacgagatgctcattggccagtcccccttccatggtgatgatgaggatgaactcttcgagtccatccgtgtggacacgccacattatccccgctggatcaccaaggagtccaaggacatcctggagaagctctttgaaagggaaccaaccaagaggctgggagtgacgggaaacatcaaaatccaccccttcttcaagaccataaactggactctgctggaaaagcggaggttggagccacccttcaggcccaaagtgaagtcacccagagactacagtaactttgaccaggagttcctgaacgagaaggcgcgcctctcctacagcgacaagaacctcatcgactccatggaccagtctgcattcgctggcttctcctttgtgaaccccaaattcgagcacctcctggaagattgaggttcctggacagatcaggctagccctgccctccacccacacctgcccgctccccacgataagcaccagtgggactgtggtgacttctgctgctggccccgcccctgcccccagagcgtccttggctgccgtctggccgggctctcatggtacttcctctgtgaactgtgtgtgaatctgcttttcctctgccttcggagggaaattgtaaatcctgtgtttcattacttgaatgtagttatctattgaaaatatatattatatacatagacatatatatatatataataggctgtatatattgctcagtagagaaaaaccatgggggactggtgatatgttgatctttttcaaaaaaatatatatatgaca

SEQ ID NO: 35443 - DNA, 1977 bp, Homo sapiens
ttcatatatatatttttttgaaaaagatcaacatatcaccagtcccccatggtttttctctactgagcaatatatacagcctattatatatatatatatgtctatgtatataatatatattttcaatagataactacattcaagtaatgaaacacaggatttacaatttccctccgaaggcagaggaaaagcagatgcactggcaccgcggccaacagccgggacactatattccagaaagaacgcttcaacatcgacatgccgcaccgcttcaaggttcacaactacatgagccccaccttctgtgaccactgcggcagcctgctctggggactggtgaagcagggattaaagtgtgaagactgcggcatgaatgtgcaccataaatgccgggagaaggtggccaacctctgcggcatcaaccagaagcttttggctgaggccttgaaccaagtcacccagagagcctcccggagatcagactcagcctcctcagagcctgttgggatatatcagggtttcgagaagaagaccggagttgctggggaggacatgcaagacaacagtgggacctacggcaagatctgggagggcagcagcaagtgcaacatcaacaacttcatcttccacaaggtcctgggcaaaggcagcttcgggaaggtgctgcttggagagctgaagggcagaggagagtactttgccatcaaggccctcaagaaggatgtggtcctgatcgacgacgacgtggagtgcaccatggttgagaagcgggtgctgacacttgccgcagagaatccctttctcacccacctcatctgcaccttccagaccaaggaccacctgttctttgtgatggagttcctcaacgggggggacctgatgtaccacatccaggacaaaggccgctttgaactctaccgtgccacgttttatgccgctgagataatgtgtggactgcagtttctacacagcaagggcatcatttacagggacctcaaactggacaatgtgctgttggaccgggatggccacatcaagattgccgactttgggatgtgcaaagagaacatattcggggagagccgggccagcaccttctgcggcacccctgactatatcgcccctgagatcctacagggcctgaagtacacattctctgtggactggtggtctttcggggtccttctgtacgagatgctcattggccagtcccccttccatggtgatgatgaggatgaactcttcgagtccatccgtgtggacacgccacattatccccgctggatcaccaaggagtccaaggacatcctggagaagctctttgaaagggaaccaaccaagaggctgggagtgacgggaaacatcaaaatccaccccttcttcaagaccataaactggactctgctggaaaagcggaggttggagccacccttcaggcccaaagtgaagtcacccagagactacagtaactttgaccaggagttcctgaacgagaaggcgcgcctctcctacagcgacaagaacctcatcgactccatggaccagtctgcattcgctggcttctcctttgtgaaccccaaattcgagcacctcctggaagattgaggttcctggacagatcaggctagccctgccctccacccacacctgcccgctccccacgataagcaccagtgggactgtggtgacttctgctgctggccccgcccctgcccccagagcgtccttggctgccgtctggccgggctctcatggtacttcctctgtgaactgtgtgtgaatctgcttttcctctgccttcggagggaaattgtaaatcctgtgtttcattacttgaatgtagttatctattgaaaatatatattatatacatagacatatatatatatataataggctgtatatattgctcagtagagaaaaaccatgggggactggtgatatgttgatctttttcaaaaaaatatatatatgaca

SEQ ID NO: 35444 - DNA, 1458 bp, Homo sapiens
gatttgaggctgcacgacgttcaccatggtcttgtgtgggaggatcctggcgtaacgggccagaacattggcattttccatgatggcgagggctgagggggtgtgttccccaatcttcagcagtgatcaagcttcggcaaggtgctgcttggagagctgaagggcagaggagagtactttgccatcaaggccctcaagaaggatgtggtcctgatcgacgacgacgtggagtgcaccatggttgagaagcgggtgctgacacttgccgcagagaatccctttctcacccacctcatctgcaccttccagaccaaggaccacctgttctttgtgatggagttcctcaacgggggggacctgatgtaccacatccaggacaaaggccgctttgaactctaccgtgccacgttttatgccgctgagataatgtgtggactgcagtttctacacagcaagggcatcatttacagggacctcaaactggacaatgtgctgttggaccgggatggccacatcaagattgccgactttgggatgtgcaaagagaacatattcggggagagccgggccagcaccttctgcggcacccctgactatatcgcccctgagatcctacagggcctgaagtacacattctctgtggactggtggtctttcggggtccttctgtacgagatgctcattggccagtcccccttccatggtgatgatgaggatgaactcttcgagtccatccgtgtggacacgccacattatccccgctggatcaccaaggagtccaaggacatcctggagaagctctttgaaagggaaccaaccaagaggctgggagtgacgggaaacatcaaaatccaccccttcttcaagaccataaactggactctgctggaaaagcggaggttggagccacccttcaggcccaaagtgaagtcacccagagactacagtaactttgaccaggagttcctgaacgagaaggcgcgcctctcctacagcgacaagaacctcatcgactccatggaccagtctgcattcgctggcttctcctttgtgaaccccaaattcgagcacctcctggaagattgaggttcctggacagatcaggctagccctgccctccacccacacctgcccgctccccacgataagcaccagtgggactgtggtgacttctgctgctggccccgcccctgcccccagagcgtccttggctgccgtctggccgggctctcatggtacttcctctgtgaactgtgtgtgaatctgcttttcctctgccttcggagggaaattgtaaatcctgtgtttcattacttgaatgtagttatctattgaaaatatatattatatacatagacatatatatatatataataggctgtatatattgctcagtagagaaaaaccatgggggactggtgatatgttgatctttttcaaaaaaatatatatatgaca

SEQ ID NO: 35445 - DNA, 2494 bp, Homo sapiens
tgccgcggcgccggagcccgaggcggctgtagcccacatctcccgagcgacccccggcgcccgcccgccgcgcggaggcccgggccacacctcactggccgcttggcccatcccagtcagcgccgcgccgaaccccgtccgcgcgcgccggggagcggcgcccccgccgctgccgccgcgacccttggcgcctgcccctgcaacgggagccccactgcaggccccaccatggcgccgttcctgcgcatcgccttcaactcctatgagctgggctccctgcaggccgaggacgaggcgaaccagcccttctgtgccgtgaagatgaaggaggcgctcagcacagagcgtgggaaaacactggtgcagaagaagccgaccatgtatcctgagtggaagtcgacgttcgatgcccacatctatgaggggcgcgtcatccagattgtgctaatgcgggcagcagaggagccagtgtctgaggtgaccgtgggtgtgtcggtgctggccgagcgctgcaagaagaacaatggcaaggctgagttctggctggacctgcagcctcaggccaaggtgttgatgtctgttcagtatttcctggaggacgtggattgcaaacagtctatgcgcagtgaggacgaggccaagttcccaacgatgaaccgccgcggagccatcaaacaggccaaaatccactacatcaagaaccatgagtttatcgccaccttctttgggcaacccaccttctgttctgtgtgcaaagactttgtctggggcctcaacaagcaaggctacaaatgcaggcaatgtaacgctgccatccacaagaaatgcatcgacaagatcatcggcagatgcactggcaccgcggccaacagccgggacactatattccagaaagaacgcttcaacatcgacatgccgcaccgcttcaaggttcacaactacatgagccccaccttctgtgaccactgcggcagcctgctctggggactggtgaagcagggattaaagtgtgaagactgcggcatgaatgtgcaccataaatgccgggagaaggtggccaacctctgcggcatcaaccagaagcttttggctgaggccttgaaccaagtcacccagagagcctcccggagatcagactcagcctcctcagagcctgttgggatatatcagggtttcgagaagaagaccggagttgctggggaggacatgcaagacaacagtgggacctacggcaagatctgggagggcagcagcaagtgcaacatcaacaacttcatcttccacaaggtcctgggcaaaggcagcttcgggaaggtgctgcttggagagctgaagggcagaggagagtactttgccatcaaggccctcaagaaggatgtggtcctgatcgacgacgacgtggagtgcaccatggttgagaagcgggtgctgacacttgccgcagagaatccctttctcacccacctcatctgcaccttccagaccaaggaccacctgttctttgtgatggagttcctcaacgggggggacctgatgtaccacatccaggacaaaggccgctttgaactctaccgtgccacgttttatgccgctgagataatgtgtggactgcagtttctacacagcaagggcatcatttacagggacctcaaactggacaatgtgctgttggaccgggatggccacatcaagattgccgactttgggatgtgcaaagagaacatattcggggagagccgggccagcaccttctgcggcacccctgactatatcgcccctgagatcctacagggcctgaagtacacattctctgtggactggtggtctttcggggtccttctgtacgagatgctcattggccagtcccccttccatggtgatgatgaggatgaactcttcgagtccatccgtgtggacacgccacattatccccgctggatcaccaaggagtccaaggacatcctggagaagctctttgaaagggaaccaaccaagaggctgggagtgacgggaaacatcaaaatccaccccttcttcaagaccataaactggactctgctggaaaagcggaggttggagccacccttcaggcccaaagtgaagtcacccagagactacagtaactttgaccaggagttcctgaacgagaaggcgcgcctctcctacagcgacaagaacctcatcgactccatggaccagtctgcattcgctgggctggccccgcccctgcccccagagcgtccttggctgccgtctggccgggctctcatggtacttcctctgtgaactgtgtgtgaatctgcttttcctctgccttcggagggaaattgtaaatcctgtgtttcattacttgaatgtagttatctattgaaaatatatattatatacatagacatatatatatatataataggctgtatatattgctcagtagagaaaaaccatgggggactggtgatatgttgatctttttcaaaaaaatatatatatgaca

SEQ ID NO: 35446 - DNA, 810 bp, Homo sapiens
ttcatatatatatttttttgaaaaagatcaacatatcaccagtcccccttccatggtgatgatgaggatgaactcttcgagtccatccgtgtggacacgccacattatccccgctggatcaccaaggagtccaaggacatcctggagaagctctttgaaagggaaccaaccaagaggctgggagtgacgggaaacatcaaaatccaccccttcttcaagaccataaactggactctgctggaaaagcggaggttggagccacccttcaggcccaaagtgaagtcacccagagactacagtaactttgaccaggagttcctgaacgagaaggcgcgcctctcctacagcgacaagaacctcatcgactccatggaccagtctgcattcgctggcttctcctttgtgaaccccaaattcgagcacctcctggaagattgaggttcctggacagatcaggctagccctgccctccacccacacctgcccgctccccacgataagcaccagtgggactgtggtgacttctgctgctggccccgcccctgcccccagagcgtccttggctgccgtctggccgggctctcatggtacttcctctgtgaactgtgtgtgaatctgcttttcctctgccttcggagggaaattgtaaatcctgtgtttcattacttgaatgtagttatctattgaaaatatatattatatacatagacatatatatatatataataggctgtatatattgctcagtagagaaaaaccatgggggactggtgatatgttgatctttttcaaaaaaatatatatatgaca

SEQ ID NO: 35447 - DNA, 2088 bp, Homo sapiens
tgccgcggcgccggagcccgaggcggctgtagcccacatctcccgagcgacccccggcgcccgcccgccgcgcggaggcccgggccacacctcactggccgcttggcccatcccagtcagcgccgcgccgaaccccgtccgcgcgcgccggggagcggcgcccccgccgctgccgccgcgacccttggcgcctgcccctgcaacgggagccccactgcaggccccaccatggcgccgttcctgcgcatcgccttcaactcctatgagctgggctccctgcaggccgaggacgaggcgaaccagcccttctgtgccgtgaagatgaaggaggcgctcagcacagagcgtgggaaaacactggtgcagaagaagccgaccatgtatcctgagtggaagtcgacgttcgatgcccacatctatgaggggcgcgtcatccagattgtgctaatgcgggcagcagaggagccagtgtctgaggtgaccgtgggtgtgtcggtgctggccgagcgctgcaagaagaacaatggcaaggctgagttctggctggacctgcagcctcaggccaaggtgttgatgtctgttcagtatttcctggaggacgtggattgcaaacagtctatgcgcagtgaggacgaggccaagttcccaacgatgaaccgccgcggagccatcaaacaggccaaaatccactacatcaagaaccatgagtttatcgccaccttctttgggcaacccaccttctgttctgtgtgcaaagactttgtctggggcctcaacaagcaaggctacaaatgcaggcaatgtaacgctgccatccacaagaaatgcatcgacaagatcatcggcagatgcactggcaccgcggccaacagccgggacactatattccagaaagaacgcttcaacatcgacatgccgcaccgcttcaaggttcacaactacatgagccccaccttctgtgaccactgcggcagcctgctctggggactggtgaagcagggattaaagtgtgaagactgcggcatgaatgtgcaccataaatgccgggagaaggtggccaacctctgcggcatcaaccagaagcttttggctgaggccttgaaccaagtcacccagagagcctcccggagatcagactcagcctcctcagagcctgttgggatatatcagggtttcgagaagaagaccggagttgctggggaggacatgcaagacaacagtgggacctacggcaagatctgggagggcagcagcaagtgcaacatcaacaacttcatcttccacaaggtcctgggcaaaggcagcttcgggaaggtgctgcttggagagctgaagggcagaggagagtactttgccatcaaggccctcaagaaggatgtggtcctgatcgacgacgacgtggagtgcaccatggttgagaagcgggtgctgacacttgccgcagagaatccctttctcacccacctcatctgcaccttccagaccaaggaccacctgttctttgtgatggagttcctcaacgggggggacctgatgtaccacatccaggacaaaggccgctttgaactctaccgtgccacgttttatgccgctgagataatgtgtggactgcagtttctacacagcaagggcatcatttacagggacctcaaactggacaatgtgctgttggaccgggatggccacatcaagattgccgactttgggatgtgcaaagagaacatattcggggagagccgggccagcaccttctgcggcacccctgactatatcgcccctgagatcctacagggcctgaagtacacattctctgtggactggtggtctttcggggtccttctgtacgagatgctcattggctcatggtacttcctctgtgaactgtgtgtgaatctgcttttcctctgccttcggagggaaattgtaaatcctgtgtttcattacttgaatgtagttatctattgaaaatatatattatatacatagacatatatatatatataataggctgtatatattgctcagtagagaaaaaccatgggggactggtgatatgttgatctttttcaaaaaaatatatatatgaca

SEQ ID NO: 35448 - DNA, 1695 bp, Homo sapiens
tgccgcggcgccggagcccgaggcggctgtagcccacatctcccgagcgacccccggcgcccgcccgccgcgcggaggcccgggccacacctcactggccgcttggcccatcccagtcagcgccgcgccgaaccccgtccgcgcgcgccggggagcggcgcccccgccgctgccgccgcgacccttggcgcctgcccctgcaacgggagccccactgcaggccccaccatggcgccgttcctgcgcatcgccttcaactcctatgagctgggctccctgcaggccgaggacgaggcgaaccagcccttctgtgccgtgaagatgaaggaggcgctcagcacagagcgtgggaaaacactggtgcagaagaagccgaccatgtatcctgagtggaagtcgacgttcgatgcccacatctatgaggggcgcgtcatccagattgtgctaatgcgggcagcagaggagccagtgtctgaggtgaccgtgggtgtgtcggtgctggccgagcgctgcaagaagaacaatggcaaggctgagttctggctggacctgcagcctcaggccaaggtgttgatgtctgttcagtatttcctggaggacgtggattgcaaacagtctatgcgcagtgaggacgaggccaagttcccaacgatgaaccgccgcggagccatcaaacaggccaaaatccactacatcaagaaccatgagtttatcgccaccttctttgggcaacccaccttctgttctgtgtgcaaagactttgtctggggcctcaacaagcaaggctacaaatgcaggcaatgtaacgctgccatccacaagaaatgcatcgacaagatcatcggcagatgcactggcaccgcggccaacagccgggacactatattccagaaagaacgcttcaacatcgacatgccgcaccgcttcaaggttcacaactacatgagccccaccttctgtgaccactgcggcagcctgctctggggactggtgaagcagggattaaagtgtgaagactgcggcatgaatgtgcaccataaatgccgggagaaggtggccaacctctgcggcatcaaccagaagcttttggctgaggccttgaaccaagtcacccagagagcctcccggagatcagactcagcctcctcagagcctgttgggatatatcagggtttcgagaagaagaccggagttgctggggaggacatgcaagacaacagtgggacctacggcaagatctgggagggcagcagcaagtgcaacatcaacaacttcatcttccacaaggtcctgggcaaaggcagcttcgggaaggtgctgcttggagagctgaagggcagaggagagtactttgccatcaaggccctcaagaaggatgtggtcctgatcgacgacgacgtggagtgcaccatggttgagaagcgggtgctgacacttgccgcagagaatccctttctcacccacctcatctgcaccttccagaccaaggaccacctgttctttgtgatggagttcctcaacgggggggacctgatgtaccacatccaggacaaaggccgctttgaactctaccgtgccacgtacgtaagggccatggtggggaagggcccagtgtggaggaagggctactggctcagagcccacttccagtctgccctccatgccttcttccctctccctagaaaagccagcctg

SEQ ID NO: 35449 - DNA, 1301 bp, Homo sapiens
tgccgcggcgccggagcccgaggcggctgtagcccacatctcccgagcgacccccggcgcccgcccgccgcgcggaggcccgggccacacctcactggccgcttggcccatcccagtcagcgccgcgccgaaccccgtccgcgcgcgccggggagcggcgcccccgccgctgccgccgcgacccttggcgcctgcccctgcaacgggagccccactgcaggccccaccatggcgccgttcctgcgcatcgccttcaactcctatgagctgggctccctgcaggccgaggacgaggcgaaccagcccttctgtgccgtgaagatgaaggaggcgctcagcacagagcgtgggaaaacactggtgcagaagaagccgaccatgtatcctgagtggaagtcgacgttcgatgcccacatctatgaggggcgcgtcatccagattgtgctaatgcgggcagcagaggagccagtgtctgaggtgaccgtgggtgtgtcggtgctggccgagcgctgcaagaagaacaatggcaaggctgagttctggctggacctgcagcctcaggccaaggtgttgatgtctgttcagtatttcctggaggacgtggattgcaaacagtctatgcgcagtgaggacgaggccaagttcccaacgatgaaccgccgcggagccatcaaacaggccaaaatccactacatcaagaaccatgagtttatcgccaccttctttgggcaacccaccttctgttctgtgtgcaaagactttgtctggggcctcaacaagcaaggctacaaatgcaggcaatgtaacgctgccatccacaagaaatgcatcgacaagatcatcggcagatgcactggcaccgcggccaacagccgggacactatattccagaaagaacgcttcaacatcgacatgccgcaccgcttcaaggttcacaactacatgagccccaccttctgtgaccactgcggctgcccgctccccacgataagcaccagtgggactgtggtgacttctgctgctggccccgcccctgcccccagagcgtccttggctgccgtctggccgggctctcatggtacttcctctgtgaactgtgtgtgaatctgcttttcctctgccttcggagggaaattgtaaatcctgtgtttcattacttgaatgtagttatctattgaaaatatatattatatacatagacatatatatatatataataggctgtatatattgctcagtagagaaaaaccatgggggactggtgatatgttgatctttttcaaaaaaatatatatatgaca

SEQ ID NO: 35450 - DNA, 490 bp, Homo sapiens
gggtggagggcagggctagcctgatctgtccaagaacctcatcgactccatggaccagtctgcattcgctggcttctcctttgtgaaccccaaattcgagcacctcctggaagattgaggttcctggacagatcaggctagccctgccctccacccacacctgcccgctccccacgataagcaccagtgggactgtggtgacttctgctgctggccccgcccctgcccccagagcgtccttggctgccgtctggccgggctctcatggtacttcctctgtgaactgtgtgtgaatctgcttttcctctgccttcggagggaaattgtaaatcctgtgtttcattacttgaatgtagttatctattgaaaatatatattatatacatagacatatatatatatataataggctgtatatattgctcagtagagaaaaaccatgggggactggtgatatgttgatctttttcaaaaaaatatatatatgaca

SEQ ID NO: 35451 - DNA, 584 bp, Homo sapiens
cgtacgtggatgaagcttgcataagtgtgatgactgcggcatgaatgtgcaccataaatgccgggagaaggtggccaacctctgcggcatcaaccagaagcttttggctgaggccttgaaccaagtcacccagagagcctcccggagatcagactcagcctcctcagagcctgttgggatatatcagggtttcgagaagaagaccggagttgctggggaggacatgcaaggctagccctgccctccacccacacctgcccgctccccacgataagcaccagtgggactgtggtgacttctgctgctggccccgcccctgcccccagagcgtccttggctgccgtctggccgggctctcatggtacttcctctgtgaactgtgtgtgaatctgcttttcctctgccttcggagggaaattgtaaatcctgtgtttcattacttgaatgtagttatctattgaaaatatatattatatacatagacatatatatatatataataggctgtatatattgctcagtagagaaaaaccatgggggactggtgatatgttgatctttttcaaaaaaatatatatatgaca

SEQ ID NO: 35452 - DNA, 879 bp, Homo sapiens
tgccgcggcgccggagcccgaggcggctgtagcccacatctcccgagcgacccccggcgcccgcccgccgcgcggaggcccgggccacacctcactggccgcttggcccatcccagtcagcgccgcgccgaaccccgtccgcgcgcgccggggagcggcgcccccgccgctgccgccgcgacccttggcgcctgcccctgcaacgggaggctggagtgcagtggcaagatctcggctcactgcaacctctacctcccgggttcaagtgattcttctgcctcagcctcccagccccactgcaggccccaccatggcgccgttcctgcgcatcgccttcaactcctatgagctgggctccctgcaggccgaggacgaggcgaaccagcccttctgtgccgtgaagatgaaggaggcgctcagcacagagcgtgggaaaacactggtgcagaagaagccgaccatgtatcctgagtggaagtcgacgttcgatgcccacatctatgaggggcgcgtcatccagattgctggccccgcccctgcccccagagcgtccttggctgccgtctggccgggctctcatggtacttcctctgtgaactgtgtgtgaatctgcttttcctctgccttcggagggaaattgtaaatcctgtgtttcattacttgaatgtagttatctattgaaaatatatattatatacatagacatatatatatatataataggctgtatatattgctcagtagagaaaaaccatgggggactggtgatatgttgatctttttcaaaaaaatatatatatgacaaaaaaaaaaaaggagcacaagctgtttgaaccaccaggtttatttgtgtgtctaaataaacaccaaatagtacca

SEQ ID NO: 35453 - DNA, 322 bp, Homo sapiens
cgactctagagtatcccaaatctctcagcgtgggaaaacactggtgcagaagaagccgaccatgtatcctgagtggaagtcgacgttcgatgcccacatctatgaggggcgcgtcatccagattgtgctaatgcgggcagcagaggagccagtgtctgaggtgaccgtgggtgtgtcggtgctggccgagcgctgcaagaagaacaatggcaaggctgagttctggctggacctgcagcctcaggccaaggtgttgatgtctgttcagtatttcctggaggacgtggatttgcaaacagtctatgcgcaaatggggtacgga

SEQ ID NO: 35454 - DNA, 2631 bp, Homo sapiens
tgccgcggcgccggagcccgaggcggctgtagcccacatctcccgagcgacccccggcgcccgcccgccgcgcggaggcccgggccacacctcactggccgcttggcccatcccagtcagcgccgcgccgaaccccgtccgcgcgcgccggggagcggcgcccccgccgctgccgccgcgacccttggcgcctgcccctgcaacgggagccccactgcaggccccaccatggcgccgttcctgcgcatcgccttcaactcctatgagctgggctccctgcaggccgaggacgaggcgaaccagcccttctgtgccgtgaagatgaaggaggcgctcagcacagagcgtgggaaaacactggtgcagaagaagccgaccatgtatcctgagtggaagtcgacgttcgatgcccacatctatgaggggcgcgtcatccagattgtgctaatgcgggcagcagaggagccagtgtctgaggtgaccgtgggtgtgtcggtgctggccgagcgctgcaagaagaacaatggcaaggctgagttctggctggacctgcagcctcaggccaaggtgttgatgtctgttcagtatttcctggaggacgtggattgcaaacagtctatgcgcagtgaggacgaggccaagttcccaacgatgaaccgccgcggagccatcaaacaggccaaaatccactacatcaagaaccatgagtttatcgccaccttctttgggcaacccaccttctgttctgtgtgcaaagactttgtctggggcctcaacaagcaaggctacaaatgcaggcaatgtaacgctgccatccacaagaaatgcatcgacaagatcatcggcagatgcactggcaccgcggccaacagccgggacactatattccagaaagaacgcttcaacatcgacatgccgcaccgcttcaaggttcacaactacatgagccccaccttctgtgaccactgcggcagcctgctctggggactggtgaagcagggattaaagtgtgaagactgcggcatgaatgtgcaccataaatgccgggagaaggtggccaacctctgcggcatcaaccagaagcttttggctgaggccttgaaccaagtcacccagagagcctcccggagatcagactcagcctcctcagagcctgttgggatatatcagggtttcgagaagaagaccggagttgctggggaggacatgcaagacaacagtgggacctacggcaagatctgggagggcagcagcaagtgcaacatcaacaacttcatcttccacaaggtcctgggcaaaggcagcttcgggaaggtgctgcttggagagctgaagggcagaggagagtactttgccatcaaggccctcaagaaggatgtggtcctgatcgacgacgacgtggagtgcaccatggttgagaagcgggtgctgacacttgccgcagagaatccctttctcacccacctcatctgcaccttccagaccaaggaccacctgttctttgtgatggagttcctcaacgggggggacctgatgtaccacatccaggacaaaggccgctttgaactctaccgtgccacgttttatgccgctgagataatgtgtggactgcagtttctacacagcaagggcatcatttacagggacctcaaactggacaatgtgctgttggaccgggatggccacatcaagattgccgactttgggatgtgcaaagagaacatattcggggagagccgggccagcaccttctgcggcacccctgactatatcgcccctgagatcctacagggcctgaagtacacattctctgtggactggtggtctttcggggtccttctgtacgagatgctcattggccagtcccccttccatggtgatgatgaggatgaactcttcgagtccatccgtgtggacacgccacattatccccgctggatcaccaaggagtccaaggacatcctggagaagctctttgaaagggaaccaaccaagaggctgggagtgacgggaaacatcaaaatccaccccttcttcaagaccataaactggactctgctggaaaagcggaggttggagccacccttcaggcccaaagtgaagtcacccagagactacagtaactttgaccaggagttcctgaacgagaaggcgcgcctctcctacagcgacaagaacctcatcgactccatggaccagtctgcattcgctggcttctcctttgtgaaccccaaattcgagcacctcctggaagattgaggttcctggacagatcaggctagccctgccctccacccacacctgcccgctccccacgataagcaccagtgggactgtggtgacttctgctgctggccccgcccctgcccccagagcgtccttggctgccgtctggccgggctctcatggtacttcctctgtgaactgtgtgtgaatctgcttttcctctgccttcggagggaaattgtaaatcctgtgtttcattacttgaatgtagttatctattgaaaatatatattatatacatagacatatatatatatataataggctgtatatattgctcagtagagaaaaaccatgggggactggtgatatgttgatctttttcaaaaaaatatatatatgaca

SEQ ID NO: 35455 - DNA, 2534 bp, Homo sapiens
tgccgcggcgccggagcccgaggcggctgtagcccacatctcccgagcgacccccggcgcccgcccgccgcgcggaggcccgggccacacctcactggccgcttggcccatcccagtcagcgccgcgccgaaccccgtccgcgcgcgccggggagcggcgcccccgccgctgccgccgcgacccttggcgcctgcccctgcaacgggagccccactgcaggccccaccatggcgccgttcctgcgcatcgccttcaactcctatgagctgggctccctgcaggccgaggacgaggcgaaccagcccttctgtgccgtgaagatgaaggaggcgctcagcacagagcgtgggaaaacactggtgcagaagaagccgaccatgtatcctgagtggaagtcgacgttcgatgcccacatctatgaggggcgcgtcatccagattgtgctaatgcgggcagcagaggagccagtgtctgaggtgaccgtgggtgtgtcggtgctggccgagcgctgcaagaagaacaatggcaaggctgagttctggctggacctgcagcctcaggccaaggtgttgatgtctgttcagtatttcctggaggacgtggattgcaaacagtctatgcgcagtgaggacgaggccaagttcccaacgatgaaccgccgcggagccatcaaacaggccaaaatccactacatcaagaaccatgagtttatcgccaccttctttgggcaacccaccttctgttctgtgtgcaaagactttgtctggggcctcaacaagcaaggctacaaatgcaggcaatgtaacgctgccatccacaagaaatgcatcgacaagatcatcggcagatgcactggcaccgcggccaacagccgggacactatattccagaaagaacgcttcaacatcgacatgccgcaccgcttcaaggttcacaactacatgagccccaccttctgtgaccactgcggcagcctgctctggggactggtgaagcagggattaaagtgtgaagactgcggcatgaatgtgcaccataaatgccgggagaaggtggccaacctctgcggcatcaaccagaagcttttggctgaggccttgaaccaagtcacccagagagcctcccggagatcagactcagcctcctcagagcctgttgggatatatcagggtttcgagaagaagaccggagttgctggggaggacatgcaagacaacagtgggacctacggcaagatctgggagggcagcagcaagtgcaacatcaacaacttcatcttccacaaggtcctgggcaaaggcagcttcgggaaggtgctgcttggagagctgaagggcagaggagagtactttgccatcaaggccctcaagaaggatgtggtcctgatcgacgacgacgtggagtgcaccatggttgagaagcgggtgctgacacttgccgcagagaatccctttctcacccacctcatctgcaccttccagaccaaggaccacctgttctttgtgatggagttcctcaacgggggggacctgatgtaccacatccaggacaaaggccgctttgaactctaccgtgccacgttttatgccgctgagataatgtgtggactgcagtttctacacagcaagggcatcatttacagggacctcaaactggacaatgtgctgttggaccgggatggccacatcaagattgccgactttgggatgtgcaaagagaacatattcggggagagccgggccagcaccttctgcggcacccctgactatatcgcccctgagatcctacagggcctgaagtacacattctctgtggactggtggtctttcggggtccttctgtacgagatgctcattggccagtcccccttccatggtgatgatgaggatgaactcttcgagtccatccgtgtggacacgccacattatccccgctggatcaccaaggagtccaaggacatcctggagaagctctttgaaagggaaccaaccaagaggctgggagtgacgggaaacatcaaaatccaccccttcttcaagaccataaactggactctgctggaaaagcggaggttggagccacccttcaggcccaaagtgaagtcacccagagactacagtaactttgaccaggagttcctgaacgagaaggcgcgcctctcctacagcgacaagaacctcatcgactccatggaccagtctgcattcgctggcttctcctttgtgaaccccaaattcgagcacctcctggaagattgaggttcctggacagatcaggctagccctgccctccacccacacctgcccgctccccacgataagcaccagtgggactgtggtgacttctgctgctggccccgcccctgcccccagagcgtccttggctgccgtctggccgggctctcatggtacttcctctgtgaactgtgtgtgaatctgcttttcctctgccttcggagggaaattgtaaatcctgtgtttcattacttgaatgtagttatctattgaaaatatatattatatacatagacata

SEQ ID NO: 35456 - DNA, 2743 bp, Homo sapiens
tgccgcggcgccggagcccgaggcggctgtagcccacatctcccgagcgacccccggcgcccgcccgccgcgcggaggcccgggccacacctcactggccgcttggcccatcccagtcagcgccgcgccgaaccccgtccgcgcgcgccggggagcggcgcccccgccgctgccgccgcgacccttggcgcctgcccctgcaacgggaggtctgcagggaactggccaggcaagggggcaggcccgtttctcctggtggttggtgcgttgtagcagcagcgggagccaggactaaggacaagcaggagctgggagccccagccccactgcaggccccaccatggcgccgttcctgcgcatcgccttcaactcctatgagctgggctccctgcaggccgaggacgaggcgaaccagcccttctgtgccgtgaagatgaaggaggcgctcagcacagagcgtgggaaaacactggtgcagaagaagccgaccatgtatcctgagtggaagtcgacgttcgatgcccacatctatgaggggcgcgtcatccagattgtgctaatgcgggcagcagaggagccagtgtctgaggtgaccgtgggtgtgtcggtgctggccgagcgctgcaagaagaacaatggcaaggctgagttctggctggacctgcagcctcaggccaaggtgttgatgtctgttcagtatttcctggaggacgtggattgcaaacagtctatgcgcagtgaggacgaggccaagttcccaacgatgaaccgccgcggagccatcaaacaggccaaaatccactacatcaagaaccatgagtttatcgccaccttctttgggcaacccaccttctgttctgtgtgcaaagactttgtctggggcctcaacaagcaaggctacaaatgcaggcaatgtaacgctgccatccacaagaaatgcatcgacaagatcatcggcagatgcactggcaccgcggccaacagccgggacactatattccagaaagaacgcttcaacatcgacatgccgcaccgcttcaaggttcacaactacatgagccccaccttctgtgaccactgcggcagcctgctctggggactggtgaagcagggattaaagtgtgaagactgcggcatgaatgtgcaccataaatgccgggagaaggtggccaacctctgcggcatcaaccagaagcttttggctgaggccttgaaccaagtcacccagagagcctcccggagatcagactcagcctcctcagagcctgttgggatatatcagggtttcgagaagaagaccggagttgctggggaggacatgcaagacaacagtgggacctacggcaagatctgggagggcagcagcaagtgcaacatcaacaacttcatcttccacaaggtcctgggcaaaggcagcttcgggaaggtgctgcttggagagctgaagggcagaggagagtactttgccatcaaggccctcaagaaggatgtggtcctgatcgacgacgacgtggagtgcaccatggttgagaagcgggtgctgacacttgccgcagagaatccctttctcacccacctcatctgcaccttccagaccaaggaccacctgttctttgtgatggagttcctcaacgggggggacctgatgtaccacatccaggacaaaggccgctttgaactctaccgtgccacgttttatgccgctgagataatgtgtggactgcagtttctacacagcaagggcatcatttacagggacctcaaactggacaatgtgctgttggaccgggatggccacatcaagattgccgactttgggatgtgcaaagagaacatattcggggagagccgggccagcaccttctgcggcacccctgactatatcgcccctgagatcctacagggcctgaagtacacattctctgtggactggtggtctttcggggtccttctgtacgagatgctcattggccagtcccccttccatggtgatgatgaggatgaactcttcgagtccatccgtgtggacacgccacattatccccgctggatcaccaaggagtccaaggacatcctggagaagctctttgaaagggaaccaaccaagaggctgggagtgacgggaaacatcaaaatccaccccttcttcaagaccataaactggactctgctggaaaagcggaggttggagccacccttcaggcccaaagtgaagtcacccagagactacagtaactttgaccaggagttcctgaacgagaaggcgcgcctctcctacagcgacaagaacctcatcgactccatggaccagtctgcattcgctggcttctcctttgtgaaccccaaattcgagcacctcctggaagattgaggttcctggacagatcaggctagccctgccctccacccacacctgcccgctccccacgataagcaccagtgggactgtggtgacttctgctgctggccccgcccctgcccccagagcgtccttggctgccgtctggccgggctctcatggtacttcctctgtgaactgtgtgtgaatctgcttttcctctgccttcggagggaaattgtaaatcctgtgtttcattacttgaatgtagttatctattgaaaatatatattatatacatagacatatatatatatataataggctgtatatattgctcagtagagaaaaaccatgggggactggtgatatgttgatctttttcaaaaaaatatatatatgaca

SEQ ID NO: 35457 - DNA, 2341 bp, Homo sapiens
agagctcgccacctgtttttggattctgaagatgcaggacgcgctcagtacagagcgtgggaaaacactggtgcagaagaagccgaccatgtatcctgagtggaagtcgacgttcgatgcccacatctatgaggggcgcgtcatccagattgtgctaatgcgggcagcagaggagccagtgtctgaggtgaccgtgggtgtgtcggtgctggccgagcgctgcaagaagaacaatggcaaggctgagttctggctggacctgcagcctcaggccaaggtgttgatgtctgttcagtatttcctggaggacgtggattgcaaacagtctatgcgcagtgaggacgaggccaagttcccaacgatgaaccgccgcggagccatcaaacaggccaaaatccactacatcaagaaccatgagtttatcgccaccttctttgggcaacccaccttctgttctgtgtgcaaagactttgtctggggcctcaacaagcaaggctacaaatgcaggcaatgtaacgctgccatccacaagaaatgcatcgacaagatcatcggcagatgcactggcaccgcggccaacagccgggacactatattccagaaagaacgcttcaacatcgacatgccgcaccgcttcaaggttcacaactacatgagccccaccttctgtgaccactgcggcagcctgctctggggactggtgaagcagggattaaagtgtgaagactgcggcatgaatgtgcaccataaatgccgggagaaggtggccaacctctgcggcatcaaccagaagcttttggctgaggccttgaaccaagtcacccagagagcctcccggagatcagactcagcctcctcagagcctgttgggatatatcagggtttcgagaagaagaccggagttgctggggaggacatgcaagacaacagtgggacctacggcaagatctgggagggcagcagcaagtgcaacatcaacaacttcatcttccacaaggtcctgggcaaaggcagcttcgggaaggtgctgcttggagagctgaagggcagaggagagtactttgccatcaaggccctcaagaaggatgtggtcctgatcgacgacgacgtggagtgcaccatggttgagaagcgggtgctgacacttgccgcagagaatccctttctcacccacctcatctgcaccttccagaccaaggaccacctgttctttgtgatggagttcctcaacgggggggacctgatgtaccacatccaggacaaaggccgctttgaactctaccgtgccacgttttatgccgctgagataatgtgtggactgcagtttctacacagcaagggcatcatttacagggacctcaaactggacaatgtgctgttggaccgggatggccacatcaagattgccgactttgggatgtgcaaagagaacatattcggggagagccgggccagcaccttctgcggcacccctgactatatcgcccctgagatcctacagggcctgaagtacacattctctgtggactggtggtctttcggggtccttctgtacgagatgctcattggccagtcccccttccatggtgatgatgaggatgaactcttcgagtccatccgtgtggacacgccacattatccccgctggatcaccaaggagtccaaggacatcctggagaagctctttgaaagggaaccaaccaagaggctgggagtgacgggaaacatcaaaatccaccccttcttcaagaccataaactggactctgctggaaaagcggaggttggagccacccttcaggcccaaagtgaagtcacccagagactacagtaactttgaccaggagttcctgaacgagaaggcgcgcctctcctacagcgacaagaacctcatcgactccatggaccagtctgcattcgctggcttctcctttgtgaaccccaaattcgagcacctcctggaagattgaggttcctggacagatcaggctagccctgccctccacccacacctgcccgctccccacgataagcaccagtgggactgtggtgacttctgctgctggccccgcccctgcccccagagcgtccttggctgccgtctggccgggctctcatggtacttcctctgtgaactgtgtgtgaatctgcttttcctctgccttcggagggaaattgtaaatcctgtgtttcattacttgaatgtagttatctattgaaaatatatattatatacatagacatatatatatatataataggctgtatatattgctcagtagagaaaaaccatgggggactggtgatatgttgatctttttcaaaaaaatatatatatgaca

SEQ ID NO: 35458 - DNA, 1401 bp, Homo sapiens
aaggctagtgcgaggctggtgtgtgaatcggccgaggaacacttcatcttccacaaggtcctgggcaaaggcagcttcgggaaggtgctgcttggagagctgaagggcagaggagagtactttgccatcaaggccctcaagaaggatgtggtcctgatcgacgacgacgtggagtgcaccatggttgagaagcgggtgctgacacttgccgcagagaatccctttctcacccacctcatctgcaccttccagaccaaggaccacctgttctttgtgatggagttcctcaacgggggggacctgatgtaccacatccaggacaaaggccgctttgaactctaccgtgccacgttttatgccgctgagataatgtgtggactgcagtttctacacagcaagggcatcatttacagggacctcaaactggacaatgtgctgttggaccgggatggccacatcaagattgccgactttgggatgtgcaaagagaacatattcggggagagccgggccagcaccttctgcggcacccctgactatatcgcccctgagatcctacagggcctgaagtacacattctctgtggactggtggtctttcggggtccttctgtacgagatgctcattggccagtcccccttccatggtgatgatgaggatgaactcttcgagtccatccgtgtggacacgccacattatccccgctggatcaccaaggagtccaaggacatcctggagaagctctttgaaagggaaccaaccaagaggctgggagtgacgggaaacatcaaaatccaccccttcttcaagaccataaactggactctgctggaaaagcggaggttggagccacccttcaggcccaaagtgaagtcacccagagactacagtaactttgaccaggagttcctgaacgagaaggcgcgcctctcctacagcgacaagaacctcatcgactccatggaccagtctgcattcgctggcttctcctttgtgaaccccaaattcgagcacctcctggaagattgaggttcctggacagatcaggctagccctgccctccacccacacctgcccgctccccacgataagcaccagtgggactgtggtgacttctgctgctggccccgcccctgcccccagagcgtccttggctgccgtctggccgggctctcatggtacttcctctgtgaactgtgtgtgaatctgcttttcctctgccttcggagggaaattgtaaatcctgtgtttcattacttgaatgtagttatctattgaaaatatatattatatacatagacatatatatatatataataggctgtatatattgctcagtagagaaaaaccatgggggactggtgatatgttgatctttttcaaaaaaatatatatatgaca

SEQ ID NO: 35459 - DNA, 1305 bp, Homo sapiens
tcatcttcacagtcggtgatgaagggcagaggaactacagctcagaaggatgtggtcctgatcgacgacgacgtggagtgcaccatggttgagaagcgggtgctgacacttgccgcagagaatccctttctcacccacctcatctgcaccttccagaccaaggaccacctgttctttgtgatggagttcctcaacgggggggacctgatgtaccacatccaggacaaaggccgctttgaactctaccgtgccacgttttatgccgctgagataatgtgtggactgcagtttctacacagcaagggcatcatttacagggacctcaaactggacaatgtgctgttggaccgggatggccacatcaagattgccgactttgggatgtgcaaagagaacatattcggggagagccgggccagcaccttctgcggcacccctgactatatcgcccctgagatcctacagggcctgaagtacacattctctgtggactggtggtctttcggggtccttctgtacgagatgctcattggccagtcccccttccatggtgatgatgaggatgaactcttcgagtccatccgtgtggacacgccacattatccccgctggatcaccaaggagtccaaggacatcctggagaagctctttgaaagggaaccaaccaagaggctgggagtgacgggaaacatcaaaatccaccccttcttcaagaccataaactggactctgctggaaaagcggaggttggagccacccttcaggcccaaagtgaagtcacccagagactacagtaactttgaccaggagttcctgaacgagaaggcgcgcctctcctacagcgacaagaacctcatcgactccatggaccagtctgcattcgctggcttctcctttgtgaaccccaaattcgagcacctcctggaagattgaggttcctggacagatcaggctagccctgccctccacccacacctgcccgctccccacgataagcaccagtgggactgtggtgacttctgctgctggccccgcccctgcccccagagcgtccttggctgccgtctggccgggctctcatggtacttcctctgtgaactgtgtgtgaatctgcttttcctctgccttcggagggaaattgtaaatcctgtgtttcattacttgaatgtagttatctattgaaaatatatattatatacatagacatatatatatatataataggctgtatatattgctcagtagagaaaaaccatgggggactggtgatatgttgatctttttcaaaaaaatatatatatgaca

SEQ ID NO: 35460 - DNA, 1886 bp, Homo sapiens
tgccgcggcgccggagcccgaggcggctgtagcccacatctcccgagcgacccccggcgcccgcccgccgcgcggaggcccgggccacacctcactggccgcttggcccatcccagtcagcgccgcgccgaaccccgtccgcgcgcgccggggagcggcgcccccgccgctgccgccgcgacccttggcgcctgcccctgcaacgggagccccactgcaggccccaccatggcgccgttcctgcgcatcgccttcaactcctatgagctgggctccctgcaggccgaggacgaggcgaaccagcccttctgtgccgtgaagatgaaggaggcgctcagcacagagcgtgggaaaacactggtgcagaagaagccgaccatgtatcctgagtggaagtcgacgttcgatgcccacatctatgaggggcgcgtcatccagattgtgctaatgcgggcagcagaggagccagtgtctgaggtgaccgtgggtgtgtcggtgctggccgagcgctgcaagaagaacaatggcaaggctgagttctggctggacctgcagcctcaggccaaggtgttgatgtctgttcagtatttcctggaggacgtggattgcaaacagtctatgcgcagtgaggacgaggccaagttcccaacgatgaaccgccgcggagccatcaaacaggccaaaatccactacatcaagaaccatgagtttatcgccaccttctttgggcaacccaccttctgttctgtgtgcaaagactttgtctggggcctcaacaagcaaggctacaaatgcaggcaatgtaacgctgccatccacaagaaatgcatcgacaagatcatcggcagatgcactggcaccgcggccaacagccgggacactatattccagaaagaacgcttcaacatcgacatgccgcaccgcttcaaggttcacaactacatgagccccaccttctgtgaccactgcggcagcctgctctggggactggtgaagcagggattaaagtgtgaagactgcggcatgaatgtgcaccataaatgccgggagaaggtggccaacctctgcggcatcaaccagaagcttttggctgaggccttgaaccaagtcacccagagagcctcccggagatcagactcagcctcctcagagcctgttgggatatatcagggtttcgagaagaagaccggagttgctggggaggacatgcaagacaacagtgggacctacggcaagatctgggagggcagcagcaagtgcaacatcaacaaatcaaaatccaccccttcttcaagaccataaactggactctgctggaaaagcggaggttggagccacccttcaggcccaaagtgaagtcacccagagactacagtaactttgaccaggagttcctgaacgagaaggcgcgcctctcctacagcgacaagaacctcatcgactccatggaccagtctgcattcgctggcttctcctttgtgaaccccaaattcgagcacctcctggaagattgaggttcctggacagatcaggctagccctgccctccacccacacctgcccgctccccacgataagcaccagtgggactgtggtgacttctgctgctggccccgcccctgcccccagagcgtccttggctgccgtctggccgggctctcatggtacttcctctgtgaactgtgtgtgaatctgcttttcctctgccttcggagggaaattgtaaatcctgtgtttcattacttgaatgtagttatctattgaaaatatatattatatacatagacatatatatatatataataggctgtatatattgctcagtagagaaaaaccatgggggactggtgatatgttgatctttttcaaaaaaatatatatatgaca

SEQ ID NO: 35461 - DNA, 1791 bp, Homo sapiens
tgccgcggcgccggagcccgaggcggctgtagcccacatctcccgagcgacccccggcgcccgcccgccgcgcggaggcccgggccacacctcactggccgcttggcccatcccagtcagcgccgcgccgaaccccgtccgcgcgcgccggggagcggcgcccccgccgctgccgccgcgacccttggcgcctgcccctgcaacgggagccccactgcaggccccaccatggcgccgttcctgcgcatcgccttcaactcctatgagctgggctccctgcaggccgaggacgaggcgaaccagcccttctgtgccgtgaagatgaaggaggcgctcagcacagagcgtgggaaaacactggtgcagaagaagccgaccatgtatcctgagtggaagtcgacgttcgatgcccacatctatgaggggcgcgtcatccagattgtgctaatgcgggcagcagaggagccagtgtctgaggtgaccgtgggtgtgtcggtgctggccgagcgctgcaagaagaacaatggcaaggctgagttctggctggacctgcagcctcaggccaaggtgttgatgtctgttcagtatttcctggaggacgtggattgcaaacagtctatgcgcagtgaggacgaggccaagttcccaacgatgaaccgccgcggagccatcaaacaggccaaaatccactacatcaagaaccatgagtttatcgccaccttctttgggcaacccaccttctgttctgtgtgcaaagactttgtctggggcctcaacaagcaaggctacaaatgcaggcaatgtaacgctgccatccacaagaaatgcatcgacaagatcatcggcagatgcactggcaccgcggccaacagccgggacactatattccagaaagaacgcttcaacatcgacatgccgcaccgcttcaaggttcacaactacatgagccccaccttctgtgaccactgcggcagcctgctctggggactggtgaagcagggattaaagtgtgaagactgcggcatgaatgtgcaccataaatgccgggagaaggtggccaacctctgcggcatcaaccagaagcttttggctgaggccttgaaccaagtcacccagagagcctcccggagatcagactcagcctcctcagagcctgttgggatatatcagggtttcgagaagaagaccggagttgctggggaggacatgcaagacaacagtgggacctacggcaagatctgggagggcagcagcaagtgcaacatcaacaacttcatcttccacaaggtcctgggcaaaggcagcttcgggaaggtgctgcttggagagctgaagggcagaggagagtactttgccatcaaggccctcaagaaggatgtggtcctgatcgacgacgacgtggagtgcaccatggttgagaagcgggtgctgacacttgccgcagagaatccctttctcacccacctcatctgcaccttccagaccaaggaccacctgttctttgtgatggagttcctcaacgggggggacctgatgtaccacatccaggacaaaggccgctttgaactctaccgtgccacgttttatgccgctgagataatgtgtggactgcagtttctacacagcaagggcatcatttacagggacctcaaactggacaatgtgctgttggaccgggatggccacatcaagattgccgactttgggatgtgcaaagagaacatattcggggagagccgggccagcaccttctgcggcactgtttggactctgggcactgtttggactctg

SEQ ID NO: 35462 - DNA, 1565 bp, Homo sapiens
tgccgcggcgccggagcccgaggcggctgtagcccacatctcccgagcgacccccggcgcccgcccgccgcgcggaggcccgggccacacctcactggccgcttggcccatcccagtcagcgccgcgccgaaccccgtccgcgcgcgccggggagcggcgcccccgccgctgccgccgcgacccttggcgcctgcccctgcaacgggagccccactgcaggccccaccatggcgccgttcctgcgcatcgccttcaactcctatgagctgggctccctgcaggccgaggacgaggcgaaccagcccttctgtgccgtgaagatgaaggaggcgctcagcacagagcgtgggaaaacactggtgcagaagaagccgaccatgtatcctgagtggaagtcgacgttcgatgcccacatctatgaggggcgcgtcatccagattgtgctaatgcgggcagcagaggagccagtgtctgaggtgaccgtgggtgtgtcggtgctggccgagcgctgcaagaagaacaatggcaaggctgagttctggctggacctgcagcctcaggccaaggtgttgatgtctgttcagtatttcctggaggacgtggattgcaaacagtctatgcgcagtgaggacgaggccaagttcccaacgatgaaccgccgcggagccatcaaacaggccaaaatccactacatcaagaaccatgagtttatcgccaccttctttgggcaacccaccttctgttctgtgtgcaaagactttgtctggggcctcaacaagcaaggctacaaatgcaggcaatgtaacgctgccatccacaagaaatgcatcgacaagatcatcggcagatgcactggcaccgcggccaacagccgggacactatattccagaaagaacgcttcaacatcgacatgccgcaccgcttcaaggttcacaactacatgagccccaccttctgtgaccactgcggcagcctgctctggggactggtgaagcagggattaaagtgtgaagactgcggcatgaatgtgcaccataaatgccgggagaaggtggccaacctctgcggcatcaaccagaagcttttggctgaggccttgaaccaagtcacccagagagcctcccggagatcagactcagcctcctcagagcctgttgggatatatcagggtttcgagaagaagaccggagttgctggggaggacatgcaagacaacagtgggacctacggcaagatctgggagggcagcagcaagtgcaacatcaacaacttcatcttccacaaggtcctgggcaaaggcagcttcgggaaggtgctgcttggagagctgaagggcagaggagagtactgtgatgaaggacgtgggagctgcccatttggagggaactgtttttacaagcatgcgtaccctgatgccgtagagaggagccacagagacagaaagtgggaacatcaagcagataccgggcccaacgaaggataccacttctgggaactcattgaggaaagagagaacagcaacccctttgacatacgatgatagaagatggttgtcacctgtga

SEQ ID NO: 35463 - DNA, 1327 bp, Homo sapiens
tgccgcggcgccggagcccgaggcggctgtagcccacatctcccgagcgacccccggcgcccgcccgccgcgcggaggcccgggccacacctcactggccgcttggcccatcccagtcagcgccgcgccgaaccccgtccgcgcgcgccggggagcggcgcccccgccgctgccgccgcgacccttggcgcctgcccctgcaacgggaggtctgcagggaactggccaggcaagggggcaggcccgtttctcctggtggttggtgcgttgtagcagcagcgggagccaggactaaggacaagcaggagctgggagccccagccccactgcaggccccaccatggcgccgttcctgcgcatcgccttcaactcctatgagctgggctccctgcaggccgaggacgaggcgaaccagcccttctgtgccgtgaagatgaaggaggcgctcagcacagagcgtgggaaaacactggtgcagaagaagccgaccatgtatcctgagtggaagtcgacgttcgatgcccacatctatgaggggcgcgtcatccagattgtgctaatgcgggcagcagaggagccagtgtctgaggtgaccgtgggtgtgtcggtgctggccgagcgctgcaagaagaacaatggcaaggctgagttctggctggacctgcagcctcaggccaaggtgttgatgtctgttcagtatttcctggaggacgtggattgcaaacagtctatgcgcagtgaggacgaggccaagttcccaacgatgaaccgccgcggagccatcaaacaggccaaaatccactacatcaagaaccatgagtttatcgccaccttctttgggcaacccaccttctgttctgtgtgcaaagactttgtctggggcctcaacaagcaaggctacaaatgcaggcaatgtaacgctgccatccacaagaaatgcatcgacaagatcatcggcagatgcactggcaccgcggccaacagccgggacactatactgcccgctccccacgataagcaccagtgggactgtggtgacttctgctgctggccccgcccctgcccccagagcgtccttggctgccgtctggccgggctctcatggtacttcctctgtgaactgtgtgtgaatctgcttttcctctgccttcggagggaaattgtaaatcctgtgtttcattacttgaatgtagttatctattgaaaatatatattatatacatagacatatatatatatataataggctgtatatattgctcagtagagaaaaaccatgggggactggtgatatgttgatctttttcaaaaaaatatatatatgaca

SEQ ID NO: 35464 - DNA, 311 bp, Homo sapiens
tatccttacagtatcgagtagtaacattgttttatgaagttacttagatcagctccttttgttttcctctctgaggttatatcagacgtttgtaatgcagttagatttcatttgttacagtctgtagtctatcctgggttcccagatattctggttattttaaaaaatttgcatacagtggccagctgcagtggttcacacctctaatccaagcactttgggatgccaaggagggaagattgcttgagcctagaagtttgagatcagcttgggtaacatggtgagagcccatctctacaaaaaaaaaaaaa

SEQ ID NO: 35465 - DNA, 466 bp, Homo sapiens
accccacctgccagagaatgaagccagcccggaagacagaggaactgggtgaaaaggacaaagattccagacagcctgtgtgagccctaaaaccagctatgtctcaaggcagtctatacccgcccttgttttctaggttatataagccaattcattttcttttcttgctgggcctgatggctcacacctgtaatcccagcaatttgagaggccgaggcaggcagatcacttgaggtgaggcattcgagaccagcctggccaacatggtgaaaccctgtctctactaaaaatacaaaaattagctgatggcgcgcctgttatcccagctactcaggaggctgaggcaggagaatctgagaggcagaggttgcagtgatttgagcccgggaggcagacattgcagtgagctgtgattgtgccactgcactacagcctgggcaatagagtgagactctgtctcaaaaaa

SEQ ID NO: 35466 - DNA, 145 bp, Homo sapiens
cagcgagactccatctcaaaaaaaaaaagaaagaaagtccagctaagtgtcacaaacaagaggagtctaaggagaaagaagacatcactactaaatgttctgtggtatcttggatgggatcctaggttagaaaaggacattaggt

SEQ ID NO: 35467 - DNA, 561 bp, Homo sapiens
agatcagtggctctcaaagtgtggtcccttgagcccaggagtttgagaccagcctgggcaacacagccaaagagtggttcctggaccagcatcaccaacaatatctgggagcttgctagaagtcccaattcttggatcccactcatgaccttctgagtcaataactctgggggtggagcccagcaacctgtgttattaataagtccttaaggtgactcagaggcacattaaagtttaagaaccactatctaggccattgcaacaattctctaactggtctcctgactttattcatatctcttctgatcaatttccaacttccacaagagtgactggaccatgttacctccctactgaaaactttcctagggctccccatgacccatcttcgggggaaaaaaagtttaaacattctaatgagcattccagactctgcagttgtgactaacttacttttcctctttcaggaactgcttcacaagattaaaggagaaacagaaaatgtatctagcgctgtgcttggggcatggcaggaactcaatgaatgcttattaaatactg

SEQ ID NO: 35468 - DNA, 841 bp, Homo sapiens
gggccctgcgagctccaggtgcctctgccccgcggcgctggcgaagtcgaagcccgagaacgcccaccgcagcgatgcgaaggccgcttctggggtggggctgaggctgcagctgcctccctttcgcaccaaggaccccaaccttcagcgacgcagccgccgctcccgcccaggctgggaggcactgtagggatccgacgcttcaggtggccaaagagcgactttctctgattccagggccctggcggggcaggctccagtaccgcactcggcggaggccgaaggtctgtggggcaggacaggagttcctcgtgccgtcggaagggccgaggacgaaggagggcgctaattcactccccactgggctggcggcaacgccgaatcccgcagtgaccgcggagggccaaggtgcaggctgccccatggatgccacacgtggcagcggggagaaaagaagtgattcggtccctgccgagggttgctgccacccacgcactgctggcggactcagtgccaggcagccttgatggccaggcaacgtctaacccaggaggtgggacacatcctcggagtcaccagtgagatgtggcgagctgggagaaaagtcggcttcctgcatttgtcaccttctgcctccagccatggtagtaaaccaccgcggccagtcccgacccatcccggatccctcgggtctcacctgcaggtcctccagaccgggggccgccgccagccccggaaggccgagaggaactgcttcacaagattaaaggagaaacagaaaatgtatctagcgctgtgcttggggcatggcaggaactcaatgaatgcttattaaatactg

SEQ ID NO: 35469 - DNA, 1090 bp, Homo sapiens
ataataataatgataattaaaaataaacactgaggcatattagtagtagtagtatttactgtaaatattttggaaagaaagacttgcagaaaaatataacacccatacacatactacccaacttaataaataaaaactttacagatactgttgaagttcttttctacttttctttttttcaattttttatttttatttttttttagtggagatgaggtctcactgtgttgcccaggctggttttgaactcctgtcctcaagtgatccttctgcctcagcctccttcttttttattgagctataacttacttctttaagtgtaaggcattataaattgttttgggtacactcatgaaaccactactcatattaggatgtggacctgtccaaatcttcagggagtcctccctccccaggccaggcaatttctccagcaccaaggtaaccactgttttgttctctattgctatggattggttttgcttatttgtaaatttatttgtagacttggtccctatcactacgaattggttttgcttatttgtaaacttcatataattagaaatcatgaggcattttcataagtgtgttttcaacttctataaagagaaacacaatgtaccttcttttttgtgtcctaaaccttctttttctcagtccccttccctgtacatgcacttttcaaagtgattagaggtacagagaactcttcctctaatctaataaacaaaatgatacaaactcaataataggtggaaatgcccctcaggttcaatgctagagagaaactgcagggaatggtggggactatggcaaactatggaaaacacagttgttgtttttctgcttccaaagggggacagcattagccaagtgcagcaatgtggaaatgtgggcctcctgtggccaaatttttcattttttcttgggtacaagaaatctggagttcttaaaatttgaaatctctttctttttttaaaaagtttggcaactaattttgactttttttaaacacttgtatgccaaacaaaacatttctgtggtttgtgtagcctagaagctgttggcttgcaacctttggatgagatag

SEQ ID NO: 35470 - DNA, 360 bp, Homo sapiens
ttcatttgtctgaatcatcactattatcttttttatattcctttaccgttctccataatgcttttccaagaaactggtttattccacaattttattgcagaggcagctgcaggatatcataatcttatctttatacgaaggaagaattgcctaatccctcaagtaaactaaaaatgttttatacagtcatttctcattcatccaatgttccaggcagtcccagtccaagactgccccttcacacacacaacaactcttcacaagacttcactgtccttcagactctcctgcagcacagacattcgaggttgctgagtcgacattgcagttatttcactcttgattttgctgctcaatttt

SEQ ID NO: 35471 - DNA, 1701 bp, Homo sapiens
  misc_feature (540)..(540): n is a, c, g, or t
cttctgaacactatcactttacaggttaggatgctgacatgtaaattctgggggtatgcaaacattcagtccactgcactatgtttgtttgttttatgtatattttaaccctgaggtaactatgcctaccatgatgtattatattcagactgtagggttgaattattctcacttttttcatatgaattttcccttgaaggcaattcctttaaatatagtacaattttaatactaatttgtcaccttactataatgaattagcatttgctgtcttttcttataggaaatgataaggcattaaaagagtacccagagtctatgcagaggggtgttacataacattttgtctttcgacggatgttcaggtgacctaagaatgtaatttaagagtcatggtagtgggaactaatacttctggcacttaatttgtgccagatgttttcaaagcactttacatatattgacaaatttattattcaagtgaaaatgttatgagtgaggtcctcttattagtgacatcaaagatcttgtaactgattntatgtcaatctttacactgggtttacaaaactcagagagaaatggtgatcctcagctaaacagtgtagcaagatattgtactttatgtcatattattaaaccattatttatgtacaataaagtccatgcattaaagttcaatgatttttgataagtgtatatagtctcatatttctataagtgtatagaaagaactaccacaatctagttatgaaatattttcatcccccgtagagttctttcttgcctttctatagtcaatccccctcctccacttccagtccagtccttggaaaccactgatttcatttttatcactgatttgccttttcaacaaagtagtacaaatggaatcatacaagttatagttttttcatgtctggctacttttacttaacatagtgttttgtaattcatccgtgttggtagatacatcaagtttgtctctttttatttgtgactagaatcttgtatggaatctagcttaatttgataattaaattatttcaggcttcatctcctccacccttccccatggcttctttactgctttatttatttttttatcttatttggtaccatatctatctttgcaaataaccttgaattatttttggtgcaggtaagaaatagatggttggatgacagagggataaattataccttatactaaagttgacctgggatcacaggcgtgagccacggcgtctggcctatttcccttttaagtaaatatctgggtaggtggtctgagaatagtctgatgtgaaagaccttggctcccagaaactggtacatgatatttctcacatctcattggccagaaaacagtcacatggacaggtaacagcaaacaggctaggaaatgcaatcttgattatgaaaggccatttaaccatctaaaattggggtctctaacaaaacagaagagggcaaaggattttgagaaaaactaactgcagtctctaaatatgtaggctcaatcattaccttccttttccaaatgaggaaagtgagacatagagatgttaaggctcatgcctggcattgtacaatattcccttccgtttttattcatcctgttacaaatgcttgttgaaaggtcaagaccagcctggccaacatagtgaaaccctgtctctactaaaaatacaaaaaaaa

SEQ ID NO: 35472 - DNA, 430 bp, Homo sapiens
aaacgtgtaatttatcctgaaagatttaatagctataaacatgtacaactgcagtttaaaaaattatgggtaacttgaagtgtatgacaatgttacccttaaaaccaatataaaaatgcagcaaaacatgtatgtatgtaggtgcccacaaaatgtgaatggtacagaaatggagtccagtgcagggagaaggtttagccctgcactcttagatttgcaagcatctgtcattgttttgagtcttctccatatcattgtttccttctcctttggtatttctctaccaaagttgttattaggaagcatatctggccaggcgcagtgcctcgtgcctgtaatcctagcactttgggaggctgaggagggaggattgcttgagaccaagagttcaaggccaatcaagccaacatagtgagacccgtctctttta

SEQ ID NO: 35473 - DNA, 400 bp, Homo sapiens
tgatggaaaagcgtggaatttagaagcattgctcgctccttcagtttctaacaatctggttcccactgctccccgctgcagacagcccatagctggttgcatcttgtcagaggcaaacacccggagatggagatgtgtgtctcagtcctaagcccaagtctccagagaagagcatctggagggccctccagggtccatcccaacccaaatcttctgtagtcaagaacaaggagccagtggtgcagacacagatgcagttccatcgcttgggccccaccaaggagagaagaagttctcagagactagagtggaggatggagacaggctgggcccacacccccatgccccacaggtacctactacgactccccagaaataaacatttccccagtcctgaaac

SEQ ID NO: 35474 - DNA, 395 bp, Homo sapiens
agtgcttagaaaattaaattaactcatttaattttactaaaaacctgtgagataagggactattgttatgcccatttttcagatgaggaaagtgggacagagtttactgagtggtagagatgagatttgaacccaggcaagcaggctctaggtctggactcttggtcactctgctctgtccccacactaagccaggtatctgggcttgtgtacatagtcaggtaagtggaaatcacaggaattgctagaggactccagtagagggatgattttcatgaatgttctttcatctcaagaaagcaaaggctgctttttgggtgcaaaggagtttggctagaaggaagatctggagatagagcaaaaaaaaagaaagaaagaaagaaagaaaaatacac

SEQ ID NO: 35475 - DNA, 889 bp, Homo sapiens
tggggagaagaacagagagaaagcaaaccaatagtggttcttaatataatttcaggaataaatttgttcagtaaccacttttctccttcccctcatcttttggctctcaggcccaagaagccatacaggaataatcaaaatgatcaactctttccaacaggactcaacttaccaactgatttcaagaaaagtccttctaaacttcctgtctctctccctttccccaaacatacacacattcccaaactctggtcaattttcagtatttatggtggtggagccccagctcatgcccccatcaaaagtaaaggaggatatcaatttagtgtcatagtatgatgtatatggggttttttgggatggggggatggtcaggtgcttcctccagcttttgaggagacagctgactctgacaaaggagccctcccagtgggccacatttcagggaacaactgcgtctctgcactcattgcctttaaattccagacaattgctattcaagttctaaagatgacaaagactttatatagtccatttctttcaagctgctcatgagtggtgggtggtaagctaggcacactaatgcaatcaaccacaaagtgaaccgtgatgcaccaactacaaaccctggttacttaactgctaagtatattcatccccagcaatatcagattttctgagatcaaacaattcagaaggcagaagaaagggggcaaaagacaggtatttagaactacttgtggtgagtgagtctgagtgtagaaaggcaccccacgtacctggcgtagactatagtgcctaagtttccttactccaaatctccagcacaaaaccatgtatttcaagagtaaatacaaacaccatttgcaaatactagctgctgattttg

SEQ ID NO: 35476 - DNA, 413 bp, Homo sapiens
ggtagttgaaatcatggtcctaggaaattgctcatgaaaggaatatagtgcccaaagcaggtctactcttattccttaagaaattctgatatttaatagccaggtagagaaagatgagacagaaaagaaaacagaaatgagcagcctgagagcaggaggaaagcaaggggagtgtggttcccagaagctggggtgagagtgtttcaaataggatggaatagtgccaagtgctgccgagacatctgaaaagaggaggcctgggaaacacccattggatttagcaacatgggggtcttggtgagctaattttaaatttcctcaatggaatgatggaggcagaagccagattggagatggttgaggaattagtgggaagtgagaaaatggtagacattatatggaccacttttttt

SEQ ID NO: 35477 - DNA, 238 bp, Homo sapiens
ggacacacgagtactgacagatttaactggaagattatagaatgcaccccctctgccaccatcccagcagagccgcagtgcaacagcgctgggttatagcagacagagccacagactgtccccgaggaggaccatttggggaaattcagttacaagtggagatgaaagcaaggatactagaggaatttgaagcccctggcacctatggctaggcaatttctacctaaattaatataaa

SEQ ID NO: 35478 - DNA, 337 bp, Homo sapiens
ttttgagacagagtcttgctgtgtcacccaggctggagtgcaatggcatgatctcagctcactgcaacctctgcctcctgggctcaaatgattctcctgcctcagcctcctgagcagctgggattacaagtgcccaccaccatgctcagctgatttttgtatttttagtagagacggggtttcaccatgttggccaggctggtcttgaactcctgacctagtgatctgcccacctcagcctcccaaagtactggactagaggtgtgagccaccacgcccagccaagggggcactttttaactgggtagggacactgacttacccaagggcactcagc

SEQ ID NO: 35479 - DNA, 2528 bp, Homo sapiens
gggtgatagaggcactgaggccaggccccgggggtgccctgctgcaccgactccgggcggagattggctgtcctcggcccgcaatgctgtgcgccccgccccgcgcgccgcttccggcggagtcaggcttggctaatcgagcgcgcgggctggcggctcggcgttcgtttggccgcgcctgcccgtgtggtggtttccggcggaggtggtgagagtcgcacgcgcagcggggaaggtgtgagtcgtgaacggcccgggtctccgccatggcctctctactcgccaaggacgcctacctgcagagcctggccaagaagatctgctcccattcggccccggaacagcaggcgcgcacgcgggctggcaaaactcaaggctcagaaactgcagggcccccaaaaaagaaaaggaagaaaacacaaaagaaattccggaagcgagaagagaaggctgctgagcacaaggccaagtccttgggggagaaatctccagcagcctctggggccaggaggcctgaggcagccaaagaggaagcagcttgggcttccagctcagcagggaaccctgcagatggcctggccactgagcctgagtctgtctttgctctggatgttctgcgacagcgactgcatgagaagatccaggaggcccggggccagggcagtgccaaggagctgtcccctgccgccttggagaaaaggcggcggagaaagcaggaacgggaccggaagaagaggaagcgaaaggagctgcgggcgaaagagaaggccaggaaggctgaggaggccacggaggcccaggaggtggtggaggcaaccccagagggggcctgcacggagccgcgggagccgcccgggctgatcttcaataaggtggaggtgagcgaagacgagccggccagcaaggcgcagcgcagaaaagagaagaggcagagggtgaaggggaacctcacgccgctgaccgggaggaactaccggcagctgctggagcgcctgcaggcacggcagagccggctggacgagctgcgcggccaggatgaggggaaggcgcaggagctggaggcgaagatgaagtggaccaacctcctctacaaggcggagggcgtgaagatccgtgacgacgaacgcctgctgcaggaggccctgaagcgcaaggagaagcgcagggcgcagcggcagcgccggtgggagaagcgcacggccggcgtggtggagaagatgcagcagcgccaggaccggcggcggcagaacctgcgcaggaagaaggcggcccgcgccgagcgccgcctgctcagagcccgcaagaagggccgcatcctgccgcaggacctggagcgcgcaggcctggtctgagtctttcccacctggggccgccgtcttccgtcctaggagactccaggacaccctctgagtccttgacgctggctctgtcccaggatctccacagacctcggcctctccatgtgagggggacacagtggtgctctgctgagttgtgagggcccagatcacagatcccatgtgagaaagagagagtttcagcgtcatccttgaacgcaggatccgggaccttcagacccagggaaagggtgagggagactggggcctggtctgctttcccgggcctgaaagcttccccgaggtttgcagggtcagggaggaggaacggtgggggtgggcagtcactgcctgttccccactgcctgtgttcgcaggagccacgggacagaagacggtggcctctgctgccgggccacgttagtccgcagctcacccgaacagaggacaaccctgaggtgtggcatatgggcacctggcactgggagtcgggggagcacgtccaggcgtggtgcatcctggggcagaacgccatggctcctccccgctctcttggcttctgcctgttggggtctcattcctttctgttccccagtgccccggggcggcattttactgctcagaatttggagggagggagcagtaccttcccggagtccacgcatgtgagttgggtcaagtgcattggacctagggaaagagaaagaaagaataaaagctggagagagagtgaagtgaatgcaagatacaaagtgggatggaagaattaaatccagagttccaggcaatcaaaatgagtgcaggttgaaagaaaacaggtgaattttagtggcatatggatgataaagctgtaaataaaattcttttgatgaaactctccggttatgagacaaagactgtaactgaacaggagctggtgtgactgttaccagacagaggcaactgatgaaaaagccctgtgaaagataggatgtgaggtgagcatgagcttgagctgagagacagacacaacagtatctgaaaagaatacatactctttccatgcatatatggaacatggatggaaactgaccacctactttgtccagaaaagaagtcttaagatatttcaaggaatcagtgtcgttatctgaccgtatcccaatgtcattaaaaaaaatttgagctatttttttttgttttttagataga

SEQ ID NO: 35480 - DNA, 2274 bp, Homo sapiens
tccagctcagcagggaaccctgcagatggcctggccactgagcctgagtctgtctttgctctggatgttctgcgacagcgactgcatgagaagatccaggaggcccggggccagggcagtgccaaggagctgtcccctgccgccttggagaaaaggaagaaaacacaaaagaaattccggaagcgagaagagaaggctgctgagcacaaggccaagtccttgggggagaaatctccagcagcctctggggccaggaggcctgaggcagccaaagaggaagcagcttgggcttccagctcagcagggaaccctgcagatggcctggccactgagcctgagtctgtctttgctctggatgttctgcgacagcgactgcatgagaagatccaggaggcccggggccagggcagtgccaaggagctgtcccctgccgccttggagaaaaggcggcggagaaagcaggaacgggaccggaagaagaggaagcgaaaggagctgcgggcgaaagagaaggccaggaaggctgaggaggccacggaggcccaggaggtggtggaggcaaccccagagggggcctgcacggagccgcgggagccgcccgggctgatcttcaataaggtggaggtgagcgaagacgagccggccagcaaggcgcagcgcagaaaagagaagaggcagagggtgaaggggaacctcacgccgctgaccgggaggaactaccggcagctgctggagcgcctgcaggcacggcagagccggctggacgagctgcgcggccaggatgaggggaaggcgcaggagctggaggcgaagatgaagtggaccaacctcctctacaaggcggagggcgtgaagatccgtgacgacgaacgcctgctgcaggaggccctgaagcgcaaggagaagcgcagggcgcagcggcagcgccggtgggagaagcgcacggccggcgtggtggagaagatgcagcagcgccaggaccggcggcggcagaacctgcgcaggaagaaggcggcccgcgccgagcgccgcctgctcagagcccgcaagaagggccgcatcctgccgcaggacctggagcgcgcaggcctggtctgagtctttcccacctggggccgccgtcttccgtcctaggagactccaggacaccctctgagtccttgacgctggctctgtcccaggatctccacagacctcggcctctccatgtgagggggacacagtggtgctctgctgagttgtgagggcccagatcacagatcccatgtgagaaagagagagtttcagcgtcatccttgaacgcaggatccgggaccttcagacccagggaaagggtgagggagactggggcctggtctgctttcccgggcctgaaagcttccccgaggtttgcagggtcagggaggaggaacggtgggggtgggcagtcactgcctgttccccactgcctgtgttcgcaggagccacgggacagaagacggtggcctctgctgccgggccacgttagtccgcagctcacccgaacagaggacaaccctgaggtgtggcatatgggcacctggcactgggagtcgggggagcacgtccaggcgtggtgcatcctggggcagaacgccatggctcctccccgctctcttggcttctgcctgttggggtctcattcctttctgttccccagtgccccggggcggcattttactgctcagaatttggagggagggagcagtaccttcccggagtccacgcatgtgagttgggtcaagtgcattggacctagggaaagagaaagaaagaataaaagctggagagagagtgaagtgaatgcaagatacaaagtgggatggaagaattaaatccagagttccaggcaatcaaaatgagtgcaggttgaaagaaaacaggtgaattttagtggcatatggatgataaagctgtaaataaaattcttttgatgaaactctccggttatgagacaaagactgtaactgaacaggagctggtgtgactgttaccagacagaggcaactgatgaaaaagccctgtgaaagataggatgtgaggtgagcatgagcttgagctgagagacagacacaacagtatctgaaaagaatacatactctttccatgcatatatggaacatggatggaaactgaccacctactttgtccagaaaagaagtcttaagatatttcaaggaatcagtgtcgttatctgaccgtatcccaatgtcattaaaaaaaatttgagctatttttttttgttttttagataga

SEQ ID NO: 35481 - DNA, 1954 bp, Homo sapiens
tccagctcagcagggaaccctgcagatggcctggccactgagcctgagtctgtctttgctctggatgttctgcgacagcgactgcatgagaagatccaggaggcccggggccagggcagtgccaaggagctgtcccctgccgccttggagaaaaggaagaaaacacaaaagaaattccggaagcgagaagagaaggctgctgagcacaaggccaagtccttgggggagaaatctccagcagcctctggggccaggaggcctgaggcagccaaagaggaagcagcttgggcttccagctcagcagggaaccctgcagatggcctggccactgagcctgagtctgtctttgctctggatgttctgcgacagcgactgcatgagaagatccaggaggcccggggccagggcagtgccaaggagctgtcccctgccgccttggagaaaaggcggcggagaaagcaggaacgggaccggaagaagaggaagcgaaaggagctgcgggcgaaagagaaggccaggaaggctgaggaggccacggaggcccaggaggtggtggaggcaaccccagagggggcctgcacggagccgcgggagccgcccgggctgatcttcaataaggtggaggtgagcgaagacgagccggccagcaaggcgcagcgcagaaaagagaagaggcagagggtgaaggggaacctcacgccgctgaccgggaggaactaccggcagctgctggagcgcctgcaggcacggcagagccggctggacgagctgcgcggccaggatgaggggaaggcgcaggagctggaggcgaagatgaagtggaccaacctcctctacaaggcggagggcgtgaagatccgtgacgacgaacgcctgctgcaggaggccctgaagcgcaaggagaagcgcagggcgcagcggcagcgccggtgggagaagcgcacggccggcgtggtggagaagatgcagcagcgccaggaccggcggcggcagaacctgcgcaggaagaaggcggcccgcgccgagcgccgcctgctcagagcccgcaagaagggccgcatcctgccgcaggacctggagcgcgcaggcctggtctgagtctttcccacctggggccgccgtcttccgtcctaggagactccaggacaccctctgagtccttgacgctggctctgtcccaggatctccacagacctcggcctctccatgtgagggggacacagtggtgctctgctgagttgtgagggcccagatcacagatcccatgtgagaaagagagagtttcagcgtcatccttgaacgcaggatccgggaccttcagacccagggaaagggtgagggagactggggcctggtctgctttcccgggcctgaaagcttccccgaggtttgcagggtcagggaggaggaacggtgggggtgggcagtcactgcctgttccccactgcctgtgttcgcaggagccacgggacagaagacggtggcctctgctgccgggccacgttagtccgcagctcacccgaacagaggacaaccctgaggtgtggcatatgggcacctggcactgggagtcgggggagcacgtccaggcgtggtgcatcctggggcagaacgccatggctcctccccgctctcttggcttctgcctgttggggtctcattcctttctgttccccagtgccccggggcggcattttactgctcagaatttggagggagggagcagtaccttcccggagtccacgcatgtgagttgggtcaagtgcattggacctagggaaagagaaagaaagaataaaagctggagagagagtgaagtgaatgcaagatacaaagtgggatggaagaattaaatccagagttccaggcaatcaaaatgagtgcaggttgaaagaaaacaggtgaattttagtggcatatggatgataaagctgtaaataaaattcttttgatg

SEQ ID NO: 35482 - DNA, 2392 bp, Homo sapiens
tccagctcagcagggaaccctgcagatggcctggccactgagcctgagtctgtctttgctctggatgttctgcgacagcgactgcatgagaagatccaggaggcccggggccagggcagtgccaaggagctgtcccctgccgccttggagaaaaggaagaaaacacaaaagaaattccggaagcgagaagagaaggctgctgagcacaaggccaagtccttgggggagaaatctccagcagcctctggggccaggaggcctgaggcagccaaagaggaagcagcttgggcttccagctcagcagggaaccctgcagatggcctggccactgagcctgagtctgtctttgctctggatgttctgcgacagcgactgcatgagaagatccaggaggcccggggccagggcagtgccaaggagctgtcccctgccgccttggagaaaaggcggcggagaaagcaggaacgggaccggaagaagaggaagcgaaaggagctgcgggcgaaagagaaggccaggaaggctgaggaggccacggaggcccaggaggtggtggaggcaaccccagagggggcctgcacggagccgcgggagccgcccgggctgatcttcaataaggtggaggtgagcgaagacgagccggccagcaaggcgcagcgcagaaaagagaagaggcagagggtgaaggggaacctcacgccgctgaccgggaggaactaccggcagctgctggagcgcctgcaggcacggcagagccggctggacgagctgcgcggccaggatgaggggaaggcgcaggagctggaggcgaagatgaagtggaccaacctcctctacaaggcggagggcgtgaagatccgtgacgacgaacgcctgctgcaggaggccctgaagcgcaaggagaagcgcagggcgcagcggcagcgccggtgggagaagcgcacggccggcgtggtggagaagatgcagcagcgccaggaccggcggcggcagaacctgcgcaggaagaaggcggcccgcgccgagcgccgcctgctcagagcccgcaagaagggccgcatcctgccgcaggacctggagcgcgcaggcctggtctgagtctttcccacctggggccgccgtcttccgtcctaggagactccaggacaccctctgagtccttgacgctggctctgtcccaggatctccacagacctcggcctctccatgtgagggggacacagtggtgctctgctgagttgtgagggcccagatcacagatcccatgtgagaaagagagagtttcagcgtcatccttgaacgcaggatccgggaccttcagacccagggaaagggtgagggagactggggcctggtctgctttcccgggcctgaaagcttccccgaggtttgcagggtcagggaggaggaacggtgggggtgggcagtcactgcctgttccccactgcctgtgttcgcaggagccacgggacagaagacggtggcctctgctgccgggccacgttagtccgcagctcacccgaacagaggacaaccctgaggtgtggcatatgggcacctggcactgggagtcgggggagcacgtccaggcgtggtgcatcctggggcagaacgccatggctcctccccgctctcttggcttctgcctgttggggtctcattcctttctgttccccagtgccccggggcggcattttactgctcagaatttggagggagggagcagtaccttcccggagtccacgcatgtgagttgggtcaagtgcattggacctagggaaagagaaagaaagaataaaagctggagagagagtgaagtgaatgcaagatacaaagtgggatggaagaattaaatccagagttccaggcaatcaaaatgagtgcaggttgaaagaaaacaggtgaattttagtggcatatggatgataaagctgtaaataaaattcttttgatgaaactctccggttatgagacaaagactgtaactgaacaggagctggtgtgactgttaccagacagaggcaactgatgaaaaagccctgtgaaagataggatgtgaggtgagcatgagcttgagctgagagacagacacaacagtatctgaaaagaatacatactctttccatgcatatatggaacatggatggaaactgaccacctactttgtccagaaaagaagtcttaagatatttcaaggaatcagtgtcgttatctgaccgtatcccaatgtcattaaaaaaaatttgagctatttttttttgttttttagatagaagcaagactgtctcaaaaagaaaaaatttaagatttgtggaacagagctaaagcagcacaaaaaaacatagcccctaaatgtatgtgcatctacagataaatagtgccatttatacac

SEQ ID NO: 35483 - DNA, 1941 bp, Homo sapiens
  misc_feature (1920)..(1921): n is a, c, g, or t
  misc_feature (1928)..(1929): n is a, c, g, or t
tccagctcagcagggaaccctgcagatggcctggccactgagcctgagtctgtctttgctctggatgttctgcgacagcgactgcatgagaagatccaggaggcccggggccagggcagtgccaaggagctgtcccctgccgccttggagaaaaggaagaaaacacaaaagaaattccggaagcgagaagagaaggctgctgagcacaaggccaagtccttgggggagaaatctccagcagcctctggggccaggaggcctgaggcagccaaagaggaagcagcttgggcttccagctcagcagggaaccctgcagatggcctggccactgagcctgagtctgtctttgctctggatgttctgcgacagcgactgcatgagaagatccaggaggcccggggccagggcagtgccaaggagctgtcccctgccgccttggagaaaaggcggcggagaaagcaggaacgggaccggaagaagaggaagcgaaaggagctgcgggcgaaagagaaggccaggaaggctgaggaggccacggaggcccaggaggtggtggaggcaaccccagagggggcctgcacggagccgcgggagccgcccgggctgatcttcaataaggtggaggtgagcgaagacgagccggccagcaaggcgcagcgcagaaaagagaagaggcagagggtgaaggggaacctcacgccgctgaccgggaggaactaccggcagctgctggagcgcctgcaggcacggcagagccggctggacgagctgcgcggccaggatgaggggaaggcgcaggagctggaggcgaagatgaagtggaccaacctcctctacaaggcggagggcgtgaagatccgtgacgacgaacgcctgctgcaggaggccctgaagcgcaaggagaagcgcagggcgcagcggcagcgccggtgggagaagcgcacggccggcgtggtggagaagatgcagcagcgccaggaccggcggcggcagaacctgcgcaggaagaaggcggcccgcgccgagcgccgcctgctcagagcccgcaagaagggccgcatcctgccgcaggacctggagcgcgcaggcctggtctgagtctttcccacctggggccgccgtcttccgtcctaggagactccaggacaccctctgagtccttgacgctggctctgtcccaggatctccacagacctcggcctctccatgtgagggggacacagtggtgctctgctgagttgtgagggcccagatcacagatcccatgtgagaaagagagagtttcagcgtcatccttgaacgcaggatccgggaccttcagacccagggaaagggtgagggagactggggcctggtctgctttcccgggcctgaaagcttccccgaggtttgcagggtcagggaggaggaacggtgggggtgggcagtcactgcctgttccccactgcctgtgttcgcaggagccacgggacagaagacggtggcctctgctgccgggccacgttagtccgcagctcacccgaacagaggacaaccctgaggtgtggcatatgggcacctggcactgggagtcgggggagcacgtccaggcgtggtgcatcctggggcagaacgccatggctcctccccgctctcttggcttctgcctgttggggtctcattcctttctgttccccagtgccccggggcggcattttactgctcagaatttggagggagggagcagtaccttcccggagtccacgcatgtgagttgggtcaagtgcattggacctagggaaagagaaagaaagaataaaagctggagagagagtgaagtgaatgcaagatacaaagtgggatggaagaattaaatccagagttccaggcaatcaaaatgagtgcaggttgaaagaaaacaggtgattcgcgaatgggtcnnagctcgnntcgtatcatgta

SEQ ID NO: 35484 - DNA, 212 bp, Homo sapiens
ggtctcagagacgtccactgactgctctgcctcttttctcctctgactgagcgtccacgcagccctgattttttcagcctcctgtgtgagcccctgtgtggcttctggtcacctccaggataaagtagtacagagcacatgccaagcgcccaacgtaaccgaccccatggcctccctgccaccctgctgctgctcccccatcgccatggggt

SEQ ID NO: 35485 - DNA, 258 bp, Homo sapiens
ccttggggttcaatcctgagtcatcttctctaagttgtctcatccattcccatcacttcaaataccatcaacatgttaataactaccaagttacacccctagcagagacctctccccatgctccaatatgactacttagctgtcacacaagcatgtcaaactcaacatgcccaaaattgggtccttaattctccaccatcaccacccttgaagtcccctggtactacctgacaattatgaaagccagaaacccttcct

SEQ ID NO: 35486 - DNA, 319 bp, Homo sapiens
tttttttttgtcaaagccaaaggataccaacctaacttatgcttttagaagatccaaaaggggctgcttttgaatactaattttgaaagaaggaaggagaaaaaataatcctcccaaaccaaaagtgtcaaaccggcatcagttcatgagccaatgccaagtgatgaggagtgactgctttgaacactgagttaagaaggattctggggttacacctgggaccaaaagacaaggggctatgttcgatgataacttgaaaatacaggatgacccagtttagaccatcatgtactctaccacagcccatctctccccagct

SEQ ID NO: 35487 - DNA, 205 bp, Homo sapiens
tttgctctcactagcctgggcaacgtagtgagaccgtatctctatcaatcaaaaaaacaaacagaaaacatttagccgagtgtggtggtgcacagtggtggtcccagctacttgggaagttgaggggtgggaggattaccttagcctaggaggtcaaggctatgtgagccttgattgtaccactgcactccagcttgggtaacag

SEQ ID NO: 35488 - DNA, 332 bp, Homo sapiens
taaatttttatttgttgcagaacattgttatgttgttgaatgttatgatgtagttttctttctttaaagaatgcttaatttatttggcaggtagttatgttacttgcagagcagactgattcaatgcataattttaaactctttagcctgggcaacatagggacacctggtctctataaagaaaaaaaaaatgatccagttgtggtggcacccacttttggtcccagctactcagtggggaagaccctttgagtccggggatttgagactgcagtgagctgtgatcatgctacttatgcttcagcccgggtgacagaacaagaccctgtcta

SEQ ID NO: 35489 - DNA, 721 bp, Homo sapiens
attcatcccttgtgatatcatgggccacttttagtcttttatttggaccctgactttgagtttttgctatgcctgttttttaagtaaacacagccttcttatttgaacgtaacactgcagaattgcaggaagagaaaagggcagttagttatttcactttctgtaagttttaggaagattcttatatcctacgaggtgactcatgtttcattttagaccatgatagcacattgttgttaactttggtaatcttccatgcagtttgcagtgttcccttgcaagtcacaagcatatatgcattaagattttaaaatctaagatgcttaagatgttggtggcattgctctttctgaaaagaaagacaaaatactagaccttgctgaaaattggatatcttatttactttgcccatttatgcccgaatggtgtaatgcaagactcaagacttttcaatgtagtatatcaaatgagttgtgcattgattcatttgggggacatgaacaaaaattatcaaccagccagaactgtaatatttaattagttcatctttttctttcattcactctatcacatttgcattagccaaagagataagaacattagtaattcatatgtgtaaacaacccagaagtgaatattaaatcagtgagccaaaaagcaataaacaactcgagcatgggaaatcctgctaacagtggggagtctgatatagaaaaaaaaa

SEQ ID NO: 35490 - DNA, 218 bp, Homo sapiens
ttattactgtcccttgcttaggtcacaagaggagctcaaaataatttcataaacatgaattggcttccctagacacaacaaaggataagatcaaaagaattaacccatttaaaaaaatcagtctaggctggtcaagtgcagtagtgaacaggaggaaagagtagatcaaggagttcgatctgtaactgactttgatcaattgataacacactacctta

SEQ ID NO: 35491 - DNA, 372 bp, Homo sapiens
gtaaccagttgaattggacaaagtgttagtctgttatttattggaaattttataaaaagaataacatgatactgctccttcaccgcaggtggtttgagaagcaccaagctagattattctggaggttatgtgaaagttaaagtgaaggtatacacatgttcttacttataagtggaagctaagctatgggtgtgcagaggcaaacagggtggtataatagacactggagactcagaagggggaaagttggaagggttgaggggtgaaaaatcacttatttggtacagtgtgtactgtttggatgatgagtacactaaaagcccagactttaccattatacaattcattcatgtaaccaaaaaccaccagtac

SEQ ID NO: 35492 - DNA, 408 bp, Homo sapiens
tttctctatcaatttttttctctgtcctgaatcttttaatttctccactttcttcatcttatgaccatattcatttcttgaccctgcacccctctaactccatctatttgttaaggaaggcttttgtagtcaagcttctagagaagtggctagcaaacatcatctttgtttcctctccagtcatgcacacctcttaatcccactgaaactgtggtacggttatcaattacctttatagagatgaatttgaattttattggggcatttatgtcgtaaaatattaactactccatcatttcctttccttactccatcactgtcctccctgggcttctgagacatccttttctgggttctcctaatgtgaccgctctttcttaactcactgtctcaatatgtagtgattcc

SEQ ID NO: 35493 - DNA, 400 bp, Homo sapiens
ttgctgctggggtggttggaatcaaggttttctaattatttttctgtcatacataagtagcataggagacaaaagcccagagttaacttcctccaggtgcatttgatagatgtttgaatatctgatcattgctatcctaatttttaaaaatgcacataagtgttgcaaatactaatttcgtgtagttaaaatgtaacccttctcctacacgcatatcttaatgtgcctaaagtgaatttttaaactctaattattaaactcagggcatcttctggaattggaggctcatttcatgcattgagtaatcgctggtgttgtcatggtaacatataatgttggtgcaatttcctttatgtaataggtttttgcttggaaaattgtgggtagatcaaaattttct

SEQ ID NO: 35494 - DNA, 449 bp, Homo sapiens
tgaatgtttaatttcatctaattacatttccatatagttcgtatattaacagtacagatctagagatgcccattattgcagctgaggctcacttgagcttcccctgcaaccttcaccgtggttaaaagcacagactcttggccaggcacggtggctcatgcctgtaatcccaacactttgggaggctgaggcaggcagaccacctgaggtcaggagtttgagaccatcctgaccaacatggagaaaccccgtctctgctaaaaatataaaattggccaggcatggtggcacgtgcctgtaatcccagctactcgggaggctgaggcaaggagagtcccttgaacctgggaggtggaggttgcggtgagccaagattgcaccattgcactccagcctgggcaacaagagggaacaagagtgaaactccatctcaaaaaaaaaaaaaaaaa

SEQ ID NO: 35495 - DNA, 338 bp, Homo sapiens
tggaagaattgtctttggtcacacataaaatacactaatactaacgatagctgatgagctaaaaaaagaaaaggtctgtgcataaatctcatgttttaagaaggtttacaatttgtgatgggcggcattctaagccatcctaggctgcgggttggacgagcttgctgtaaagggttagaaaagatatttcctgtagctatcagtaggaccttccttaaaggggaaggtgagtgcttttaatccatataaaatgttttatttaattccaaggtatttttcttatttatatataaaaaataaaataacatttatcacaaagaataaataggtcatttcat

SEQ ID NO: 35496 - DNA, 431 bp, Homo sapiens
atgacacattagtatgtgtaacactaagcaacaaaccgtggaaaagtcaattagaaaagcagctgaaggcccatttggcaatgtgagatcatctttacagtttgcctggtatctgttgaaaaccagttttccatataaagagcctggtgcacttaaagtcatatagtgtggaggcaaagtttcacgttacaaagcagttctttatcctccattagcgtacagcccctatggatcttattatcactgttttccttttaatctaataattataaagaacaaaaagcattaaaaaatgctttactgctcccatttgaatttgtctttcctatagtttagtgaattttgcaggaaaatatttatatacattgtcttaaataagcccatctctataaagctgtccctcctctatttattgggctgaattctcagcg

SEQ ID NO: 35497 - DNA, 324 bp, Homo sapiens
tcagtatttagaaatttttatttcataaataatcctaagtatcctaaggaaaatttgacccaagtggaaacatttttagcatataatccaccaaattggcaacccacaagtaaataatggaagatagctgttcatctaataggagagaattcaaaaaacactgtgcttcaactagactctgttagaagtatgtcagagtctagagcaatcaccacatagttaagatgctattaattctgtatgaatagaaaaaactgaagagtaagtgttttttagacaagagcatagcagtataatgtgaaatgataaaaagcacagatgctg

SEQ ID NO: 35498 - DNA, 866 bp, Homo sapiens
  misc_feature (801)..(801): n is a, c, g, or t
  misc_feature (810)..(810): n is a, c, g, or t
  misc_feature (815)..(815): n is a, c, g, or t
  misc_feature (831)..(831): n is a, c, g, or t
  misc_feature (847)..(847): n is a, c, g, or t
  misc_feature (856)..(856): n is a, c, g, or t
gcttttaaagatttacctagaagagataataaaacagataaaactgatctgctcaggggcctgtcttcagtcttttcaggctcgtttactgtggtgttcatgccagcgcagcctggtagacagtgttgctgtggctgtagaaataacactgctcatttttatggaggatattgctgtatgccagttaaagaaattcaagttgaaagacctttaaattttttttaataatacacttccttccccacccccaagctgtcaccatgattatgatgccaggaaagcagtgcggtggctccaggattgttctcccatgggctgtgtgccaggtggatgaagtagtcaggagggccacagttgggtttatgtacaacctagatatcatctacttgtgctggttgaccctccattttctaaaggcaatttccaaagggagttgcttttgttgttactattagaacggttgcctattttccatatgatctcttctctgtcacttaggttctgtattctatatagaaaagtatggagggaaagggaagaatcaggaaagatagtgaatgcaagaatattgggggttatgatgtggttaagttagattgtgcctcaaaacactgaaaagattggagtttcgggtcaggagctctggattaaaggccaacgggaatcttttaaacttcttggttgtgtgtgtgtgtcggtgtgtgaagtcagaggcagacgatgagaggaaataaattgagatgggagagaaaataatatggaatgcttaggaaggatttttaaaattccaggggctggggnttacaggcntgccngttgttaccccagccncttgtgttttattttnaaaaagaantactggcctt

SEQ ID NO: 35499 - DNA, 1273 bp, Homo sapiens
cctgattctattggagcaggtttgatcatctaggcagaaattaggatgagaaaaaaggagatccaataatacaaccttatagtcacagaagtaagaaaaaaagggtagttgttttgaagaagccaggataggtgtggaaagtactcaaaaagaaatcttcagggataaaataaagtgataatttaaaagaaatcaatggattaaacatattgaaactgttctataggcagtggtcattgagtcagctttcagtgcattaggaagaagatgcataggtgtcaactcttttctgacagcatttactagagaagagaaaaagctggggactacatcttcaaggaagggactttttttggatgagcagttttgagtgtgtttgtcagttaaagagaggaattaggttggttttcatttgggaaaaattgtatatatatttaatgtaagttatcacattgcatcttaaaaatattcttatttaatacatatatttcctacatgtatatgtggtagcatgatagcaaataacatttgtttggtatttccaaaggactttcatgtacattgcctcattttacctttacagctactctgaaatacacaggcattatcccttttattcagctgagaaaactgagcttcattgaggtggaggtcaaaaatcacaaaatttgtgatgaattaagatttgaacatatgttttgtgactccagttttcctttcagattttaaaattaattaaagggatcttcattatacttttattgttaactttttgttaacataatttattcatacattcagtgaaaattttgttgaggtactgggacaggttaaaaaatacagttgtagccctcaggatatttaatatccagtgaaaagtgacagtcagtaaaccaacaatctcaatactttgatatatgttgtgaggttgtgataaccgattcttgtttagtttaattctatatctcccttagaccagtgttaaatttaaataaaacacctcattttttccaattcagggaaggcactaaacataaagcataggatagaaatgttgaactcatccaaaatattattttgtttaatgaaaatgatgaagattaaggaatacttccatgtattgagtaaggttgataattttctaattcttcactgtgcattattttgtttgaagttggtaaatttggagtatcctgcagacacattttgctttatgtactacaacattctacaaccaaataaaaattattttgattatctgaaaaaaaaaaat

SEQ ID NO: 35500 - DNA, 398 bp, Homo sapiens
attggaccaaaaattcacagcttataagtaatacttactattccctagttgctatggtcagggatctgagagaatctgtccagtttgattcaaggtccctccctcgtatgagtttataatcaagtcgttggcctagcctgcagtcatctgggcctggaggatccacgtaattttacttatatagttgttgacaagcctcagtttctccctggctgttggccagatgctttagtttctcactttgagagccttccctccttccttccttccttccttctttgcttccttccttccttctttgcttccttccttccttcctctccttccacccctcatttcctttttgcacacattacaggtggtgtgttctgtgataatgaaaagcatcagaaaaaaaa

SEQ ID NO: 35501 - DNA, 302 bp, Homo sapiens
agcattgcataacatttctgaaataagagtctgaggagaagtttgcctctgaaagaaaattacaggagaacctccgtgagtcttctcttacccagacattacaaggcgaagataaatcgcaagatgaaatgtttggttaaaattctatcaaaatgagaatgttaactacagaaggtcaaaatatcagtgagtaaattcctagagaagtcttcaatgcaaccaaaaagatttctcctcccaaaacagaaaagctatatatgcacagatacattaaaaacatacaaaaaagatgttatcctacc

SEQ ID NO: 35502 - DNA, 463 bp, Homo sapiens
ctggggcttgaggaataatttttctaaggtgcaggtttttaaaaggaagatccctagaggtcaaggtatggagtccaagtggttttgaaatctctgtcatggtattgctatcctgagggtttggtgggttagatgcagttggtttcttggcaaaggtagcacttgcaattgagcaggtaatagattagagtttcaggagggtcttctagtttaaaaggttgaagttaatgcctagccagtaaccagagagacaggaagaatgttttaacctctggaggattggggagagctattcagagtgaagggtgaagtagaacagaggtttgcctctgctttatgatgaatgaagcagagactgtgaaagtgttttggaattgtcctagggtgctatacaaaccttggcataaaatctaatatgctatctctcttttgtttccagtcctaaagaaaggaacaaggcatt

SEQ ID NO: 35503 - DNA, 381 bp, Homo sapiens
aactctcatacatactcttaaagacccagatgaaatggcagaacgcctgtgaacttcatctaatgtacacactcagaatcttgggaaccttggggtctgaaagggcatgaatgttttttgtttgtattgtgaagataaaatccggccacagaactgggcgtggtggtcacgcctataatcccaacactttgggaggccaaggtgggcagatcacctgaggtcaggagctcgagaccagcctgaccaacatggacaaaccctgtctctactaaaaatacaaaaattagccaggcatggtggcatgcacctgtaatcccaactacttgggaggctgagacaggagaatcgcttgaacccaggaggcggaggttgcagtgagcc

SEQ ID NO: 35504 - DNA, 462 bp, Homo sapiens
actttacataaacagaaacattatataattctatttataattgcttatcttattaaacatattttaaagattaaactatgttaacatgtttgagttggcatctgagttactcatttttcattgctctataacgaattcctatgtatgaatttaggtcagtttctcccctagaattcatgagttgaaaccctaatccccaatgtgattgtatttgaagtaaggaagtaattaaggttaaacaagatcatatgggtggggccctgatgatactagtgttcttataagaagagacacaagagagattactccctttctctctgccatgtgaggacactgagagaagatgtggccatctacaagccaggaagagagccctcttcagaacctgaccttgttggcactctgctatcagacttccagcctccaaaaccgttaaaataaatttctgttgtttaagccacc

SEQ ID NO: 35505 - DNA, 535 bp, Homo sapiens
ccaaggctgcctcatgctcttcgtgacttactgcttgctataatcctgagtctgtggatgatcacatcagaaaacgccctcagtttactgttgcgtcccactgcttcccatcttctgaattaagactgcacattctggctctttgccttgggtaatcttttcccccaataacttgggagctttgattccaagtggcttaggagagttgttctccacacagctgggtaccagaagcagccagctgaatgggaccaaggcatgaagactgaaaacctcgcaggtgacttggatcctcatcccaggttgagaatctctagcttaggagtctcttttgagtcctaaaggaaatactcaatttcccccatctgtcaggtccctgccacatctaccgacatgtgcaatgggattaattcttaagaaattcatatacagcttagattgttgctcagagactcctgccactctgtgaaccacccctatggacactgatgcacaatttcctttgggttgatctcataagttgcatccaaaaaaa

SEQ ID NO: 35506 - DNA, 398 bp, Homo sapiens
tagaaatgcctttttatgtctacatcaaagtagacataaaaagtttgctccttggggagaccacaaaaatagaagctgggcccctttcatctcctgcagatagctgtccatgccagggccttggtaaggaaaggggtcatttcagattcatgagtgtgcacttcttggccctttatcaaactaatgcatttaatgtgagaatcaaaccattattgccaagcaagaacaatgggtctaggtcccagacaaaggcatctagagtttcacagaccagagtggtgttattcaaagttggacaccccacccctgattcagtttatttattcagccagggacttggggaatatataatttaagttgaaaaacaagactgggaagggtattatatgtcaatctgg

SEQ ID NO: 35507 - DNA, 378 bp, Homo sapiens
atataaaaaataaaaaaacttagccagttgtggtagcacgtgcctgtagtcccagctactcaggaggctgaggtcaaaggattgcctgggctcaggagtttgaggctgcaataagctatgattgtgccactgcacttcagcgtgggtgacagagtgaagccctgtctctatttaaaacaacagcaataaataaacaaagggaatcacttccaagttgacatcccaagctggaaacattgactccacactttccttaagctgctcagcatcaaaagctgctattgttatgttcatactatgtgccaggcactgttttcacaagtatgtatatacgtgtgtgtgtgtgtgtgtgtgtgtgtgtgtgtataaaatgtccat

SEQ ID NO: 35508 - DNA, 470 bp, Homo sapiens
atcagagaaggcatgataaaagtttgagaggctgggtgtggtggctcacagctgttatcccagcactttgggaggctgagactggagagttcgagaccagcctgggcaacatagcaaaacccaatctctacaaaaagcgcaagaattagctgggtgcggtggcatgtgcctgtagacccagctacttgcggggctgaggccagaggattgcttgagccctggaggtcgaggctgcagtgagctgtgttcatgccaccgcactccaggctgggtgacaaagtgagactccatctcaaaaaacaacaacaacaacaacaacaacaaaacagtacaagaactgtgtggctcagatcagtgctactcaaataagccagttggtggattgcctattacttacctgtaagggcatcaggagcttacagagaatataaatgatccttgtttctttcatcaaaaaagtcttgctgcca

SEQ ID NO: 35509 - DNA, 512 bp, Homo sapiens
gcgtatcaaatgtcagaaactaaaataggggaaacattgaaaaccaggcggcattggtgaataaatcccacacaaacagctgagcttcctcccaaagcgtgacgcacagatggctcccctgacccgaggcctcctcctccgtggacgccgcctgcccagctcacggaaggccttgccttctcccacccgaaaccgtcagcccaggcctcgctctcgcctgctgtggccacaggtcagcacccttcctgcagcccagagtctggtatacagcaggcgcctaataaatactggctgggcaaacaccactcatcccagctgctcagacgtgggggtcgggctcattgcggaatgcagaccggctccaccgtgccttctggccctgaagggctgggcaggtccacgccctgcaccctggagctccccggggagggcgggtgtaggaatgtttgcccagtgagtggacagacgtttacacagcgggatttataacccacatcagacgtcaactccgg

SEQ ID NO: 35510 - DNA, 546 bp, Homo sapiens
gctactccaccagctgcagcgagggcttctggcagagatccccagctgtcagccctcatcggaattgcttcaaatgaagagtgtcatctcacccaccaccatgccctcttcccagggtgcccacagccaagaactggtttataaggagatataaaggtctggcccccactttgtctagagctggccatgtggttgctctctgttgaggctgaatcataggctgtgatggttaagattgagtgtcaacttgattgaattgaaagatgcaaggtattgttcctgggtgtgtctgggagggtgttgtcaaaggagattaacatttgagtcagtggactgggagaggcagacccacctgcagtctgggtgggcaccatctaatcagctgctagaataaagcaggctgaaaaaggtagaaagagcagacttactgagtcttctggccttccatctttctctcttgctgaatccttcctgctcttgaacatcagactccaagctcttcagcttttggactcttggacttagaccagtggtttgccaggggct

SEQ ID NO: 35511 - DNA, 348 bp, Homo sapiens
attccctgattatttttctttttttgcacatatcaccatataatatgctctgtacctcctccccctccacctgtgatgtaggctctgtgaggactggggttttgtttggtaccttatccttaatacttggtatgtaggtgataaataaatactgggtaaaaaaggaatgaatatttcctctattcttgtataatctatactgactcttagcatttttttcctgatatggagaattttagaaagttcatcttcctgtctcagtgtttatttatctctgactaggtgatttcctcctcccccaattgtctgagaaatgaacttttatttttttgagacagagtcttgctt

SEQ ID NO: 35512 - DNA, 389 bp, Homo sapiens
ttttagaaccaaggaattttatagctagacaagatcttggaagtcttccaatctagcctctttattttgtacatatggaaactgaggcacaaagaggttcagcaacttccccaaggtcacatagctggtagaggtaggctgggactagaacccaggtctgtgtgactccaaagtctgtgctcctcccactatactgcttcacagataggagctgatctgcctcaaatcttctgccccttggcctttccacaactctgcattgctgccatctaacagtgccttccactggtgccatgctaaagctcgttaggaggcaacttaacattgttctgtaaaagctctacagatgtaggatgctagctatctgttctccccggaaatcttttcaa

SEQ ID NO: 35513 - DNA, 488 bp, Homo sapiens
gactcaaagaacactatcaaccagcatgacctcattgatatttatagaacattccatacagtaagagcataatacacattttattcatgtctacatagaacatacgccgagatagaccatataccaggccataaaattagttgcaatacatttaaaatatttaaatcatacacaatatgttctttgtctacaacagaaataataacataaatatttccagaaaatccccaaatatttggaaattatcacactgttaaatagctcatggtcaaaaacaaataaaaatatataaaaatactttgaatggaattaaaatgaaaatgcacatgttaaaatctgtgagatgcaagccgggcatggtgatgagtgtctatatagtcctagctactcaggagactgaggcaggaagatcacccgggcccaggagtttgagttcagtctgggcaacatagtgagaatctgccccccacaaaagtaaataaataaat

SEQ ID NO: 35514 - DNA, 434 bp, Homo sapiens
cctgggcccctttactcttgttgctctaccatttctaacactcagctgctacttcatggttctgtttggctgctatagctatagccatcctttttacattctagtcaacagggaggaaaaagaggagatactttctccttttaaagaaacttcccagcagttgtccagaacttttagtccagttggccatacccagttgtaagggagcccggaaaataagtttttattttaggcagccttgtgtgcagatagtttctaccactgtagggaaaggagagaacatatgtggcagggataacagcctctaccaggataagctcttgggagctttgaatggctcaatcagtaaacaatattgcttattataagtagtgcactatgaaagatgaattgtgggaaaatgagggagattgggggaaggagaacagaattga

SEQ ID NO: 35515 - DNA, 534 bp, Homo sapiens
caggccatcgaccggaagcagtctgtggcttggaggttggggatccctgctatatgggccagaaatgtgaaagaggtgttcagtggggagtatacttctaacttgaatacattcttttcagcatttctacttattttatcaaaaggtaattttttttctcaggaaataaagcaataggcaattgttttttatagtttttctgtacagagccttattcaattatactaccaatgtaatcctattgcactgctcaacagaatcagaataagaagaacttccaagtacaatttgaaaataaaagtatctttcaagaatttgcactgtactgcattatttgatttgaaaaaaaaaaaaaatcagaccacttccatttcttgatgaaacaactaactcattggctaactttcaactggctctcttcagtggctttgagaatgtggcacttccatcataccttgcctgtagtaccaccctaggacttttttaaatggaaaatattttaaaagataattgattcgtatgcttccggtcgaa

SEQ ID NO: 35516 - DNA, 692 bp, Homo sapiens
aacgtgccccaccctaggcccgggcctgctggcttcatagctctcatcattcccacggaaccttaagacctgaggacagaaaggaaggaaacaagcccagtagtccgtgaaaatccagggtcccgccactccaggtgtctgcagcagagctgaacacacgtaggctcttgccaggaggggcatttgtatgtgctgagcattccttatattctcaatatgacgcctttgaaagatctgtggtttgcaaatatttactctcagtccataacttatctttccaacctcttaccaggctcttttgctgaataaaagttttaaattttgaagtctaatatatttttaatttttttattttatggatcatactttttgtgtcaggtttgagaagtctgcaccaaagtatgtcctgtggttttcccttaggtcatcttcaacaagtttcatagtattttgtttagatgtaaatctgtggcccattttgagttagtttttgcacaagagttgaggtcaaggttctttttttgcctgtgatgttcagtggctctggcaccatttgttgaaaacatgatagccaatgtcaagacttaatagttataataatcaggagcttttgtttctttttgttttgtttttagtaactgccagtcactgcttgtggtatacatacacaatggaatactattcagtcttaa

SEQ ID NO: 35517 - DNA, 545 bp, Homo sapiens
ctgttcccagccaaatgtggtcgttaatagataacaatttcttagtaactttaagaaataattaaaatttagttgtcagaattaaaactacaacaaggtatcactgtacaccttaattagaatggctaaaatgagaaaaattctggcaaagatacataccaacttaaaccatcatatactgttaatataaggaatgtggtgcacttccttggaaaacttcatagtttcttaaaaggcgaaatatactatccagtgatccagtcagttcacttctaggtatttacccaagagaaatgaaagcagggctgggcgtggtggctcacccctgttatcctttgggaggccaagccagaaggatttctggaggccaggaattcaagaccagcctggcaacatagcccaatcctatctctattgaaaagaaggaaagaaagaaatgaaagcatatgtccatacaggtgttcacagcagctttatttgtaacagctgaaaattgacaacgcaaatattcaatggatgatgagataaacacattgttatatagc

SEQ ID NO: 35518 - DNA, 341 bp, Homo sapiens
ttgaaagagaattggagagagaaaacctttctcaccatgtggtacccaaggagttcaagctgaatctgtgtccacgtgagatctgctcggcgtcactaagcactcatctctcactgctagagatgcccggcagagcgaatgctagtggggcttcccaatacatccatatctggaatttccacctggctccactatttaccagcacacaccacccaggacaagtctgttttcttcccggtaaaccaggattcacagcacgcactgcacagtgtggttgtgagattatgataaaatgccagaaacactcagatattagggagctggtgaaagtggatttgact

SEQ ID NO: 35519 - DNA, 297 bp, Homo sapiens
aagttcttgagcctttattaaccctgtgcccaaacaaggctgccaaatgaaagcagcaaagacatttattaaaaatttatctgactttccccttcatatgcaagaaaaaccaagaacacttccactgcagtttagtgtgactggttatcccctgaaatttatcaactaccttcttcattaacacaagagataatgcagggaaatagcctaaacagtcaaaacttcatcttcaaggctttcacaacagaaccataaaatcctcttccacttgtgaatcaagtaagtatacaaaccctg

SEQ ID NO: 35520 - DNA, 733 bp, Homo sapiens
cagtcacttgttattctgacaagtcatttgttttcagttcatctgtcgcatctgtcaagaaaaacacagactgtcttctaaaagtccgtttttaactattttattttttttcaatgacaaattccacttgtaccatagaagccatattctgcatgttggagaggcccctttgtggtccctcatccctgggttcttcctgggcatcctatggcctcccctctggtgacaggcagcaccccgaagacttaattttgattcttaaaaagggacagatccctccttccacccttgtccaggtacttccagagggtgggtccccttctcatgggaacatactacccccactcaccagaccacagtgatgagtccagcccagactgtgggccatgaaagcctaagctcccaaaacaaacaagatgccagggacactgcagccatctcagaggacaccgaaagacattttaaagccaagggaagcacagcagaacatcagctgctggacaccaagggagccacagctcgagggggttcgtgctccaacagcagatggagctacacccttcccgatgacgtcacatcctaataaagccctgtttgcagtggctgctgtgataaaaaagcaagctctgcatgaaatcaacatggaacaggaaacaaggggtggggtgggacggagtccaatctgattctgaagtttgagaagctgtacaacccattagtaattgtggctatt

SEQ ID NO: 35521 - DNA, 191 bp, Homo sapiens
taacttatcttcctgcagtacagagcccacttggattatatttgagaaaaaaaaaaaaaaacctccctttcacgctgaggcactgggataggtgacagtgactaaggtcagggcctttactcacctgcccctcctctgggtcatgatcatgtggtgaaaactcagagcagtaatgtttgcattggcctgga

SEQ ID NO: 35522 - DNA, 540 bp, Homo sapiens
catttcaccaaaagtgtgacagaaggaaaccaagtacaccatctctctcttaccaaaccaaagctattgcatgtgcattctgggagaaaaaaatggtccaaatatgttatggagggggtgccagcccagtgtcatcctcttactattgccataggatcttggctgatggcatcagacgaaaaacaagtttatcgattactttcaaccattaagctcactcctccatgaaaaataagtcacaagtccaatgtctcttattaaaataagcactgcaaaatataaaggactcacagttttaaaatgggacacacgttctctaagcggtgaaccactttagaggtgtactgtttacattgtataaagtcccctggagccagggttaggaagcgcatctgttctttggtgttctgggatgaaggagaaaggaaaatgtgctgccagaagtgagtgggaaggagcccatgagataaaggaagtaaatccatttgctgattgcaataataatggtaatacacgaagctatacatacatacatacata

SEQ ID NO: 35523 - DNA, 243 bp, Homo sapiens
ttggcaggcgaatctgggaaaggtctcatggaagaaatgttactgaccttgaagaatgagtaattttgattgggggagagggagaagcagcatgggcaggagacagggaagcgtgtaagtgcacggcacatccaagagagccaggagagtgcagcgaagtgcaggcttcatagaaagccaacggaggacgatgaggatgggaagggaagttggagcccatcaccaaagcattaaattccatag

SEQ ID NO: 35524 - DNA, 769 bp, Homo sapiens
aagaaatcccctgatctaagaaaatggctataaaagacatacagggattagagtaatttagactacagagtgagttaaaaatagaactgggttgttaaattttctgattttgataactactagaattgtgtgagaaaatggccttgttcttaagacatacacactgaagaatgtaggagtaaaaaggcctcgtgtctgcaacttactctcaaatggttccaaaacatatgcactgatataaatatattagcaagggtatggatggtaaatcacaaggagcaaagtgttaaccactttgaatctgggtaagggcatatgggagtttgttctagttttaaaaggtttcccaacacttggggaggttgaggtgggccgatcacttaagcccaggagtttgagaccagcctgggcaacacagggcttgagctgccatgctcggcctaaattttaaaattgaagtattttaaatgtaaatgtaatgtgaaagtattttgaatgtaaaatattttttgttacacaacttcattgttttagtaggactgtattgcattttacctgttaaaaatttggcatctgaattaagatgtgctgtaagtgtgaaatacacactagatttcaaagacttagtaagaaaaacagattgtaaaagatctcattatttttatattgactacatattgaagtgataatattttagacatgtcaggttaaatagaatataagttaaattattaaaattaatccatttttactgttttaaaaaaaaaaa

SEQ ID NO: 35525 - DNA, 756 bp, Homo sapiens
tgggctcctgagtagctgggattacaggcatgtgccatgtccagctaattttttggaattttttgtagtgataaggtcttgctatgttgtccaggctaatctcaaactcctggtctcaagcaatcctcccaccttagcctcccaaagcattgggattacaggtgtaagccactgtgcctagccctgtaagaggctttaatgggcagctatagtttattggatgcttattatgagatgagcattggctaaatgcttgaccagcactatttaatcatggcaaatacctatgagataggtaccgctattatacttatctgacatatcaactacaaacacagagaggtgaagtaacttacagtcacacatctacacctgcttaaagaacagaataagaggccaggcatggtggcttaatgtctggtcaatcgcggcagcgactttggaaggctgaggtgggaggattgcttgagcctaggagttcgagaccagcctaggcaacacagtgagaccacatctgtatttaaaacaaaacaaaacaaaacaaaacagagtaaggataggaactcaattctgcctattctaaccaactatagaatatttgagtttgcttctcatcaacatctctgcctagtggcagtcatcctgctattcttgcatacctcactgcgtgacaaggtaatcacctccttcatagccagcccattccagtggtggacagttctggccctcagaaagtcagttctaattctactgagc

SEQ ID NO: 35526 - DNA, 1026 bp, Homo sapiens
atctccgggccagagcccctcccctcggcccgcgcgggaggagtgtgacccaggtgccgcttcctctcgccgccgagggtcaggagcccgggagcgcgaccctcccccggcccggcctggcccggcctggccagtccccgcggtctctgcccgggctgacgcccaggaatgtggtcgacgagaagccccaacagcacggcgtggcctctcagcctcgagcctgatccagggatgtctggatggccggatggcagaatggagacctccacccccaccataatggacattgtcgtcattgcaggtgtgattgctgctgtggccatcgtcctagtctccctcctcttcgtcatgctgcgctacatgtaccggcacaagggcacgtaccacaccaatgaggccaagggcacggagtttgctgagagtgcagatgcagccctgcagggagaccctgccctccaagatgctggtgatagcagcagaaaggagtactttatttgagggacaacagacttcacttccctgaatgcctcccccatctccatcaggaaaaatacaccccatcgcccagcacccctgctgataccaccagacagagagagagagcacttgattcttcccgagatagccacctggaaacactaggtgcctgcccagggaggaacggaggaggactcgcgctacaagaggccactcccagggacccagggaggcgatggccaccccagaggccaccttttgctccacggaggtgggagaaaatctgggcacatggggccccctgggcagtgcaggacaacatcagctcactggcaggaaagtccttgttgagggtgagggggtgctggggtacccgggggctggggaagcaaggaaataagtcatctgtatgctgactggggataatggcatcaaatgtcagtccttgacatttggggggaacagcaggtgccagagctaaaaggtacctttgtctgccattgatccagctcagaacgattggaaataaatttgaaatgtaaccgagca

SEQ ID NO: 35527 - DNA, 1556 bp, Homo sapiens
atctccgggccagagcccctcccctcggcccgcgcgggaggagtgtgacccaggtgccgcttcctctcgccgccgagggtcaggagcccgggagcgcgaccctcccccggcccggcctggcccggcctggccagtccccgcggtctctgcccgggctgacgcccaggaatgtggtcgacgagaagccccaacagcacggcgtggcctctcagcctcgagcctgatccggggatggcctctgcctccaccacaatgcatactaccaccattgcagagcctgatccagggatgtctggatggccggatggcagaatggagacctccacccccaccataatggacattgtcgtcattgcaggtgtgattgctgctgtggccatcgtcctagtctccctcctcttcgtcatgctgcgctacatgtaccggcacaagggcacgtaccacaccaatgaggccaagggcacggagtttgctgagagtgcagatgcagccctgcagggagaccctgccctccaagatgctggtgatagcagcagaaaggagtactttatttgagggacaacagacttcacttccctgaatgcctcccccatctccatcaggaaaaatacaccccatcgcccagcacccctgctgataccaccagacagagagagagagcacttgattcttcccgagatagccacctggaaacactaggtgcctgcccagggaggaacggaggaggactcgcgctacaagaggccactcccagggacccagggaggcgatggccaccccagaggccaccttttgctccacggaggtgggagaaaatctgggcacatggggccccctgggcagtgcaggacaacatcagctcactggcaggaaagtccttgttgagggtgagggggtgctggggtacccgggggctggggaagcaaggaaataagtcatctgtatgctgactggggataatggcatcaaatgtcagtccttgacatttggggggaacagcaggtgccagagctaaaaggtacctttgtctgccattgatccagctcagaacgattggaaataaatttgaaatgtaaccgagcaaaaaaaaaaataaaaaaaaaaaaaaaaaaaaaaagaaaaaaaaaaaaaaaaaaaaaaaaaaaaaacatgaaaaacagtatagaaccaacaaaatttagactaaaacaagtttatgcatgcgtccgccaattgagtttacttgtcaaaaagcccttatagggagccgaatttcagggccactgggcccaatttaacatatgaggggcggggaaaaacttgggggtccccattttaaaccttttgcaaaagaaccccctttgggcagctcaataaataggctgggggctgtaccaattgtccttcgcggaaatgccggggactgactgcctaatggaaatttgttgccaaaatattttggccaaattggcgtaaaaaattggccccccactattttttaacacaaaaggcaaaattgtaaaatccttttaaatttaacgcatcacctgtattggataagggctttttcttttgga

SEQ ID NO: 35528 - DNA, 1388 bp, Homo sapiens
atctccgggccagagcccctcccctcggcccgcgcgggaggagtgtgacccaggtgccgcttcctctcgccgccgagggtcaggagcccgggagcgcgaccctcccccggcccggcctggcccggcctggccagtccccgcggtctctgcccgggctgacgcccaggaatgtggtcgacgagaagccccaacagcacggcgtggcctctcagcctcggtcctgggttaaagggacaggagccactgtcattattccaattcagtcactgaggaggtgaggctgagaggcattctcatgtctgaagaggatgggcttgcctgacccccgcccccgtgcccagcccagcccagcagcccaagcagttctccaggactcaggtttcagaccttcaacacttgccttgggagacaaacagcggtgcagcccttgcttgcaagccattccacattagacttcggattgatttatggcaggatccctgctgtgcgagaaactgcagggaggggtggggggcggctatttcttgctgctaactcaggcaggatgtgtctatatcctgtctcagtttatgtagctgctcatcagagccagaggttagagcggagaggacccacttccgccaggccggcctgctctgctcagctcagctgggctaggcccaatgccacagttactgcgcgtgagtcatgcacagcaatccattgccttgcccttggatggaaggggtcaaggctcagtgagaagacggccaggtttggcagctttatatagaattcaccgcctctggcagaagcagaggattgcattaagtgccaaatgaaattccacctcagccattgctcaattcctccagatgtcactggcactgggagtcacatgatgctggtggtcagcagctggacccttccaagggtgcccgtggttgggcaagtatttctggggacttgcagagctccctggggagcaaagggttgtgaagtacaaggcattctgcgcttgtggtgggaacaagtgaaccccatctgcagtgagtaggaagaggtcccctcaacagaggtgagaggttgggccaagtcaagtcagtttgcctcttcaggtggcagacctgtatgtacatctatgcctcaagtgcctgtctgaggccacagccaaaacatcttccagtaactgagcatacccagtgggccaacaagcacgctctaaatacaaaaccaaacaaacagtaaagttaacagtgaatgaagagttaaaaataggagaaagacaccttctccctacctcaatggcaattactttatttattgaggataatccttctagaagtaaatttgctgatacaaatatttcttattttacataataaaaatgcattttatatattttactt

SEQ ID NO: 35529 - DNA, 810 bp, Homo sapiens
atctccgggccagagcccctcccctcggcccgcgcgggaggagtgtgacccaggtgccgcttcctctcgccgccgagggtcaggagcccgggagcgcgaccctcccccggcccggcctggcccggcctggccagtccccgcggtctctgcccgggctgacgcccaggaatgtggtcgacgagaagccccaacagcacggcgtggcctctcagcctcggaagtctccaaggacccccatgaaacacctgcatttcctgtcatgattttgaggctgaaatcatcttcctcctcccagaacacctaggtgttctagtctgaagccatcctcactctcaactcccctccttcgagccctcaccctgtgcctgaattcttccttctttgctgggacagatggacaggaggaagacaggaagtggggaaccccttcaacaactcctatggcagaggggagccataggagatgggccgggaaatgtaaagaccagcccacgcaggaaaaaaagagaactttttagcacagtgtcatctgaaaatgcaagagaagagaggctcttggtggcaacagaggagtgtgacttccagcctcagggctagcacctgacccctgctctccgtccacatctgaaaaataccactggccctgagaatccattgcaactgaggttctgcaccccaacagctgcactcaagctgccaactgaagcagagagcactgcccgcactgcagggttgtgcctgtgtgccccgctgcctccaggggtggctgccttctgccagagaatggacagctgacatcctgaggacata

SEQ ID NO: 35530 - DNA, 234 bp, Homo sapiens
cgtgtggttctccgtgtggttcttgtctggttcttgtctggttcttgtgctggggtacccgggggctggggaagcaaggaaataagtcatctgtatgctgactggggataatggcatcaaatgtcagtccttgacatttggggggaacagcaggtgccagagctaaaaggtacctttgtctgccattgatccagctcagaacgattggaaataaatttgaaatgtaaccgagca

SEQ ID NO: 35531 - DNA, 1083 bp, Homo sapiens
atctccgggccagagcccctcccctcggcccgcgcgggaggagtgtgacccaggtgccgcttcctctcgccgccgagggtcaggagcccgggagcgcgaccctcccccggcccggcctggcccggcctggccagtccccgcggtctctgcccgggctgacgcccaggaatgtggtcgacgagaagccccaacagcacggcgtggcctctcagcctcgagcctgatccggggatggcctctgcctccaccacaatgcatactaccaccattgcagagcctgatccagggatgtctggatggccggatggcagaatggagacctccacccccaccataatggacattgtcgtcattgcaggtgtgattgctgctgtggccatcgtcctagtctccctcctcttcgtcatgctgcgctacatgtaccggcacaagggcacgtaccacaccaatgaggccaagggcacggagtttgctgagagtgcagatgcagccctgcagggagaccctgccctccaagatgctggtgatagcagcagaaaggagtactttatttgagggacaacagacttcacttccctgaatgcctcccccatctccatcaggaaaaatacaccccatcgcccagcacccctgctgataccaccagacagagagagagagcacttgattcttcccgagatagccacctggaaacactaggtgcctgcccagggaggaacggaggaggactcgcgctacaagaggccactcccagggacccagggaggcgatggccaccccagaggccaccttttgctccacggaggtgggagaaaatctgggcacatggggccccctgggcagtgcaggacaacatcagctcactggcaggaaagtccttgttgagggtgagggggtgctggggtacccgggggctggggaagcaaggaaataagtcatctgtatgctgactggggataatggcatcaaatgtcagtccttgacatttggggggaacagcaggtgccagagctaaaaggtacctttgtctgccattgatccagctcagaacgattggaaataaatttgaaatgtaaccgagca

SEQ ID NO: 35532 - DNA, 1027 bp, Homo sapiens
ccagcatgttacggaggcgatacgctgggtttgtcattccattccacggggcgggcgttttccttgttctgttccatgtccccgcggtctctgcccgggctgacgcccaggaatgtggtcgacgagaagccccaacagcacggcgtggcctctcagcctcgagcctgatccggggatggcctctgcctccaccacaatgcatactaccaccattgcagagcctgatccagggatgtctggatggccggatggcagaatggagacctccacccccaccataatggacattgtcgtcattgcaggtgtgattgctgctgtggccatcgtcctagtctccctcctcttcgtcatgctgcgctacatgtaccggcacaagggcacgtaccacaccaatgaggccaagggcacggagtttgctgagagtgcagatgcagccctgcagggagaccctgccctccaagatgctggtgatagcagcagaaaggagtactttatttgagggacaacagacttcacttccctgaatgcctcccccatctccatcaggaaaaatacaccccatcgcccagcacccctgctgataccaccagacagagagagagagcacttgattcttcccgagatagccacctggaaacactaggtgcctgcccagggaggaacggaggaggactcgcgctacaagaggccactcccagggacccagggaggcgatggccaccccagaggccaccttttgctccacggaggtgggagaaaatctgggcacatggggccccctgggcagtgcaggacaacatcagctcactggcaggaaagtccttgttgagggtgagggggtgctggggtacccgggggctggggaagcaaggaaataagtcatctgtatgctgactggggataatggcatcaaatgtcagtccttgacatttggggggaacagcaggtgccagagctaaaaggtacctttgtctgccattgatccagctcagaacgattggaaataaatttgaaatgtaaccgagca

SEQ ID NO: 35533 - DNA, 829 bp, Homo sapiens
cctctcaagcgtttcagggtgtgtaggtgggttccatttacagtgaactggtacagttcctgatcagcgggtgaagcaatctcataaatgttcatgtcattcaggtgtgattgctgctgtggccatcgtcctagtctccctcctcttcgtcatgctgcgctacatgtaccggcacaagggcacgtaccacaccaatgaggccaagggcacggagtttgctgagagtgcagatgcagccctgcagggagaccctgccctccaagatgctggtgatagcagcagaaaggagtactttatttgagggacaacagacttcacttccctgaatgcctcccccatctccatcaggaaaaatacaccccatcgcccagcacccctgctgataccaccagacagagagagagagcacttgattcttcccgagatagccacctggaaacactaggtgcctgcccagggaggaacggaggaggactcgcgctacaagaggccactcccagggacccagggaggcgatggccaccccagaggccaccttttgctccacggaggtgggagaaaatctgggcacatggggccccctgggcagtgcaggacaacatcagctcactggcaggaaagtccttgttgagggtgagggggtgctggggtacccgggggctggggaagcaaggaaataagtcatctgtatgctgactggggataatggcatcaaatgtcagtccttgacatttggggggaacagcaggtgccagagctaaaaggtacctttgtctgccattgatccagctcagaacgattggaaataaatttgaaatgtaaccgagca

SEQ ID NO: 35534 - DNA, 1536 bp, Homo sapiens
atctccgggccagagcccctcccctcggcccgcgcgggaggagtgtgacccaggtgccgcttcctctcgccgccgagggtcaggagcccgggagcgcgaccctcccccggcccggcctggcccggcctggccagtccccgcggtctctgcccgggctgacgcccaggaatgtggtcgacgagaagccccaacagcacggcgtggcctctcagcctcgagcctgatccggggatggcctctgcctccaccacaatgcatactaccaccattgcagagcctgatccagggatgtctggatggccggatggcagaatggagacctccacccccaccataatggacattgtcgtcattgcaggtgtgattgctgctgtggccatcgtcctagtctccctcctcttcgtcatgctgcgctacatgtaccggcacaagggcacgtaccacaccaatgaggccaagggcacggagtttgctgagagtgcagatgcagccctgcagggagaccctgccctccaagatgctggtgatagcagcagaaaggagtactttatttgagggacaacagacttcacttccctgaatgcctcccccatctccatcaggaaaaatacaccccatcgcccagcacccctgctgataccaccagacagagagagagagcacttgattcttcccgagatagccacctggaaacactaggtgcctgcccagggaggaacggaggaggactcgcgctacaagaggccactcccagggacccagggaggcgatggccaccccagaggccaccttttgctccacggaggtgggagaaaatctgggcacatggggccccctgggcagtgcaggacaacatcagctcactggcaggaaagtccttgttgagggtgagggggtgctggggtacccgggggctggggaagcaaggaaataagtcatctgtatgctgactggggataatggcatcaaatgtcagtccttgacatttggggggaacagcaggtgccagagctaaaaggtacctttgtctgccattgatccagctcagaacgattggaaataaatttgaaatgtaaccgagcactaatcgtatacagacaataaggactatcgaatgaccacatttataagttgctaatgaaaagagagctgagcagggtagcacaagctgtaagacatgacactgtgagaaagagttaggtgcaagtgtaaaagatgtaggatgcatcagacacagtgatttgaggcactgtcatgatgaaacacgctgtgacctacatacaacagttgagtcaggacaagcttgcatgaacagtggtacagacagcttgcgtaaactgacgctttaggccgttgagttcgtacttgcatggccacagaaatatgagctatataaccatacctgaggctacagagtgctcttaggttgaacaagaaaatgttttctgaggcaaccgaatgatatattggaagctcaaaatctgtttgtttaccactggaagagatccatggttcctaaacatgccaactcaaagg

SEQ ID NO: 35535 - DNA, 980 bp, Homo sapiens
atctccgggccagagcccctcccctcggcccgcgcgggaggagtgtgacccaggtgccgcttcctctcgccgccgagggtcaggagcccgggagcgcgaccctcccccggcccggcctggcccggcctggccagtccccgcggtctctgcccgggctgacgcccaggaatgtggtcgacgagaagccccaacagcacggcgtggcctctcagcctcgagcctgatccggggatggcctctgcctccaccacaatgcatactaccaccattgcagagcctgatccagggatgtctggatggccggatggcagaatggagacctccacccccaccataatggacattgtcgtcattgcaggtgtgattgctgctgtggccatcgtcctagtctccctcctcttcgtcatgctgcgctacatgtaccggcacaagggcacgtaccacaccaatgaggccaagggcacggagtttgctgagagtgcagatgcagccctgcagggagaccctgccctccaagatgctggtgatagcagcagaaaggagtactttatttgagggacaacagacttcacttccctgaatgcctcccccatctccatcaggaaaaatacaccccatcgcccagcacccctgctgataccaccagacagagagagagagcacttgattcttcccgagatagccaccttttgctccacggaggtgggagaaaatctgggcacatggggccccctgggcagtgcaggacaacatcagctcactggcaggaaagtccttgttgagggtgagggggtgctggggtacccgggggctggggaagcaaggaaataagtcatctgtatgctgactggggataatggcatcaaatgtcagtccttgacatttggggggaacagcaggtgccagagctaaaaggtacctttgtctgccattgatccagctcagaacgattggaaataaatttgaaatgtaaccgagca

SEQ ID NO: 35536 - DNA, 939 bp, Homo sapiens
atctccgggccagagcccctcccctcggcccgcgcgggaggagtgtgacccaggtgccgcttcctctcgccgccgagggtcaggagcccgggagcgcgaccctcccccggcccggcctggcccggcctggccagtccccgcggtctctgcccgggctgacgcccaggaatgtggtcgacgagaagccccaacagcacggcgtggcctctcagcctcgagcctgatccggggatggcctctgcctccaccacaatgcatactaccaccattgcagagcctgatccagggatgtctggatggccggatggcagaatggagacctccacccccaccataatggacattgtcgtcattgcaggtgtgattgctgctgtggccatcgtcctagtctccctcctcttcgtcatgctgcgctacatgtaccggcacaagggcacgtaccacaccaatgaggccaagggcacggagtttgctgagagtgcagatgcagccctgcagggagaccctgccctccaagatgctggtgatagcagcagaaaggagtactttatttgagggacaacagacttcacttccctgaatgcctcccccatctccatcaggaaaacagggacccagggaggcgatggccaccccagaggccaccttttgctccacggaggtgggagaaaatctgggcacatggggccccctgggcagtgcaggacaacatcagctcactggcaggaaagtccttgttgagggtgagggggtgctggggtacccgggggctggggaagcaaggaaataagtcatctgtatgctgactggggataatggcatcaaatgtcagtccttgacatttggggggaacagcaggtgccagagctaaaaggtacctttgtctgccattgatccagctcagaacgattggaaataaatttgaaatgtaaccgagca

SEQ ID NO: 35537 - DNA, 968 bp, Homo sapiens
agcagagaaagggaggaacggaggaggactcgcgctacaagaggccactcccagggacccagggaggcgatggccaccccagaggccaccttttgctccacggaggtgggagaaaatctgggcacatggggctgacgcccaggaatgtggtcgacgagaagccccaacagcacggcgtggcctctcagcctcgagcctgatccggggatggcctctgcctccaccacaatgcatactaccaccattgcagagcctgatccagggatgtctggatggccggatggcagaatggagacctccacccccaccataatggacattgtcgtcattgcaggtgtgattgctgctgtggccatcgtcctagtctccctcctcttcgtcatgctgcgctacatgtaccggcacaagggcacgtaccacaccaatgaggccaagggcacggagtttgctgagagtgcagatgcagccctgcagggagaccctgccctccaagatgctggtgatagcagcagaaaggagtactttatttgagggacaacagacttcacttccctgaatgcctcccccatctccatcaggaaaaatacaccccatcgcccagcacccctgctgataccaccagacagagagagagagcacttgattcttcccgagatagccacctggaaacactaggtgcctgcccagggaggaacggaggaggactcgcgctacaagaggccactccgtgcaggacaacatcagctcactggcaggaaagtccttgttgagggtgagggggtgctggggtacccgggggctggggaagcaaggaaataagtcatctgtatgctgactggggataatggcatcaaatgtcagtccttgacatttggggggaacagcaggtgccagagctaaaaggtacctttgtctgccattgatccagctcagaacgattggaaataaatttgaaatgtaaccgagca

SEQ ID NO: 35538 - DNA, 820 bp, Homo sapiens
atctccgggccagagcccctcccctcggcccgcgcgggaggagtgtgacccaggtgccgcttcctctcgccgccgagggtcaggagcccgggagcgcgaccctcccccggcccggcctggcccggcctggccagtccccgcggtctctgcccgggctgacgcccaggaatgtggtcgacgagaagccccaacagcacggcgtggcctctcagcctcgagcctgatccggggatggcctctgcctccaccacaatgcatactaccaccattgcagagcctgatccagggatgtctggatggccggatggcagaatggagacctccacccccaccataatggacattgtcgtcattgcaggtgtgattgctgctgtggccatcgtcctagtctccctcctcttcgtcatgctgcgctacatgtaccggcacaagggcacgtaccacaccaatgaggccaagggcacggagtttgctgagagtgcagatgcagccctgcagggagaccctgccctccaagatgctggtgatagcagcagaaaggagtactttatttgagggacaacagacttcacttccctgaatgcctcccccatctccatcaggaaaagaaagtccttgttgagggtgagggggtgctggggtacccgggggctggggaagcaaggaaataagtcatctgtatgctgactggggataatggcatcaaatgtcagtccttgacatttggggggaacagcaggtgccagagctaaaaggtacctttgtctgccattgatccagctcagaacgattggaaataaatttgaaatgtaaccgagca

SEQ ID NO: 35539 - DNA, 726 bp, Homo sapiens
cctctcaagcgtttcagggtgtgtaggtgggttccatttacagtgaactggtacagttcctgatcagcgggtgaagcaatctcataaatgttcatgtcattcaggtgtgattgctgctgtggccatcgtcctagtctccctcctcttcgtcatgctgcgctacatgtaccggcacaagggcacgtaccacaccaatgaggccaagggcacggagtttgctgagagtgcagatgcagccctgcagggagaccctgccctccaagatgctggtgatagcagcagaaaggagtactttatttgagggacaacagacttcacttccctgaatgcctcccccatctccatcaggaaaaatacaccccatcgcccagcacccctgctgataccaccagacagagagagagagcacttgattcttcccgagatagccaccttttgctccacggaggtgggagaaaatctgggcacatggggccccctgggcagtgcaggacaacatcagctcactggcaggaaagtccttgttgagggtgagggggtgctggggtacccgggggctggggaagcaaggaaataagtcatctgtatgctgactggggataatggcatcaaatgtcagtccttgacatttggggggaacagcaggtgccagagctaaaaggtacctttgtctgccattgatccagctcagaacgattggaaataaatttgaaatgtaaccgagca

SEQ ID NO: 35540 - DNA, 699 bp, Homo sapiens
  misc_feature (450)..(450): n is a, c, g, or t
ccagcatgttacggaggcgatacgctgggtttgtcattccattccacggggcgggcgttttccttgttctgttccatgtccccgcggtctctgcccgggctgacgcccaggaatgtggtcgacgagaagccccaacagcacggcgtggcctctcagcctcgttccctgaatgcctcccccatctccatcaggaaaaatacaccccatcgcccagcacccctgctgataccaccagacagagagagagagcacttgattcttcccgagatagccacctggaaacactaggtgcctgcccagggaggaacggaggaggactcgcgctacaagaggccactcccagggacccagggaggcgatggccaccccagaggccaccttttgctccacggaggtgggagaaaatctgggcacatggggccccctgggcaaggttgcaggacaacatcnagctcactgtgcaggacaacatcagctcactggcaggaaagtccttgttgagggtgagggggtgctggggtacccgggggctggggaagcaaggaaataagtcatctgtatgctgactggggataatggcatcaaatgtcagtccttgacatttggggggaacagcaggtgccagagctaaaaggtacctttgtctgccattgatccagctcagaacgattggaaataaatttgaaatgtaaccgagca

SEQ ID NO: 35541 - DNA, 696 bp, Homo sapiens
tgggtttccggccgaggctgcggccatggcagcatcttccctgacggtcaccttagggcggctggcgtccgcgtgcagccacagcatcctgagaccttcggggcccggagcagcctccctttggtctgcttctcgaaggttcaattcacagagcacttcatatctaccaggatatgttcctaaaacatccctgagttcaccaccttggccagaagttgttctgccagacccagttgaggagaccagacaccatgcagaggtcgtgaagaaggtgaatgagatgatcgtcacggggcagtatggcaggctctttgccgtggtgcactttgccagccgccagtggaaggtgacctctgaagacctgatcttaattggaaatgaactagaccttgcgtgtggagagagaattcgactggagaaggtcctgctggttggggcagacaacttcacgctgcttggcaagccactcctcggaaaggatcttgttcgagtagaagccacagtcattgaaaagacagaatcatggccaagaatcattatgagattcaggaaaaggaaaaacttcaagaagaaaagaatcgtcacgaccccgcagactgtcctccggataaacagcattgagattgctccgtgtttgttgtgattaccgagttaatacttacaaaaggataaaaataaactcctgcttcccaagga

SEQ ID NO: 35542 - DNA, 788 bp, Homo sapiens
tgggtttccggccgaggctgcggccatggcagcatcttccctgacggtcaccttagggcggctggcgtccgcgtgcagccacagcatcctgagaccttcggggcccggagcagcctccctttggtctgcttctcgaaggttcaattcacagagcacttcatatctaccaggatatgttcctaaaacatccctgagttcaccaccttggccagaagttgttctgccagacccagttgaggagaccagacaccatgcagaggtcgtgaagaaggtgaatgagatgatcgtcacggggcagtatggcaggctctttgccgtggtgcactttgccagccgccagtggaaggtgacctctgaagacctgatcttaattggaaatgaactagaccttgcgtgtggagagagaattcgactggagaaggtcctgctggttggggcagacaacttcacgctgcttggcaagccactcctcggaaaggatcttgttcgagtagaagccacagtcattgaaaagacagaatcatggccaagaatcattatgagattcaggaaaaggaaaaacttcaagaagaaaagaatcgtcacgaccccgcagactgtcctccggataaacagcattgagattgctccgtgtttgttgtgattaccgagttaatacttacaaaaggataaaaataaactcctgcttcccaaggaaaaaaaaaaaaaaaaaattgggggcggggaaatttaaaaattgggggggggccaggaatgaaggaggtaaaacggggaagggggtccaaaag

SEQ ID NO: 35543 - DNA, 1006 bp, Homo sapiens
tgggtttccggccgaggctgcggccatggcagcatcttccctgacggtcaccttagggcggctggcgtccgcgtgcagccacagcatcctgagaccttcggggcccggagcagcctccctttggtctgcttctcgaaggttcaattcacagagcacttcatatctaccaggatatgttcctaaaacatccctgagttcaccaccttggccagaagttgttctgccagacccagttgaggagaccagacaccatgcagaggtcgtgaagaaggtgaatgagatgatcgtcacggggcagtatggcaggctctttgccgtggtgcactttgccagccgccagtggaaggtgacctctgaagacctgatcttaattggaaatgaactagaccttgcgtgtggagagagaattcgactggagaaggtcctgctggttggggcagacaacttcacgctgcttggcaagccactcctcggaaaggatcttgttcgagtagaagccacagtcattgaaaagacagaatcatggccaagaatcattatgagattcaggaaaaggaaaaacttcaagaagaaaagaatcgtcacgaccccgcagactgtcctccggataaacagcattgagattgctccgtgtttgttgtgattaccgagttaatacttacaaaaggataaaaataaactcctgcttcccaaggagaaaaaaaaaaaaaaaaaaaaaaaaaaaaaaaaaaaaaaaaaaaaaacaaagaaaaaaagacaaagcaaagaaaaagaggaggagactaaaagacccaggggagccaaagagagaagagagagagggaagaggaggcacagaaggaagaaaaaaaacaaagagggagaacaccataaaacagacagaggaaaacaaaacagggaactaggaagagaacacaaagagaagcaaaggagaaaaacaaagaaaacgcgagaaaaaaggagaaaaagcgaaaacaaaaaaaaaggagacacgagaagaaaaacg

SEQ ID NO: 35544 - DNA, 663 bp, Homo sapiens
tgggtttccggccgaggctgcggccatggcagcatcttccctgacggtcaccttagggcggctggcgtccgcgtgcagccacagcatcctgagaccttcggggcccggagcagcctccctttggtctgcttctcgaagatatgttcctaaaacatccctgagttcaccaccttggccagaagttgttctgccagacccagttgaggagaccagacaccatgcagaggtcgtgaagaaggtgaatgagatgatcgtcacggggcagtatggcaggctctttgccgtggtgcactttgccagccgccagtggaaggtgacctctgaagacctgatcttaattggaaatgaactagaccttgcgtgtggagagagaattcgactggagaaggtcctgctggttggggcagacaacttcacgctgcttggcaagccactcctcggaaaggatcttgttcgagtagaagccacagtcattgaaaagacagaatcatggccaagaatcattatgagattcaggaaaaggaaaaacttcaagaagaaaagaatcgtcacgaccccgcagactgtcctccggataaacagcattgagattgctccgtgtttgttgtgattaccgagttaatacttacaaaaggataaaaataaactcctgcttcccaagga

SEQ ID NO: 35545 - DNA, 357 bp, Homo sapiens
ccagcgcagggcactcctggccatgaggcgtctggtgtcccagcctctgcacctgccaacagagtgaacgaacaagctagcgaggcagtcagtgcacacctggagataaacacggccatgtgcagcaggggacgttgccggggtcgcgctggctggggagggctgtgtgcagagcccctgctgtaactgatgacaacagtcagggtctgtggtcaagcctgtgacatcctttctttcagtcgtcacgaccccgcagactgtcctccggataaacagcattgagattgctccgtgtttgttgtgattaccgagttaatacttacaaaaggataaaaataaactcctgcttcccaagga

SEQ ID NO: 35546 - DNA, 234 bp, Homo sapiens
gcggccgcctactactactactactgctcgaattcaagcttctaacgatgtacgggaatcatggccaagaatcattatgagattcaggaaaaggaaaaacttcaagaagaaaagaatcgtcacgaccccgcagactgtcctccggataaacagcattgagattgctccgtgtttgttgtgattaccgagttaatacttacaaaaggataaaaataaactcctgcttcccaagga

SEQ ID NO: 35547 - DNA, 642 bp, Homo sapiens
tgggtttccggccgaggctgcggccatggcagcatcttccctgacggtcaccttagggcggctggcgtccgcgtgcagccacagcatcctgagaccttcggggcccggagcagcctccctttggtctgcttctcgaaggttcaattcacagagcacttcatatctaccaggatatgttcctgaggagaccagacaccatgcagaggtcgtgaagaaggtgaatgagatgatcgtcacggggcagtatggcaggctctttgccgtggtgcactttgccagccgccagtggaaggtgacctctgaagacctgatcttaattggaaatgaactagaccttgcgtgtggagagagaattcgactggagaaggtcctgctggttggggcagacaacttcacgctgcttggcaagccactcctcggaaaggatcttgttcgagtagaagccacagtcattgaaaagacagaatcatggccaagaatcattatgagattcaggaaaaggaaaaacttcaagaagaaaagaatcgtcacgaccccgcagactgtcctccggataaacagcattgagattgctccgtgtttgttgtgattaccgagttaatacttacaaaaggataaaaataaactcctgcttcccaagga

SEQ ID NO: 35548 - DNA, 792 bp, Homo sapiens
gacaccacaagcccagccttcttggatgggcacccttccagcactgagaagtacccaagtgagggctcttttgcagaacaatgagagttcctgctttgattattgaatgatgagccattgttccctgtggttctaaaaggatacagggagcctgtcctcggggttaccccagaggggcggggcctgtccgaaagagcgagccttttgttgccggggatcccttcctaacatttgtgtgtggccatttcttagaggatttgagctgccttttcaggtgcttgtgacatttgtctacgaaatgtgttttacagatatgttcctatatgttcctgaggagaccagacaccatgcagaggtcgtgaagaaggtgaatgagatgatcgtcacggggcagtatggcaggctctttgccgtggtgcactttgccagccgccagtggaaggtgacctctgaagacctgatcttaattggaaatgaactagaccttgcgtgtggagagagaattcgactggagaaggtcctgctggttggggcagacaacttcacgctgcttggcaagccactcctcggaaaggatcttgttcgagtagaagccacagtcattgaaaagacagaatcatggccaagaatcattatgagattcaggaaaaggaaaaacttcaagaagaaaagaatcgtcacgaccccgcagactgtcctccggataaacagcattgagattgctccgtgtttgttgtgattaccgagttaatacttacaaaaggataaaaataaactcctgcttcccaagga

SEQ ID NO: 35549 - DNA, 671 bp, Homo sapiens
gataagcaggccaggcaggctccagtctcccagcgaagcaagaaggtccaggtatgccagcatacctggacttctgggcccggagcagcctccctttggtctgcttctcgaaggttcaattcacagagcacttcatatctaccaggatatgttcctaaaacatccctgagttcaccaccttggccagaagttgttctgccagacccagttgaggagaccagacaccatgcagaggtcgtgaagaaggtgaatgagatgatcgtcacggggcagtatggcaggctctttgccgtggtgcactttgccagccgccagtggaaggtgacctctgaagacctgatcttaattggaaatgaactagaccttgcgtgtggagagagaattcgactggagaaggtcctgctggttggggcagacaacttcacgctgcttggcaagccactcctcggaaaggatcttgttcgagtagaagccacagtcattgaaaagacagaatcatggccaagaatcattatgagattcaggaaaaggaaaaacttcaagaagaaaagaatcgtcacgaccccgcagactgtcctccggataaacagcattgagattgctccgtgtttgttgtgattaccgagttaatacttacaaaaggataaaaataaactcctgcttcccaagga

SEQ ID NO: 35550 - DNA, 599 bp, Homo sapiens
ctctttctgcttcatcttcttcagaaggtccaggtatgccggttcaattcacagagcacttcatatctaccaggatatgttcctaaaacatccctgagttcaccaccttggccagaagttgttctgccagacccagttgaggagaccagacaccatgcagaggtcgtgaagaaggtgaatgagatgatcgtcacggggcagtatggcaggctctttgccgtggtgcactttgccagccgccagtggaaggtgacctctgaagacctgatcttaattggaaatgaactagaccttgcgtgtggagagagaattcgactggagaaggtcctgctggttggggcagacaacttcacgctgcttggcaagccactcctcggaaaggatcttgttcgagtagaagccacagtcattgaaaagacagaatcatggccaagaatcattatgagattcaggaaaaggaaaaacttcaagaagaaaagaatcgtcacgaccccgcagactgtcctccggataaacagcattgagattgctccgtgtttgttgtgattaccgagttaatacttacaaaaggataaaaataaactcctgcttcccaagga

SEQ ID NO: 35551 - DNA, 777 bp, Homo sapiens
tgggtttccggccgaggctgcggccatggcagcatcttccctgacggtcaccttagggcggctggcgtccgcgtgcagccacagcatcctgagaccttcggggcccggagcagcctccctttggtctgcttctcgaaggttcaattcacagagcacttcatatctaccaggatatgttcctaaaacatccctgagttcaccaccttggccagaagttgttctgccagacccagttgaggagaccagacaccatgcagaggtcgtgaagaaggtgaatgagatgatcgtcacggggcagtatggcaggctctttgccgtggtgcactttgccagccgccagtggaaggtgacctctgaagacctgatcttaattggaaatgaactagaccttgcgtgtggagagagaattcgactggagaaggtcctgctggttggggcagacaacttcacgctgcttggcaagccactcctcgggtaatggctgtgaagtgctgggctttgtctggggctccagggctggacatgcagacagtggtcacagtgcaattaggccagaaaggatcttgttcgagtagaagccacagtcattgaaaagacagaatcatggccaagaatcattatgagattcaggaaaaggaaaaacttcaagaagaaaagaatcgtcacgaccccgcagactgtcctccggataaacagcattgagattgctccgtgtttgttgtgattaccgagttaatacttacaaaaggataaaaataaactcctgcttcccaagga

SEQ ID NO: 35552 - DNA, 679 bp, Homo sapiens
tgactcaggaatcggctctggaaggtgaagctagaggaaccagacctcatcagcccaacatcaaagacaccatcggaacagcagcgcccgcagcacccaccccgcaccggcgactccatcttcatggccaccccctgcggcggacggttgaccaccagccaccacatcaccacagcatcctgagaccttcggggcccggagcagcctccctttggtctgcttctcgaaggttcaattcacagagcacttcatatctaccaggatatgttcctaaaacatccctgagttcaccaccttggccagaagttgttctgccagacccagttgaggtgacctctgaagacctgatcttaattggaaatgaactagaccttgcgtgtggagagagaattcgactggagaaggtcctgctggttggggcagacaacttcacgctgcttggcaagccactcctcggaaaggatcttgttcgagtagaagccacagtcattgaaaagacagaatcatggccaagaatcattatgagattcaggaaaaggaaaaacttcaagaagaaaagaatcgtcacgaccccgcagactgtcctccggataaacagcattgagattgctccgtgtttgttgtgattaccgagttaatacttacaaaaggataaaaataaactcctgcttcccaagga

SEQ ID NO: 35553 - DNA, 399 bp, Homo sapiens
ggcgcttgtagatgatgtggctaactgatctcaacacatataaccagtagctgtaagtgacgttcttgtagttttgctcacctaggtgtttctgtgggcaggctgtcatgcagtggttcataccatgtaccaggagcagcagctgtgcatttagcatcataaagggcagtttgcatttgtagtattaatggtaatgatctgtgtttctcttcttccctcagcctccctttggtctgcttctcgaaggttcaattcacagagcacttcatatctaccaggtaatatcaaaatgtgggttttggtgcctcttttcctttcatttgtagaaccatctttctaaagtcaaaacttcctaccttttggttctcaataatatttaaatttcctcttttgttttta

SEQ ID NO: 35554 - DNA, 1540 bp, Homo sapiens
aattatatatttttactctatgtttctctacatgtttttttctttccgggctggcggaagaggcacgtgcgctgctgaatggagctggtcgctggttgctacgagcaggtcctctttgggttcgctgtacacccggagcccgaggcttgcggcgaccacgagcaatggactcttgtggctgacttcactcaccatgctcacactgcctccttgtcagcagtagctgtaaatagtcgttttgtggtcactgggagcaaagatgaaacaattcacatttatgacatgaaaaagaagattgagcatggggctctagtgcatcacagtggtacaataacttgcctgaaattctatggcaacaggcatttaatcagtggagcggaagatggactcatctgtatctgggatgcaaagaaatgggaatgcctgaagtcaattaaagctcacaaaggacaggtgaccttcctttctattcacccatctggcaagttggccctgtcggttggtacagataaaactttaagaacgtggaatcttgtagaaggaagatcagcattcataaaaaatataaaacaaaatgctcacatagtagaatggtccccaagaggagagcagtatgtagttatcatacagaataaaatagacatctatcagcttgacactgcatccattagtggcaccatcacaaatgaaaagagaatttcctctgttaaatttctttcagagtctgtccttgcagtggctggagatgaagaagttataaggttttttgactgtgattcactagtgtgcctctgcgaatttaaagctcatgaaaacagggtaaaggacatgttcagttttgaaattccagagcatcatgttattgtttcagcatcgagtgatggtttcatcaaaatgtggaagcttaagcaggataagaaagttcccccatctttactctgtgaaataaacactaatgccaggctgacgtgtcttggagtgtggctagacaaagtggcagacatgaaagaaagccttcctccagctgcagagccttctcctgtaagtaaagaacagtccaaaattggcaaaaaggagcctggtgacacagtgcacaaagaagaaaagcggtcaaaacctaacacaaagaaacgcggtttaacaggtgacagtaagaaagcaacaaaagaaagtggcctgatatcaaccaagaagaggaaaatggtagaaatgttggaaaagaagaggaaaaagaagaaaataaaaacaatgcagtgaatcacagatgtctcctgaaagaactcttttagatgaaatcattctactcaaatgtaccttaattttttttttttccctgagtaaaagcaagaaatttcttcctttggaaaaaatatatatattaaaaaaccacttttagatggttttttttaaaaaaaaaaaaaaaactggtaaaattacttttggcagacagtgttttatgaattatgtatcatgttgatatataatatgttaatgtgtcatgtaatttttactttgtacaaagcaaataaagatctttctc

SEQ ID NO: 35555 - DNA, 859 bp, Homo sapiens
aaaggcaggcaaaagctaaggtcgaagccgggtgtaaatcggccgaggtgagcatggggctctagtgcatcacagtggtacaataacttgcctgaaattctatggcaacaggcatttaatcagtggagcggaagatggactcatctgtatctgggatgcaaagaaatgggaatgcctgaagtcaattaaagctcacaaaggacaggtgaccttcctttctattcacccatctggcaagttggccctgtcggttggtacagataaaactttaagaacgtggaatcttgtagaaggaagatcagcattcataaaaaatataaaacaaaatgctcacatagtagaatggtccccaagaggagagcagtatgtagttatcatacagaataaaatagacatctatcagcttgacactgcatccattagtggcaccatcacaaatgaaaagagaatttcctctgttaaatttctttcagagtctgtccttgcagtggctggagatgaagaagttataaggttttttgactgtgattcactagtgtgcctctgcgaatttaaagctcatgaaaacagggtaaaggacatgttcagttttgaaattccagagcatcatgttattgtttcagcatcgagtgatggtttcatcaaaatgtggaagcttaagcaggataagaaagtttccccccatctttactctggtgaataaaccactaaatggcaggtgaacgtgttgttgggaggtgggctagacaaagggggcgaacttgtaagaaaagacttcctcccacaggaaaagccagttcccgggtagataaaaaacgtcccaatggcgaaaagggccggcggcacaggccaaaaaaag

SEQ ID NO: 35556 - DNA, 638 bp, Homo sapiens
caacattggttgtttcttggcagctgcagatttcacaagaatgagattaaatggctttttacatcctgtatttggaaagagaataggaggatttacaggaagttatgctcagttccaatccagttaaacagtacttaaattgtagcaggacaagccgcagacaaaacccctcagccagcgagtttaagaaagaagggctttattcggccgggatcttcggcaagactcacgtctccaacaaccaagctccccaaagacggggtttcaccatgtttggccagggatggtctcgatctcttgatctcgtcaaaagtgcttgggattacaaggcatgcgtgagccactgcgtctggccattttattttattttttgagacagagtcctgacctcaagcaatccgcctgcctaggcctcgcaaagtgctgggattacaggagtgagccaccgtgcccagccaagaaagattttggaagagtgaatgaatacaaggatttccactagactgagaattagtttgtcaacagcatttcagtgtcttgagaagtgtttacatttggcgtggacaaagctggcagatgacgtagaaagtaaaaagttgcctcttcaaagtttcccttcttgttaaagaataaatcat

SEQ ID NO: 35557 - DNA, 1621 bp, Homo sapiens
gctggcaccttcctgagatatgcctgcttgcccccgatttttttctccttgcagtgagaacctcctcatgtggcatctttacttattctcttcttggaaaatccatgtgacctccccgcgcttaaagtgtttccacgttacaggcgacttaaaggcagccctggagcctgacgtataattcgagcgccgatgcagaaaggagtcaggtgtttttttttttttttttttggtttccggttctgtcacctccaggctgagccgggctggcggaagaggcacgtgcgctgctgaatggagctggtcgctggttgctacgagcaggtcctctttgggttcgctgtacacccggagcccgaggcttgcggcgaccacgagcaatggactcttgtggctgacttcactcaccatgctcacactgcctccttgtcagcagtagctgtaaatagtcgttttgtggtcactgggagcaaagatgaaacaattcacatttatgacatgaaaaagaagattgagcatggggctctagtgcatcacagtggtacaataacttgcctgaaattctatggcaacaggcatttaatcagtggagcggaagatggactcatctgtatctgggatgcaaagaaatgggaatgcctgaagtcaattaaagctcacaaaggacaggtgaccttcctttctattcacccatctggcaagttggccctgtcggttggtacagataaaactttaagaacgtggaatcttgtagaaggaagatcagcattcataaaaaatataaaacaaaatgctcacatagtagaatggtccccaagaggagagcagtatgtagttatcatacagaataaaatagacatctatcagcttgacactgcatccattagtggcaccatcacaaatgaaaagagaatttcctctgttaaatttctttcagagtctgtccttgcagtggctggagatgaagaagttataaggttttttgactgtgattcactagtgtgcctctgcgaatttaaagctcatgaaaacagggtaaaggacatgttcagttttgaaattccagagcatcatgttattgtttcagcatcgagtgatggtttcatcaaaatgtggaagcttaagcaggataagaaagttcccccatctttactctgtgaaataaacactaatgccaggctgacgtgtcttggagtgtggctagacaaagtggcagacatgaaagaaagccttcctccagctgcagagccttctcctgtaagtaaagaacagtccaaaattggcaaaaaggagcctggtgacacagtgcacaaagaagaaaagcggtcaaaacctaacacaaagaaacgcggtttaacaggtgacagtaagaaagcaacaaaagaaagtggcctgatatcaaccaagaagaggaaaatggtagaaatgttggaaaagaagaggaaaaagaagaaaataaaaacaatgcagtgaatcacagatgtctcctgaaagaactcttttagatgaaatcattctactcaaatgtaccttaattttttttttttccctgagtaaaagcaagaaatttcttcctttggaaaaaatatatatattaaaaaaccacttttagatggtttttttt

SEQ ID NO: 35558 - DNA, 1810 bp, Homo sapiens
gctggcaccttcctgagatatgcctgcttgcccccgatttttttctccttgcagtgagaacctcctcatgtggcatctttacttattctcttcttggaaaatccatgtgacctccccgcgcttaaagtgtttccacgttacaggcgacttaaaggcagccctggagcctgacgtataattcgagcgccgatgcagaaaggagtcaggtgtttttttttttttttttttggtttccggttctgtcacctccaggctgagccgggctggcggaagaggcacgtgcgctgctgaatggagctggtcgctggttgctacgagcaggtcctctttgggttcgctgtacacccggagcccgaggcttgcggcgaccacgagcaatggactcttgtggctgacttcactcaccatgctcacactgcctccttgtcagcagtagctgtaaatagtcgttttgtggtcactgggagcaaagatgaaacaattcacatttatgacatgaaaaagaagattgagcatggggctctagtgcatcacagtggtacaataacttgcctgaaattctatggcaacaggcatttaatcagtggagcggaagatggactcatctgtatctgggatgcaaagaaatgggaatgcctgaagtcaattaaagctcacaaaggacaggtgaccttcctttctattcacccatctggcaagttggccctgtcggttggtacagataaaactttaagaacgtggaatcttgtagaaggaagatcagcattcataaaaaatataaaacaaaatgctcacatagtagaatggtccccaagaggagagcagtatgtagttatcatacagaataaaatagacatctatcagcttgacactgcatccattagtggcaccatcacaaatgaaaagagaatttcctctgttaaatttctttcagagtctgtccttgcagtggctggagatgaagaagttataaggttttttgactgtgattcactagtgtgcctctgcgaatttaaagctcatgaaaacagggtaaaggacatgttcagttttgaaattccagagcatcatgttattgtttcagcatcgagtgatggtttcatcaaaatgtggaagcttaagcaggataagaaagttcccccatctttactctgtgaaataaacactaatgccaggctgacgtgtcttggagtgtggctagacaaagtggcagacatgaaagaaagccttcctccagctgcagagccttctcctgtaagtaaagaacagtccaaaattggcaaaaaggagcctggtgacacagtgcacaaagaagaaaagcggtcaaaacctaacacaaagaaacgcggtttaacaggtgacagtaagaaagcaacaaaagaaagtggcctgatatcaaccaagaagaggaaaatggtagaaatgttggaaaagaagaggaaaaagaagaaaataaaaacaatgcagtgaatcacagatgtctcctgaaagaactcttttagatgaaatcattctactcaaatgtaccttaattttttttttttccctgagtaaaagcaagaaatttcttcctttggaaaaaatatatatattaaaaaaccacttttagatggttttttttaaaaaaaaaaaaaaaactggtaaaattacttttggcagacagtgttttatgaattatgtatcatgttgatatataatatgttaatgtgtcatgtaatttttactttgtacaaagcaaataaagatctttctcaaaatatactgtaaaataatataaaatattgaacacattctttatcaaaaggatgaa

SEQ ID NO: 35559 - DNA, 1629 bp, Homo sapiens
caatgaaaatccgcaatctaagacctgaaactactgccacagccatgcataaaatgaaatgctgctgctttcctctctgttaaagagaatgttcaaggccgaggacacataaaaaagagcagcattgctggctctgttatttagctgtgtgttcttgaaaaagtcacttctccagacatatctcagcatttataacctaagactgaatcactgcattttacccttaatgaggtacgcttacactaatctttttgaaacagtacttaaattgtagcaggacaagccgcagacaaaacccctcagccagcgagtttaagaaagaagggctttattcggccgggatcttcggcaagactcacgtctccaacaaccaagctccccaacaatggactcttgtggctgacttcactcaccatgctcacactgcctccttgtcagcagtagctgtaaatagtcgttttgtggtcactgggagcaaagatgaaacaattcacatttatgacatgaaaaagaagattgagcatggggctctagtgcatcacagtggtacaataacttgcctgaaattctatggcaacaggcatttaatcagtggagcggaagatggactcatctgtatctgggatgcaaagaaatgggaatgcctgaagtcaattaaagctcacaaaggacaggtgaccttcctttctattcacccatctggcaagttggccctgtcggttggtacagataaaactttaagaacgtggaatcttgtagaaggaagatcagcattcataaaaaatataaaacaaaatgctcacatagtagaatggtccccaagaggagagcagtatgtagttatcatacagaataaaatagacatctatcagcttgacactgcatccattagtggcaccatcacaaatgaaaagagaatttcctctgttaaatttctttcagagtctgtccttgcagtggctggagatgaagaagttataaggttttttgactgtgattcactagtgtgcctctgcgaatttaaagctcatgaaaacagggtaaaggacatgttcagttttgaaattccagagcatcatgttattgtttcagcatcgagtgatggtttcatcaaaatgtggaagcttaagcaggataagaaagttcccccatctttactctgtgaaataaacactaatgccaggctgacgtgtcttggagtgtggctagacaaagtggcagacatgaaagaaagccttcctccagctgcagagccttctcctgtaagtaaagaacagtccaaaattggcaaaaaggagcctggtgacacagtgcacaaagaagaaaagcggtcaaaacctaacacaaagaaacgcggtttaacaggtgacagtaagaaagcaacaaaagaaagtggcctgatatcaaccaagaagaggaaaatggtagaaatgttggaaaagaagaggaaaaagaagaaaataaaaacaatgcagtgaatcacagatgtctcctgaaagaactcttttagatgaaatcattctactcaaatgtaccttaattttttttttttccctgagtaaaagcaagaaatttcttcctttggaaaaaatatatatattaaaaaaccacttttagatggtttttttt

SEQ ID NO: 35560 - DNA, 1160 bp, Homo sapiens
aaaggcaggcaaaagctaaggtcgaagccgggtgtaaatcggccgaggtgagcatggggctctagtgcatcacagtggtacaataacttgcctgaaattctatggcaacaggcatttaatcagtggagcggaagatggactcatctgtatctgggatgcaaagaaatgggaatgcctgaagtcaattaaagctcacaaaggacaggtgaccttcctttctattcacccatctggcaagttggccctgtcggttggtacagataaaactttaagaacgtggaatcttgtagaaggaagatcagcattcataaaaaatataaaacaaaatgctcacatagtagaatggtccccaagaggagagcagtatgtagttatcatacagaataaaatagacatctatcagcttgacactgcatccattagtggcaccatcacaaatgaaaagagaatttcctctgttaaatttctttcagagtctgtccttgcagtggctggagatgaagaagttataaggttttttgactgtgattcactagtgtgcctctgcgaatttaaagctcatgaaaacagggtaaaggacatgttcagttttgaaattccagagcatcatgttattgtttcagcatcgagtgatggtttcatcaaaatgtggaagcttaagcaggataagaaagttcccccatctttactctgtgaaataaacactaatgccaggctgacgtgtcttggagtgtggctagacaaagtggcagacatgaaagaaagccttcctccagctgcagagccttctcctgtaagtaaagaacagtccaaaattggcaaaaaggagcctggtgacacagtgcacaaagaagaaaagcggtcaaaacctaacacaaagaaacgcggtttaacaggtgacagtaagaaagcaacaaaagaaagtggcctgatatcaaccaagaagaggaaaatggtagaaatgttggaaaagaagaggaaaaagaagaaaataaaaacaatgcagtgaatcacagatgtctcctgaaagaactcttttagatgaaatcattctactcaaatgtaccttaattttttttttttccctgagtaaaagcaagaaatttcttcctttggaaaaaatatatatattaaaaaaccacttttagatggtttttttt

SEQ ID NO: 35561 - DNA, 1271 bp, Homo sapiens
ggtcttgatctcctgacctcatgatccgcccgcctcagcctccgaaagtgctgggattacaggcgtgagccaccacgcccagccaacaagctccgttttcaaacatgcaattatgctgcagtcatcatagctgtgaattgaagattttagaaagggaaaccttttgaaaatacaatggatacgagatgttaaagggatatgggaatgaagcaagtcttaatcctgcctcataatatttcaaaatattgctgtaaggaagatagcaggtcttctaaatagccaatatttagtaaaatgtcacttaagtcttcattatgcttgttcttttacgcttagtaaaagttagttggtgatcacaccgtaagtgagcttcctgttttgcagaacgtggaatcttgtagaaggaagatcagcattcataaaaaatataaaacaaaatgctcacatagtagaatggtccccaagaggagagcagtatgtagttatcatacagaataaaatagacatctatcagcttgacactgcatccattagtggcaccatcacaaatgaaaagagaatttcctctgttaaatttctttcagagtctgtccttgcagtggctggagatgaagaagttataaggttttttgactgtgattcactagtgtgcctctgcgaatttaaagctcatgaaaacagggtaaaggacatgttcagttttgaaattccagagcatcatgttattgtttcagcatcgagtgatggtttcatcaaaatgtggaagcttaagcaggataagaaagttcccccatctttactctgtgaaataaacactaatgccaggctgacgtgtcttggagtgtggctagacaaagtggcagacatgaaagaaagccttcctccagctgcagagccttctcctgtaagtaaagaacagtccaaaattggcaaaaaggagcctggtgacacagtgcacaaagaagaaaagcggtcaaaacctaacacaaagaaacgcggtttaacaggtgacagtaagaaagcaacaaaagaaagtggcctgatatcaaccaagaagaggaaaatggtagaaatgttggaaaagaagaggaaaaagaagaaaataaaaacaatgcagtgaatcacagatgtctcctgaaagaactcttttagatgaaatcattctactcaaatgtaccttaattttttttttttccctgagtaaaagcaagaaatttcttcctttggaaaaaatatatatattaaaaaaccacttttagatggtttttttt

SEQ ID NO: 35562 - DNA, 634 bp, Homo sapiens
tcggacggaaaagatcttttatggtgttaatatttctatcctagggtaaaggacatgttcagttttgaaattccagagcatcatgttattgtttcagcatcgagtgatggtttcatcaaaatgtggaagcttaagcaggataagaaagttcccccatctttactctgtgaaataaacactaatgccaggctgacgtgtcttggagtgtggctagacaaagtggcagacatgaaagaaagccttcctccagctgcagagccttctcctgtaagtaaagaacagtccaaaattggcaaaaaggagcctggtgacacagtgcacaaagaagaaaagcggtcaaaacctaacacaaagaaacgcggtttaacaggtgacagtaagaaagcaacaaaagaaagtggcctgatatcaaccaagaagaggaaaatggtagaaatgttggaaaagaagaggaaaaagaagaaaataaaaacaatgcagtgaatcacagatgtctcctgaaagaactcttttagatgaaatcattctactcaaatgtaccttaattttttttttttccctgagtaaaagcaagaaatttcttcctttggaaaaaatatatatattaaaaaaccacttttagatggtttttttt

SEQ ID NO: 35563 - DNA, 1052 bp, Homo sapiens
  misc_feature (934)..(934): n is a, c, g, or t
  misc_feature (937)..(937): n is a, c, g, or t
  misc_feature (939)..(939): n is a, c, g, or t
  misc_feature (941)..(941): n is a, c, g, or t
  misc_feature (945)..(945): n is a, c, g, or t
  misc_feature (949)..(949): n is a, c, g, or t
gctggcaccttcctgagatatgcctgcttgcccccgatttttttctccttgcagtgagaacctcctcatgtggcatctttacttattctcttcttggaaaatccatgtgacctccccgcgcttaaagtgtttccacgttacaggcgacttaaaggcagccctggagcctgacgtataattcgagcgccgatgcagaaaggagtcaggtgtttttttttttttttttttggtttccggttctgtcacctccaggctgagccgggctggcggaagaggcacgtgcgctgctgaatggagctggtcgctggttgctacgagcaggtcctctttgggttcgctgtacacccggagcccgaggcttgcggcgaccacgagcaatggactcttgtggctgacttcactcaccatgctcacactgcctccttgtcagcagtagctgtaaatagtcgttttgtggtcactgggagcaaagatgaaacaattcacatttatgacatgaaaaagaagattgagcatggggctctagtgcatcacagtggtacaataacttgcctgaaattctatggcaacaggcatttaatcagtggagcggaagatggactcatctgtatctgggatgcaaagaaatgggaatgcctgaagtcaattaaagctcacaaaggacaggtgaccttcctttctattcacccatctggcaagttggccctgtcggttggtacagataaaactttaagaacgtggaatcttgtagaaggaagatcagcattcataaaaaatataaaacaaaatgctcacatagtagaatggtccccaagaggagagcagtatgtagttatcatacagaataaaatagacatctatcagcttgacactgcatccattagtggcaccatcacaaatgaaaagagaatttcctctgttaaatttctttcanagntngnctgngggntgggatgaagaagttagggggcgcggggagtcccagggcccggagtaagcctgaacaggtagacattgcgttgaccaccaccttttttccccgggttcacagg

SEQ ID NO: 35564 - DNA, 531 bp, Homo sapiens
  misc_feature (18)..(18): n is a, c, g, or t
gtcgcacccccggaaaancacgcacagtggtgcagcctagtgttggtgctgctgctgggccagtggttcctccatgtccggggaggatcagacacttcaaggtgtggctagacaaagtggcagacatgaaagaaagccttcctccagctgcagagccttctcctgtaagtaaagaacagtccaaaattggcaaaaaggagcctggtgacacagtgcacaaagaagaaaagcggtcaaaacctaacacaaagaaacgcggtttaacaggtgacagtaagaaagcaacaaaagaaagtggcctgatatcaaccaagaagaggaaaatggtagaaatgttggaaaagaagaggaaaaagaagaaaataaaaacaatgcagtgaatcacagatgtctcctgaaagaactcttttagatgaaatcattctactcaaatgtaccttaattttttttttttccctgagtaaaagcaagaaatttcttcctttggaaaaaatatatatattaaaaaaccacttttagatggtttttttt

SEQ ID NO: 35565 - DNA, 984 bp, Homo sapiens
gctggcaccttcctgagatatgcctgcttgcccccgatttttttctccttgcagtgagaacctcctcatgtggcatctttacttattctcttcttggaaaatccatgtgacctccccgcgcttaaagtgtttccacgttacaggcgacttaaaggcagccctggagcctgacgtataattcgagcgccgatgcagaaaggagtcaggtgtttttttttttttttttttggtttccggttctgtcacctccaggctgagccgggctggcggaagaggcacgtgcgctgctgaatggagctggtcgctggttgctacgagcaggtcctctttgggttcgctgtacacccggagcccgaggcttgcggcgaccacgagcaatggactcttgtggctgacttcactcaccatgctcacactgcctccttgtcagcagtagctgtaaatagtcgttttgtggtcactgggagcaaagatgaaacaattcacatttatgacatgaaaaagaagattgagcatggggctctagtgcatcacagtggtacaataacttgcctgaaattctatggcaacaggcatttaatcagtggagcggaagatggactcatctgtatctgggatgcaaagaaatgggaatgcctgaagtcaattaaagctcacaaaggacaggtgaccttcctttctattcacccatctggcaagttggccctgtcggttggtacagataaaactttaagaacgtggaatcttgtagaaggaagatcagcattcataaaaaatataaaacaaaatgctcacatagtagaatggtccccaagaggagagcagtatgtagttatcatacagaataaaatagacatctatcagcttgacactgcatccattagtggcaccatcacaaatgaaaagagaatttcctctgttaaatttctttcagagtctggccttgcaggggctggaaagaccatgaaacagggaaaggcctta

SEQ ID NO: 35566 - DNA, 1060 bp, Homo sapiens
gctggcaccttcctgagatatgcctgcttgcccccgatttttttctccttgcagtgagaacctcctcatgtggcatctttacttattctcttcttggaaaatccatgtgacctccccgcgcttaaagtgtttccacgttacaggcgacttaaaggcagccctggagcctgacgtataattcgagcgccgatgcagaaaggagtcaggtgtttttttttttttttttttggtttccggttctgtcacctccaggctgagccgggctggcggaagaggcacgtgcgctgctgaatggagctggtcgctggttgctacgagcaggtcctctttgggttcgctgtacacccggagcccgaggcttgcggcgaccacgagcaatggactcttgtggctgacttcactcaccatgctcacactgcctccttgtcagcagtagctgtaaatagtcgttttgtggtcactgggagcaaagatgaaacaattcacatttatgacatgaaaaagaagattgagcatggggctctagtgcatcacagtggtacaataacttgcctgaaattctatggcaacaggcatttaatcagtggagcggaagatggactcatctgtatctgggatgcaaagaaatgggaatgcctgaagtcaattaaagctcacaaaggacaggtgaccttcctttctattcacccatctggcaagttggccctgtcggttggtacagataaaactttaagaacgtggaatcttgtagaaggaagatcagcattcataaaaaatataaaacaaaatgctcacatagtagaatggtccccaagaggagagcagtatgtagttatcatacagaataaaatagacatctatcagcttgacactgcatccattagtggcaccatcacaaaaaaaaaaaaaaaaaaaaaaaaattgggggcggccgggctgaaaatttaaaccattggtggggcgggcccgagttaggaccgtccaggggcccaaaaacgggcgaagggcgggtcccaaaaagcggggcccggcggaaccgggcggcgccgttaaggccgct

SEQ ID NO: 35567 - DNA, 486 bp, Homo sapiens
tatctcttaaattgtagaagtggaggagatccagataatttcactttattgacagcttgtgtttatttcattcaaaggggaaaacagtctttttttaaaagcactctcttttgtgttttagtaagtaaagaacagtccaaaattggcaaaaaggagcctggtgacacagtgcacaaagaagaaaagcggtcaaaacctaacacaaagaaacgcggtttaacaggtgacagtaagaaagcaacaaaagaaagtggcctgatatcaaccaagaagaggaaaatggtagaaatgttggaaaagaagaggaaaaagaagaaaataaaaacaatgcagtgaatcacagatgtctcctgaaagaactcttttagatgaaatcattctactcaaatgtaccttaattttttttttttccctgagtaaaagcaagaaatttcttcctttggaaaaaatatatatattaaaaaaccacttttagatggttttttt

SEQ ID NO: 35568 - DNA, 501 bp, Homo sapiens
gaatagtgccagacacatagtaggcactcattatttgaaagaataaattcaaataaaaatgtgaatatctgaaaaaataaattaagtctcacatataaagtaaatacactaaagagttaaagatttgtgtaggatctaaaagtcttccttagtccagtctccattactgtgttctagagtgatgatacccagtgttgcctgcccacctccttgctttaccttcctcatcaagtctcaagtcctttgtggtaaactacatgtcattttgtagtttaacatatcatttttccatttataggatccattgatagttttcatgaatcgtggaatgatttatcttttcagaaacagataaatggttccgtgattcatgaaaactaccagtggatagagttggtagaactgtggtgtgactggcattaattgtatgttttcatcttcagcacaatggactcttgtggctgacttcactcaccatgctcacactgcctccttgtcagc

SEQ ID NO: 35569 - DNA, 430 bp, Homo sapiens
aagaaagaagggctttattcggccgggatcttcggcaagactcacgtctccaacaaccaagctccccaagtgagtaattcctgtcccttttaagggcttacaactctaaggaggtccgtgtgagagggtcgtgattgactgagcaagcgggggtacatgactggggggctgcatgcaccggtaattagaacggaacagaacaggacagggattttcacagtgcttttctatacaatgtctctaatctacagataacataaccgattaggtcaggggtcgatctttaccaggcccagagtgtggtgccgagctgtctgcttgtggatttcatttctgccttttagtttttacttcttctttggaggcagaaattgggcataagacaatatgaggggtggtctccctcccttaaaatcctaatgctctcctc

SEQ ID NO: 35570 - DNA, 1601 bp, Homo sapiens
acaaggcacagaagctgcagagcaacacaaaggatcctgcgggcttgaacaaggggctcgaacaaaaagcagttactccacagaagaccagaggggtcctcccagcattgtggctctatgaggaaactgagacccagagatggaactgggattcaaaacaatgtctagtgtgactccagagcctttcctaactcctacttaaagcctctgaggaatgctgaaaagagcacaggacatagaatccagattaaaatgatgaaagtcatcaaccttaaaagaagcaaaaaagaagagaattagctcctctgtgtaatttttttaaatatagcatcaaaccatcttcccgtcagcaacaggcactgcagtattgaagatcatcacatgagggcagagggcgtaaaaaaggatggtgtgttgagaccagaagcagcagcagtcctcgacatcaactacaactttccttcgcacagtgcataccctctgatatactgaacccaacgcctatcctccagccccctaagaactagagagggagcctcacaacattccaatttaatccttcagaaaattcattactcttcaaagttgtctgtggttttgtgacaacgatatgactaggtgcaaaatggcttgcaactaattaacaaacatagaagcatccaacaaacatatacgtgcacaatctgaggatttagggatgaaatcagttatccaggttagatatcaacaaaagagcagtaattataaagtttcatgaagaaagtggctgttgaggtgtggattatgtaagtaagactgacaacaagaaatgattttgttataatccagaagtaaaactaaataaatgttctttaaattgatggataaataagaaagaatttatttacaacagtaaataaatccaatacttgttataaataagataaagctggctataaattcacattttcatgtgagcgttttgaagtatgtggacataaaaaacacacacctcaagcatacttctcaatgatttctgataaagaacacacctttgtaaccagcacatggtgtaaaaccagaaacagaacattaccagattcctaaacaagccttctttgtgcccctttttagtcactaccctcccccattcaaggtaacttctatcttgacttctaacaccacacttttagttttgcctattgttaacttgatataaatagaatgatactgtatattttgtgtgtgtttggcttcttctgctccaacttttgttggtaaggtttatacagattattaaatatagctatagttcatttatttctattactatgcagtatacttggattcaggaatacaccataacttaatcatccattctattgttgactggtttggcaattttctaaacatacgcaaattctatgaaccagcaattctatcccgtgtatgtgtatatatacacacatgttaaatatatacacagaaacatgctgtgaaagtgctttgcaaatggcaaaatgtaaaatgtaaggaatgttaccaaagagctgaaacgcactgtgtctttcttgcaacacagattcttggacatatcagataataaatgtattttgtattga

SEQ ID NO: 35571 - DNA, 1606 bp, Homo sapiens
tgaaaagcacttcttaccccattagtcattctcctgagtttaaaaccagaaaatctagaaagggtcaccactaacaagcatttttatgacaaggtaaaacaataagagtacagtcactctttgggcacaacgctccctactctgctatcactgtttctttattttggcttaacgtttttaactgcttaacaaatgcacatggccgggcgcagtggctcacgcctgtaatcccagcactttgggaggccaaggcgggcggatcatgaggtcaggagttgcttccaccaacttcttagctaaagggttgagaaaattgttaagaatttaaggtactacaactgcttaaacaatattagtaatttccttccaaataatttttaaaattattctcttttctctcctcctaaaacaacttccagttgagaccagaagcagcagcagtcctcgacatcaactacaactttccttcgcacagtgcataccctctgatatactgaacccaacgcctatcctccagccccctaagaactagagagggagcctcacaacattccaatttaatccttcagaaaattcattactcttcaaagttgtctgtggttttgtgacaacgatatgactaggtgcaaaatggcttgcaactaattaacaaacatagaagcatccaacaaacatatacgtgcacaatctgaggatttagggatgaaatcagttatccaggttagatatcaacaaaagagcagtaattataaagtttcatgaagaaagtggctgttgaggtgtggattatgtaagtaagactgacaacaagaaatgattttgttataatccagaagtaaaactaaataaatgttctttaaattgatggataaataagaaagaatttatttacaacagtaaataaatccaatacttgttataaataagataaagctggctataaattcacattttcatgtgagcgttttgaagtatgtggacataaaaaacacacacctcaagcatacttctcaatgatttctgataaagaacacacctttgtaaccagcacatggtgtaaaaccagaaacagaacattaccagattcctaaacaagccttctttgtgcccctttttagtcactaccctcccccattcaaggtaacttctatcttgacttctaacaccacacttttagttttgcctattgttaacttgatataaatagaatgatactgtatattttgtgtgtgtttggcttcttctgctccaacttttgttggtaaggtttatacagattattaaatatagctatagttcatttatttctattactatgcagtatacttggattcaggaatacaccataacttaatcatccattctattgttgactggtttggcaattttctaaacatacgcaaattctatgaaccagcaattctatcccgtgtatgtgtatatatacacacatgttaaatatatacacagaaacatgctgtgaaagtgctttgcaaatggcaaaatgtaaaatgtaaggaatgttaccaaagagctgaaacgcactgtgtctttcttgcaacacagattcttggacatatcagataataaatgtattttgtattga

SEQ ID NO: 35572 - DNA, 1626 bp, Homo sapiens
acaaggcacagaagctgcagagcaacacaaaggatcctgcgggcttgaacaaggggctcgaacaaaaagcagttactccacagaagaccagaggggtcctcccagcattgtggctctgtaagacagactgcagcatatagagatgaggaaactgagacccagagatggaactgggattcaaaacaatgtctagtgtgactccagagcctttcctaactcctacttaaagcctctgaggaatgctgaaaagagcacaggacatagaatccagattaaaatgatgaaagtcatcaaccttaaaagaagcaaaaaagaagagaattagctcctctgtgtaatttttttaaatatagcatcaaaccatcttcccgtcagcaacaggcactgcagtattgaagatcatcacatgagggcagagggcgtaaaaaaggatggtgtgttgagaccagaagcagcagcagtcctcgacatcaactacaactttccttcgcacagtgcataccctctgatatactgaacccaacgcctatcctccagccccctaagaactagagagggagcctcacaacattccaatttaatccttcagaaaattcattactcttcaaagttgtctgtggttttgtgacaacgatatgactaggtgcaaaatggcttgcaactaattaacaaacatagaagcatccaacaaacatatacgtgcacaatctgaggatttagggatgaaatcagttatccaggttagatatcaacaaaagagcagtaattataaagtttcatgaagaaagtggctgttgaggtgtggattatgtaagtaagactgacaacaagaaatgattttgttataatccagaagtaaaactaaataaatgttctttaaattgatggataaataagaaagaatttatttacaacagtaaataaatccaatacttgttataaataagataaagctggctataaattcacattttcatgtgagcgttttgaagtatgtggacataaaaaacacacacctcaagcatacttctcaatgatttctgataaagaacacacctttgtaaccagcacatggtgtaaaaccagaaacagaacattaccagattcctaaacaagccttctttgtgcccctttttagtcactaccctcccccattcaaggtaacttctatcttgacttctaacaccacacttttagttttgcctattgttaacttgatataaatagaatgatactgtatattttgtgtgtgtttggcttcttctgctccaacttttgttggtaaggtttatacagattattaaatatagctatagttcatttatttctattactatgcagtatacttggattcaggaatacaccataacttaatcatccattctattgttgactggtttggcaattttctaaacatacgcaaattctatgaaccagcaattctatcccgtgtatgtgtatatatacacacatgttaaatatatacacagaaacatgctgtgaaagtgctttgcaaatggcaaaatgtaaaatgtaaggaatgttaccaaagagctgaaacgcactgtgtctttcttgcaacacagattcttggacatatcagataataaatgtattttgtattga

SEQ ID NO: 35573 - DNA, 358 bp, Homo sapiens
cttctcttttctactaaactttgtctcctaaagcccacacattgtcatgacttaagaaaatcatgttctcttctaggtagattttgatatctgatttttagctgaaattagagccaatgtctctggaagtgacgtgcaatgggaacattaaccgtaatttattttttttatttttattttttttgagacaaagtctcactctgttgccaaggctggagtgcaatggcgtggtctcggctcactgcaacctccacatcccaggttcaagagattctcctgcctcagcctcccaagtagctgggattacaggtgcccgccaccatgcccgactaatttttatatttttagtagagacgtg

SEQ ID NO: 35574 - DNA, 589 bp, Homo sapiens
tgaacccaggaggcggagcttgcagtgagcctggatcatgccactgcactccagcctggcagacagagtgagactccatctcaaaaaaaaaaaaaaaaaggtgtgcctattctgagccagacttcctaaattccaatctcactctgcctcttattgactaggtggccttggacaagttacaataacatctttgtgccttagttttctcatctgaaaactgagcataacctaccatatagaattgttatgaggattaaattaactcatatatagaaagcccttaaactagtgcctcacatatagtaagcctcaaatatatttcattaggattatttaggcttgttaacataagagcttttctttataaactatataaaattaaataacccccagaattgcgtttaaaagttaccactgttattcattgttctggaagagttggccaatttagttaagaatacaaaatcagggccaggcacggtggtcacgcctgtaatcccaacactttgggaggctgaggtgggcatatcatttgaggtcaggagttttagaccagcctgaccaacatggtgaaaccccgtctctacta

SEQ ID NO: 35575 - DNA, 94 bp, Homo sapiens
aatacccagaaacgtgccgatctcttttggcgccaggagtggagacgttttcaatgatccggcgtgtctcttgttctaagggccctttaaggat

SEQ ID NO: 35576 - DNA, 385 bp, Homo sapiens
aatttttgtatttttagagacaaggtctccccatgttgcccaggctggtcttgaacttttgggctcaagcaattcgcctgcctcagcctcccaaattattgggattacaggtgtgagccaccatgccaggccactgtatcattttagaaagggagattgtggacttccatggcctcctgtgtcaaataaatagggtgagattagtttttctcctacagtcccttcagcaggattattctgtacaagtgtgagttaactgtttatgttggtgaccacacatgtattagcattcaggctgaggtctgagaggagagcgtagaaacaacatatttgtcctttctcctctatcaaagctacatgcttttcctcacaaagtagtatgtac

SEQ ID NO: 35577 - DNA, 377 bp, Homo sapiens
gagttgctggtggccacctcggacccacacaggcagagcttgcttgagaacaaagccaacatgcaggaggaagaggaggagagttggatgcatatcaatccatccatagacaaggagcctggaggcatccttaggcccaggatgcagctctgctgcaacaggaagcatctttgcatttccaggttacgccaggcaacagactccctctttgactagttcagcctcttgggaaagcatcttgacccattcagtgctcagtacatgctacagaaagactgtttttatgtgcttataagtgagaacatgctttattcagtttactattcctgtgttagtttgctaaggataatggttccagttccatccatgtccctgtg

SEQ ID NO: 35578 - DNA, 423 bp, Homo sapiens
ataatcagtcagtatagttaattgacaaaaagtcccagtccacatcctgacaatctatataaatattcaaaacagcttttttatacagtgaacaattagtacaggaaacagataatcgttcagaagacttattaatatttatggatattgaaatgcagtgaggaggtgtgattattatgtcaaagctttgttacaggacttagggcaagtacacatccaacactaaaattgcgcctcatctcaatgaaccaaatggccggctctgtcaccccctgtgggatggcaaattcttggccccatggaccttccccagaaactctagttcagcaggaaagttcccataatttagaatatcataaggaaggaaaaaaaaagcccaaaatatatttccttgacataattggagattatataaacagagcc

SEQ ID NO: 35579 - DNA, 413 bp, Homo sapiens
tgcctactttgtgtgctttacaatatatattgttcaaggctagaataatgagccccatgagcagggtttcatagcatttaagattccaacgccaaccttcaatcatggacacaggtggcctgtgccatctagctagctgcgctgcctccaggctgggtggcctgctcctctgttggataaaaatagcctgactcctcactgaaacaaccaccatgttatttgcgtccttgggaagctgaaagtaatagaactctaagtctggcgttgccagctgtcagcagaatgaaatgcaaagtgtgacgtgtctacactgtacccactggccttcaagtcccaactcccgttcccccatcttgatttttttccattctcaaattaattatttcccctataggtgatttgtggaatggaaa

SEQ ID NO: 35580 - DNA, 324 bp, Homo sapiens
ttctcccacaaagaagccctcaatatatttccaaagagtagaaaacctttcctgcatccccagagagcaatgatttttatcattgaacagtggaagtgtttatttcccaaactatttaagtgctgcacatgaccccaaagtttatcttgaaattagttactacactgagacacaattctgtgagaaatggaagtaaattttaagtgatcccatctcaggctaagtagcttgctgagagttgtgagacaaacatctctatactttgatgcttttctgtgaagaaaatcatgattataaatatggactatatataaatatagtaaa

SEQ ID NO: 35581 - DNA, 841 bp, Homo sapiens
tattctaggatggaagatactgccttagacacaacatgctagagctgggacacattgcttagatgaaggtactttaaaaggtgaccctctgctcaaccatctggacatgtcagaaatgcttcttgatgcttggttaaaggcttgtttgtaaagaatctgctcctatgttccatctctcattttgtatttgccctattctacagaaacacttcaaggaagctggggttgatgagcggtgagcttgggcatggagatgagaatcgggtataatctggctctgccactcagcagagtgcttctcggagcatgttagtctcctcatctacaacatgggaagcccctttcttccaaggagtttgtgaatatcacaaaagaatggctatgaaagtctttccttgtaaagggaatcttaccgtgatgtttctatacccagtccatggcccaacaccaggcggcagcacccaatcactgtacaaagaacccgaagcagattcctcatgactgggttctacccaaaccaaatcagttcctcagcctaggccacagcttctctgcttgtggagggtgtcttgagtactggagcataacactgtcctttatcatttttcaaagacatcaagtgtttaggtaatgcttgggattcattcggagcctctgatgaacactaaatttgagcacatggtttggcacacagtaaggcctcaatgttaagatggtttaggattttaggactgctttctaatacttacctaaaattgcttggcaactatgagctcaaagtaaaatctaggattagacagctatttacctttatatcaaggaggctaattgttgaaaccct

SEQ ID NO: 35582 - DNA, 833 bp, Homo sapiens
caggaggcacatggtcagcgtggggtccaagctgaggatcagcttcccggacaaactgcatcacatcctcgactgtccatgaggaggggtcccggccactcagtcgagaggcatcgcggctctccagaccaggttggtgtcaccatctccagtttgcacatgaggaacattctgcatatgaggaagacctgagagaaacacttcaaggaagctggggttgatgagcggtgagcttgggcatggagatgagaatcgggtataatctggctctgccactcagcagagtgcttctcggagcatgttagtctcctcatctacaacatgggaagcccctttcttccaaggagtttgtgaatatcacaaaagaatggctatgaaagtctttccttgtaaagggaatcttaccgtgatgtttctatacccagtccatggcccaacaccaggcggcagcacccaatcactgtacaaagaacccgaagcagattcctcatgactgggttctacccaaaccaaatcagttcctcagcctaggccacagcttctctgcttgtggagggtgtcttgagtactggagcataacactgtcctttatcatttttcaaagacatcaagtgtttaggtaatgcttgggattcattcggagcctctgatgaacactaaatttgagcacatggtttggcacacagtaaggcctcaatgttaagatggtttaggattttaggactgctttctaatacttacctaaaattgcttggcaactatgagctcaaagtaaaatctaggattagacagctatttacctttatatcaaggaggctaattgttgaaaccct

SEQ ID NO: 35583 - DNA, 680 bp, Homo sapiens
agctgcggcgttcgggtgggggaggggaggctcacaccctgcggcggcttaagcctggatttacgcactggaggagggaattagccctgagatgtcagccctgtgcccctggcgctgtccacccggacgcccgcggagcgccaggcgccgcagcggaccgcgcgcgcactgattgccgcagctactctccctgccgtcgccgcccgggaccgggtgacattgaggttttcgtctatcgccgctgggccgatagggcttctttttaagatttggctttccaagtaagatttttgtttgcctgcttttctcctggaatttttttgtttttggtcgaagaagcaggtaacttgcatatcttaaggaaaacattgtttttgctttgcttttgttgtttaaagatcctaaaacgtaccgtgattcctttacgttactaataattggaaagtgtgttaaatcaagggttcgcttaatgttctttagcctttgtacatagaatatataaatgtcgtgagtcatctttacgaggtttatgagtttgtgttcgggtttggcttttttgttgtgtgtgcgtggtttttttttcttttcttgtaacaccgttaggcgtttcattaaggtgtataaaaagtaattttatacacctattaaaaattcccgctgctcggctggagactggatta

SEQ ID NO: 35584 - DNA, 638 bp, Homo sapiens
agctgcggcgttcgggtgggggaggggaggctcacaccctgcggcggcttaagcctggatttacgcactggaggagggaattagccctgagatgtcagccctgtgcccctggcgctgtccacccggacgcccgcggagcgccaggcgccgcagcggaccgcgcgcgcactgattgccgcagctactctccctgccgtcgccgcccgggaccgggtgacattgaggttttcgtctatcgccgctgggccgatagggcttctttttaagatttggctttccaagtaagatttttgtttgcctgcttttctcctggaatttttttgtttttggtcgaagaagcagctcccactttgcagttgtgtcagccaatcacgacagcttcccagacttccgtgcaagtgcctgctttgaggccaaggtggccataaatggcagctcctcaggctcctccacaatctctggtttcttatgtttctccatgagctcagctttttcatcaactccaatgcttcaagccgaagtcattagtgaatgttctacaatccttcagctgcagctccagaccttcactcctccagcttctcctacatccatctaaccctcaattcctacattaaatctctttattccagaatact

SEQ ID NO: 35585 - DNA, 298 bp, Homo sapiens
tgagacagagtcttactctgtcacccaggctggagtgcagtggcacgatctctgctcactgcaacctccacctcctgggttcaagtgatcctcctgcctcagcctctggagtagctggaagattgtctaatattcgggttaatctggtatttgtggaataaatgactgaatggatgaacagatgaatataggaccagctctgagtatgtagacacctgggtgcccaagagcgaagttgctctggaagccctgggccactccctcacagttcactagggccccaggatcattctctact

SEQ ID NO: 35586 - DNA, 712 bp, Homo sapiens
aggaaaagtaaatgatctcaataaatgcaggggaaaatatgataaaattcagcagtcaagtgctagaaatgtttagcgaactaggaaaaacggaagctatcttaatcttataaatattattttaaaactacagcaaacgcatcatacttaaaatatcaaaagctttcattctgagatcagaagcaaaaaaaaggatgtctattatcacttctattcaaaatgtcgctaggtgatgctatgcatgcctaagtatttagtggggagtgtactggtaccttaaattactttgaaatgcattatgaaaagggaaaaaaggatggcttgatggatagatatatatgtgataaagcagatatagtaaacttggtaaaatctagaatggtagaatccagatggtgggtatacaaatgtacactgtacaatattcaattttgctatacgttgaggaaactatcacctgagttcctggcctagtatggcaagatttccttttaaattaattgggtagggtcagaagaaaatgaactatcattatttgtaaatgacatgattgaggatatagataatttaaagaattagccaataaactagtaaaattaacaaggcttctggacacaaggtcacagacaaaaataacgtgtatttctgatgctagcaataaacaattagacaatgaaattgcaaaggatatgaacagatacttctcaaaaga

SEQ ID NO: 35587 - DNA, 448 bp, Homo sapiens
caatcaatcatccactcatctaaccatccagccactcctactttcgaggcttcttcctgggccaggccctgagctatgctctggagcgacagaggctggtgacctggtgcctgtccttgaggagaaggcccctaagctaaggagagaaggtctatagacaggaggtccctggctgagtcacaggcccctagcaggccagagaaggaggaggtcttagaggagcggcaaagcctctctcttgcagataagaatgttgcagcccaggtttggaaggacacgtacagctcacctggcccagccctctccccagtggccatatagcctaatggttaggaactctgcccgatgtcgacagtcctatccctgctcagcagacacgaccggaggcttttctcagtcactggccccaggtcatcacggactattagagttaggagagacatcagca

SEQ ID NO: 35588 - DNA, 385 bp, Homo sapiens
tgttgatcataaactttcaatacctgcaaaattgcactgatcctatttaccttcaccatggtgatcgccttccctaccaacaccaaatctaaattctcgccttgtcaataaacttttaaaaacatgagcactccttttagctgaaaagacgtccctaaagcttcttaccctgccgtcaaaagaaggtaatcaatgagccagaggaatgtcccatcttttttctacaaacatcctccttagcgttactaaatttaacaccaatgtaagttttaccgctgagcaggtccatggttgcctgcagactaggtggggggtttaagggtgggaaagagggatttcaaagaaggatgaggagattttcaggggtcttgaatgtggtcatggg

SEQ ID NO: 35589 - DNA, 392 bp, Homo sapiens
cctcagaaggttgttctaaagattaagtgggattttataatgtacttaacataactactgcaacatactgttacttttgataattttttgacaactgtggggtaattttgaagaaataggagaaaatgagagagactgaataatagatatatctaagagaggtaaagaactgagaacgttttgaaatgcattgtattataaaaagtgatcttggccaggcacagtggctcaagcccgtaatcccagcactttgggaggccgaggcgggtggatcacctgaggtcaggagttcgagaccaaccggaccaatatggtgaaaccctgtctctactaaaaatagaaaaattagctgggcatgatggcaggtgcctgtaatcctagcttcctgggtg

SEQ ID NO: 35590 - DNA, 511 bp, Homo sapiens
ccagtaatgagactcttccccctcacccagccaaatacctccaatgacagacatcaaatacctccaatgacagacattgagatttatactataaaacaaaatgtcaccccaccatcctgataccaaaaatctgatcttataggggtagaggattaggaaaaccatgaggagcccaaaagaagaatacattgtgtgcctttacatttcctgttagggcatccttccatccccagataactagcgtgggatgtcccttgctctggtctctgtgctatctcctagagacctggccacacctacagcattttgcaggtcagaggccagaagaacatgaatcctggctctgtcagagtcttcagaaaagaacatctataagaaagacatctttttcttgccacttctcataatcataattttgatgcactttgggccaaaagttcctttttttcatggggaatggaggtgagtgagggaagaataaagatgtgggttgataaaaataaaaaaaaaa

SEQ ID NO: 35591 - DNA, 154 bp, Homo sapiens
cttggaatcacttcctcattgaccatgctgcctgtatcctctgaatatttaaggtttgtggagaggctcccatggtgatttgaagtactgcgcttccattttcaaattttatgtaggctgagagcctgtgaactcaccctcaccctgatctcat

SEQ ID NO: 35592 - DNA, 1754 bp, Homo sapiens
tctttgttgtcctcaggtgggctgtgggggaagtagcggagaaatgaagtgacgccaggggccaggcatgggtgttcttttccgtgttgttcacattttctctctttctctctctctccactaatcatgtttctctctctctcctcgttttgttgcatgacttgtgccggttctcgtgattgttccctgctcgtgtctcacagactgtccccatttagcctgagacttttttcctgagtccccagctgggcagatccctcagggctaaacccaaggaaatgcccagcaacccccaacccaccccagccccgcgtgcgcccctccggtgcccgcagctggtgtgaacagtaagtactttggcggtgcctgggagaccagggcagaaaagccagctgtgctgactgagggcccagcctcgggttctccttgctccaaagtttaaaaaaaaatgaccctctcgcagatgctcatctcagcccatttcaagcctggaaaccatctctgagacgctgcccatgctgccatttcatcactgcaggcctgtgggtctagtgggggcctgggggccttgggggctgggggaggcagggcccccagccttctggaaagcaggtgggaatggaggctcctagccactatctcatccaaaggatggggcaggggcgggggctcacacctttgaccctattcatgggttccccagatttatacagttggcccctcgttggtttctctttcttcaagccacccctctggagttggggagggagaatgccccagtttctgaaagcatcttaaaccatagatagacgaacagcccaggggcctgggccccttcacagagcaagacttaagcttccccacccaatcattagtccctcctcaaaggttagggttgagagaagcagtaggccctaggggtgtcccgggaatcccccaggagggaaaggtgccaggctatcatccctccagggatccctgatggatgttccttgtcccctgcccaaaaccatcccgaactttgggccctttagtgattgtgagagctgggagcccccagggcctgggggcttgtggacagaaccagtgggcgggggcccagcattcaaagccagagaagggtctcaggcggcaccatctccacagaggcagaggcagagagaaggcacccccctctgacccacccctccccaggcaagaactgcaggctgtggacacctcccctggcagaggatggccaacagagactcagcaagtcctcactcccctcccaaaaggagacgctgcctgggaggacccactgttctccccttgaggaaaatcccatgcagggtgctatgggcctcaaccccccacatcgtcatccgcgtcctctcccatactgtttcccctcccctctcccaacacccctcctccctcagccccggagacccttggatggaagactgggccagcccagagtgggaggcaggaccagcgtgtctgcgagcacacgtgtgtgcctgcagacatgccccaagaccccagagacgccccggccccagtcacatggtgtcagagttaccttggcaactggcctttttggttcagagtaaattgggaagtgaagcccctgggatttgtcgagaaacgcactgtacgtgaaatgctttgccatcttgtacgaaagactttttttttaagttccaaaattatgatgggatttttttggatttgctttacgaataaatctgattggtccatttaaaaaaaaa

SEQ ID NO: 35593 - DNA, 980 bp, Homo sapiens
agaaggccagccacaccaaggcactggagctccacgactcctggccttcgattggaggcccctctctgccagctctgccccttggggcaccaggcaggactgccagccgctctcctggcaggtgacatcagccttcaagctcactgtgccctcaccatttcatgctcccccaaggtcctggtcatgtcttctcttgggtatcttcccaggacaggcactggcactggagccctggcacttgtttctgggttccatgcttcccaggtgtgatggtgaatgctgagtgtcagcttgactggattgaaggatgcaaagtattggtcactgggtgtgtctgtgagggtgttgccagaggagattcccatttgagtcagtgggctgggagaggcagacccaccctcaatccaggtgggcaccacctaatcggctgccagcacagccaggatacaagcaggcagaggaacgtggaaagactagactggctgaatctggcctccatctttctcccatgctggatgcttcccgccctcgcacgtcggcctccaggttcttcagcttttggactctcggacctacaccagtggcttgcaggggctctgcagcctttggccacaggatgaaggctgcactatcggcttctctacttttgttttgggactcagactggcttccttgctcctcaccttgcacatggcttattgtgggacttcaccttgtgatcacgtgagtcaatactcccaataaactcttcatatatactcttcatatagagtcctgtctctctagagaaccctgacacagatttcaggtgaggcctggtctactcctcaggttgctgtgaggaagggtcaagagacactgggcacgggtcactggccccatgaatgccaagggctccctaggttactggagacacagcctgtgctctgtccagaagcagcctgagatgccggggctgccactcccccagcggccccttc

SEQ ID NO: 35594 - DNA, 394 bp, Homo sapiens
tttttttttacacaaaagtcactgaaccatcaataatccaattggaaagaccctttactgttttaaagaaaccatacaaacataggcaaatatgttgagaggtacagctagtgtctggccacggtggagtacactcccacatccctaatgccagctgtagaacagcaacattcaagcagctgccttaattggagatgcagaccaacacatgctaatttagctgggccaactaattggtgggtatgctacatttttaacaaaatatccacccatattacagatgtttttctctatcagagtaaacgactggtaacaaacagtaatgaagttgaaataagctacacttagagaaaacgtttagttagacagttttacaacatggtctcatattggc

SEQ ID NO: 35595 - DNA, 271 bp, Homo sapiens
gaagctttcctcagattatctttggttgtctgtttgcatttaagagggagactgcacaaagctatttggaagctggtttataatgttttttgagaggttgctgaaagacaagcactccactaagcactttatatgcattgtcttaactgacctttacactgctcctgtgaggttcttatttcacagatgagggacatcttgaggcttagatgatacaaccagaagaaggggaaccaggattcaaacccagatctgactgtcttcatgtgat

SEQ ID NO: 35596 - DNA, 373 bp, Homo sapiens
gttttattaaaattttccctcctttagtggttatttgtgatatagccctgttgttccccatctcactgaccccaaattcaacacatgccacagctgctggccacagtgaaaactaatgatcaacaccagtcatgtgaataagacgtcccttcatgtgttttctttaagctagcctatccacagccccatgggaaagcctaaagaatagtacctgtggattataataaagacgtctcactggttcttgctctctatccctctctctacacactggtcaagtacactcttgtctccagacttcccattggcctcctgtcaacacctgtacccactctggacctgggaataataaacttctttttttttttaatgt

SEQ ID NO: 35597 - DNA, 744 bp, Homo sapiens
atgctaggcaggaggaggaaggaagaagaaaggggccaacccacacagtggctttgacttgcatctcattggccagaactgtgtcacatggtcactatctgaaagggagactgggaaatgtgtaagttgggtacactgtaaatgtgttgtaaaagttgtaaatgtatagatgggtacatcgatactctgaacaaaattgagggtcagtttgcaaggaagtggggggagaatagatgttgggtagacgatgacagtatctgccaccgaatacataataccaaaagtaacctctctctcagaaactctgtaattctagtcttctttccattttattttacttaatcatttcctaatggaaaagagctaagtattttatggaaagcacatttttaaaatccaaatattggagaagtagaggtatgtctcatatattaaaagacaatacatttgtgtgagatatcagattacagtcaaaattgcttcacgtttattatatttttcctgaaacgttcttaaacttttaaattccaaacttgaggaaacttattctcactaatcgcagctattcagatatcttcttttgttgaactaagttacctgaattttccttctaattttccagtcctggccaggtgcagtggttacgcctgtagtcctaacactttgggatgccaaggcaggcggatcacttgaggtcaggagctggagaccagcctggctaacatggtgaaaacccgtctctac

SEQ ID NO: 35598 - DNA, 438 bp, Homo sapiens
cctttcttttcttttcttttttattataagttctagggtacatgtgcacaacgtgcaggtttgtacatatgtatacatgtgccaggttggtgtgctgcacccattaactcgtcatttacattaggtgtatctcctaatgctatccctccccactcctgccaccccatgacaggccccggtgtgtggaactcaaacaaatttgtaaaaaaaaagcaaattcacctttgaaatgcaaaatcatcagtacagagctcctaccccagcatctcctctgtggggctctcacactctgggctactatcctcctgccctgaccactcaagggctaggtaccagacatctagggacagccactgctccaaatgtgacctggagcagaccaaatgcgaccccagagcccactgaaattattcaaaccacgccgaccctatgcagtct

SEQ ID NO: 35599 - DNA, 305 bp, Homo sapiens
caagacacattaaaataaaactgtcaagagatcaggaaagaatcttgaaagcagcaagagagacgtgattcaacatgtagaagaaatcctcagtaagattaatagccagttgctcattagaggccattaaggcagaaaggcattttacagtgctaaaagaaaccatcggccaagaattctgtacctggcaaagttatccttttaaaatgaaggataaagtagtaccttcccagaaaaaagagtctgttctacatagacctataccataaaacatgcttcagcatgttggaaaatactcctcaaat

SEQ ID NO: 35600 - DNA, 1208 bp, Homo sapiens
agtctcgaactcctgacttcaagtgatctgctcacctcggcctcacaaagttctgggattacaggtgtgagccactgcgcctggcctcccccattacattttaattccacagatacacttgagctgtttatggactatgccccattccgaaggcgacaaatcgttgtaatagctaagacttttttcacctgtcacagaaccaatttttgccccctgggagatgatactgcctcaccccactcagcaataggagtgatatcaagtatcctgttagggaagaataacaatctatgcaaaaggctgcatacacatggcttctagctatagaggatgggtttctaaggctgcaagggtttgctatagggtttgtttctgggttttagacaagagggtaaaactcccttgaatcaagtgaaagatgcccagactgttcttcagcccccagcccaagctctctgcagaaatctgaccctggggctggaggctgttaggaccctatagctcttattgctagtcacaaggtaggagccacccagttgcctttctttcctcatttcccatttgtcctgtgtcatcctccatctatctgccctagcaaagacagtcggagggcctctgagaatcttctgctggcaagattacagtttcacgatagaaaacataagtggagtcaaattacagagtacgcacactgtttcccttgattttcctctcacatcttctgtgcgtggtgagaagagagaggggaggggtataagtgggttcctgggtgagagagggaggtaccagagtaaatacagtgccacttggatggtgacaccccattaccttcagacacaaagatgtaagctgagggaaatgaattcttggattcagggaaatgaattcttggattctgaacatgagggtcagatttacattcctgtctcaattgttgacgcttatcccaaggactagtcattctgcaacatctgtgggaaattcccagattgaacttcccagggagaaacatcatatgacatattgggaaaatggctgacaatggttttccttagtaagttcattgagaagaaaagtgggcggatgatttcccagtcttcactctttcagaagcccctaaaacaatctgacatgctctagttggagcctgctttctatcccatcagtttgatttctgaatgccttatgatcattagcattcttcatta

SEQ ID NO: 35601 - DNA, 797 bp, Homo sapiens
gagcaggaaagggctcagcagaagctccaggctacaacacaagtggccatgcggtgtgggacagatgagctggcagagcccaaagtacccgaggtatctgtggtgggaacagatgcctgtgaagtttatgacaagaccctacaggagaatcacaatgtagacacctggggttctggagcagggccatgccatctgtagccaagaattttatacttcttaagaaacaactcttgatgctacagggttctggtagagacagatcatcagaccatggatcatcaagttgaccatgtgaccaaagctgttcatcatgagctggattctgccatatccaccaagtcataaggtcaggcaaagccagcagcaattcctaagatagaaataatacaactggggttgggcatagcagggccagagggcagaagatagttacgtgagcaggtggcccagacatctatgtcatccactacctttgcaccagtacctgcctgttcctcatttcacacctttggctgcctggggagctctttataatatccagctgatagaagagaaaaaaagccatgccttatccttagataggtcagctcagtgtgtgtgagcaagacaaaaaaagaccgtggctgcactgcagccccacacaggggcatccttgaaagacagcagagtggggagtccttctagtgggcataggttgtgcatcatgcacctagccatccactgtatgtggaaagagaaggagcctgagcttagactatacatggatctcatgggcagtggtgaatggcttggctggt

SEQ ID NO: 35602 - DNA, 227 bp, Homo sapiens
gacatcactgacacccctagaaaatgttaaggtcccctcccttaaggtctcaaagttcttagttctttcactgacctattccttccaccttctagatattcacttttctcttctaaaacacaatgctgactttttctttttttagtacataatacctatgcatggttcaaaatatttcgaaaagggtacagctgatgtgcttgctcccacctgtgtttcttatctgc

SEQ ID NO: 35603 - DNA, 377 bp, Homo sapiens
ttttttagttctttttccaaaaattcttcccttttatttgcaacacattttcctttaatttcttgccaagaaagtggaattgcttgcggactccagccatttcctgatatcagcgtttccagaagctgaacttcctgcaactacaaagaaacacctttcccagccaaatggatgctctcagcagcctttctcttcctttcccgactgaagcccctttggacgtcacttgcagagactgccttttcggaaaagactgtctcagaacccaaggaaacaatggctacgtgtctcagcacttgctctcctgaaggcactattgcaaacacttgctatatattatctcatttaatcttcaccacaatcttaacgactgtagc

SEQ ID NO: 35604 - DNA, 440 bp, Homo sapiens
gactatattttccaaaaaaatgtgagaaggtgagaagagtggcatcatttgatacttttgcaaatctgcttaatgtctgacataatagaaggcagatggattctcatttctgtctctgcattcaaattgttgctgtatcacatgtcatatagcttctggaaaactccactgtgtattcattagagtaaaaaaggcaaataacattttagtatttatcctgaaaatagctttgacctcatggaccatccattaggatctcagaaatttccaggggtccctaaaccgtattttgagaactgcggatatatactgttaaagacacagtgatacacacctttaaggaagaaaaggaaatttaaattaatttgaagacactgtgcaaatcagtactaaatcttagagtgaattatctaggctgtctttgaaacagtttttatgct

SEQ ID NO: 35605 - DNA, 488 bp, Homo sapiens
gaaaatcttcaaaccttggtaatcaatttaaggagcaaatttttaccaaataagaatctctacaaaaacaatgctgcagtatctatttattacaatacataatcagggatgttactgttgaagtcacactatttttgttacttgaaatgcaagacctcttctggtgagacctctataaatgatgaatgtgaacccctgattcttcacaatccttggaggagatagatggttaattgagattaaatatagttgttgctgatatcaccaccaaaatggaaatcattatcatgatcagaaaccgaatttagcaaatgtagtaaaagaaacgttgaactagaaatcggtgcgccccagtaggccattggttgtttagtaatcctgaataaatgaatcattttctcatctatgaaacaagaggcttggccttgctcagtgactccccattgctggttggagtaacatttttaggctatgaaaaagttttcagg

SEQ ID NO: 35606 - DNA, 399 bp, Homo sapiens
gtattttaagtacgaagattttattattcataaaaacactagtttatgctttgggaagagcagagcagaggttcagataacaacaaatgctctttaaggatgtaaaatgtgaactttgttcacagacctcagtgatgtgagcactgttgcttaggagtaacaagttgctaaaatgcagaagggatgggtagtgtttcttgcttctcatgatgaatgtttctgtatgttagtgacttgctgggtaactagtaaggtactagaattgataaatgtgtacagggtcctttgcaataaaactggttatgacttgatccaggtgtttaaaaatcggggctgttaagtctgaccatacatcactgtgatagaatgtgggctttttcaaggatgaagacacaagtc

SEQ ID NO: 35607 - DNA, 903 bp, Homo sapiens
actttatttaatagaaatgggaataaggaacttttcccttgtgtgtatattaaattataggaaaaatattgtttgtatataaagacctgaggttctctttctatagctttttcccccctttgtcccatccccatttctgacctgtttcataagcattccaagcaaaattatagttttacctctgctctcttttattcttctttaatttgaattcgtggttaagttattagaggcagtttttaattttttgttaaaaatctaaaatgcatgtgatagattgtgaaaaaatggctgcccatcaaagagggtaggatgaaggaaaaataaagtgacaggttcttcttctgtcacagacaaattggtttgtggaaaggtctttgtaatcagaagcaaaaatatggtataatgtagtttcaacccagaaatgtgtttgagtccatcatgtgttctgataaagcattgaaaaaaataaaatatggtaaacagagtccatgtgtgctcataatctcctaagaagaacacagcatatacaggaaagctcagaatggcatcaggaatttaaggtggtttcttctgcctgttctttccctatatactttaagctcctcctcatgctccttcttgagatactctatcagatcaacttcttcagatatttatgatggtatggaataatctaattagaaagtactatttaatgactattatcctaaatcctcaactcataaactgaacaaataattttctagttcactaccttattctgttcctttcattcacgttacctgttatcctcaaaggctgtgaaatagctgtcttcaggctgctcccagttagttgtccttgttgcacaactggagggagcacagtattgtttataggtccccaggaaagggtcaaggc

SEQ ID NO: 35608 - DNA, 366 bp, Homo sapiens
atgtttgagaggcagaaatagaacctaaggaggaaattacagctgtcatatactgagtacctgctgtatatctagctttgcaccagacactttgtatcatcatctcatttaaccctcaaatccaagtaaatgttactgtttcacaaactgccctgagtcttagcagcttagtacaagaactggaatgagcttgtgattctttggattggcagtgtgggctagactctgctgggctcattcctgtgtctgccgtaaactaggtagcttttcgggggtttgtctggctatcagcagggaccatgggaacgccagggcaaggtggtgtagggctagttcacatggcggcaggtacaagccggttgtctc

SEQ ID NO: 35609 - DNA, 557 bp, Homo sapiens
tggttgaatactgtcacgttattaatttaaacatactcaaattaccttaagaggacaagctctgaagtgcagtcatgagaattgatttgtggggaaaaaaaaaatgggacacttttagttggagctgggtggggtgacaagtgcagaggctttgagtgtcatgagagcatcagacaggatgtaaaggaagcaacgggcagcagacattggtccctgatcctccattataaccaattttttgcaaacgtatgttgattttgagaataattagctttgactctaaaatgctgtcttccctgaaggagacctaggatttttcttactgggaaacttggctcctggacttaatccacattcgttaaactgtcaccttggcagtttagtggccatctacacaatgatctgacttgttggcattaaaaagtccaaacatagtcatcaaaggaagaagaaagtaaaactgaaaccccttatataaaatatgcttgctttagggtgacccaggctgagtactaagttgtaaagtcaatttccaataaaaattttatgtgccaatt

SEQ ID NO: 35610 - DNA, 234 bp, Homo sapiens
ttacttgccttccctgtaactgtggtttctcgtctgaaaactaagggtgcctcatacggcaattaaattatatagtatctaaaaagtgcttagctctctaattgttcagtaaataacagctgtgctaggttttgaggcagagaaagcccatgaatttgtcaccatttaaaaaggaatcttctctttggtccggcagagatctcatcacatctgcattaccatctgacggctccc

SEQ ID NO: 35611 - DNA, 324 bp, Homo sapiens
agtagagatggggtttctccatgttgatcaggctggtcttgaactcccaacctcaggtgatctgcccgcctcaacctcccaaagttctgggattacaggcgtgagccactgcgcccggtcgagttttttttttttagcagctttaaagacacatgaaaaatgatttcctgtgtttctaccatttctagcacaattctgtaaatctttatacagtcagctctttgtatgtgtggttcccacagccataaattcaaccaaccttggattgaaaatatttggaaactgggcatggctgcacgcgcctataatcccagatgcttggga

SEQ ID NO: 35612 - DNA, 643 bp, Homo sapiens
tttttaagagagtaatattaattagttcattgatcatgctccctgaggaaagggccatagcttgaacttcttgttatctaatagggaatcttgttttcctgtcagaatctgtttcatgcattatggctcagtgagcagctggctgggcctctgccagggagccacagaagaggaaactaaaaatcattttgccttttacaaaagatgaagtccagagtcggccgttttatgattaataatgacctaggtattcccctttggccccaagatagctagattagccacctgctttgatcaggtgactccacagctgtgcatgtgtgctttgtgctgaagaagccaaaactaagacaggggtccaggggtttctaacagtgaaattacaggcattcaaggagagctacattaaattaattttggtgccatcctatgaaggatgagtttacactcccaaaatgaaccagcctgtttttctgctcattgcttaacggtataactgctgcttggctgtctccccaaatgtgcttttacctcctgttttaatccccacccccatcttctgagtccctcccttttaccccctccagtcactcccactcccccacccccgtgggccagttttaaatgtcagcctttgtttaaa

SEQ ID NO: 35613 - DNA, 296 bp, Homo sapiens
gggaactttctgaaatggactggcaatcaggtgagctggattctaatgcctgccttactggtggctttttaatcacacttaagtccctctgcttatctgagatttcattttcttgtctgtgtctagtccgttaccagactccttttcctacacaaatatttgtttcataacagtggaagggacctcagatcattaagttgctatcaccttggggtgacaggtacactaaaatctcagaagtcaccactaaagatcttattcatgtaaccaaataacacctgttccccaaaaccctg

SEQ ID NO: 35614 - DNA, 441 bp, Homo sapiens
aaaaataaataaataaaatataggttcaaattccattaaaacccagtacaagccgaaatgattgtacttgccagttcagtttggctgaagggccaccagcttgcggtctttctatattaccatcccatcatatcctcaggagcagagaatcagcaaatttctcctgtaaacagcctgatagtatatattttaggcttttcaggcttgatggtctcaaagcaggcatagacagtatgtcaacaaatgggcatggttgtgtattacaaaagctttatttatggaaagtgaaatttgaatttcacctaattttcatgtcatgaaatatttttcttttgattttttttccaaccatttaaaaatgtgaaagccattcttagcttgtggtccccacaaaaacaggtggtaagtgagcctccctgggctgtgattcggtggtctctg

SEQ ID NO: 35615 - DNA, 1086 bp, Homo sapiens
atttgtggatcctggtttgttctgtggtaataccctcactgttcatagcttgtcagaaatggtgatttctaggcttgaaagtcatctgagagagagattttctgcccgagagcttatttgagagacagcttgtgtcttgagaacatataggaaaaggcccacattgggctcctggagggatgaaagtgagccatagtagctattttccagtgcatggatttgtatgtaggtgatcatattcacctggcttcttaaaatgccatatgaccagcaagaagattgtcacttaagtcacagttgttctataattgagcagacaagccagttgaatggcccaacgtgaagcaagaaagaatctctgtggttaggcctcggtctctgaaaatttatgttggtactcagttatacagttaatgtgaaatgatgagggagactgggaaccaacactgatgctgtcagaagacctgttctctgggagccccatcacttgctccccagttcctaccctggggtaattgtaatgaggtctcccctggaggcaggggaatgaataataagacactgttacccttaagacccttgccagtcttctaggttttgtgacttttgctgtttccttttgttttattataaggaaataaaaggaaatattgcttaccaaaaacacagttctctttaagacattgataccaggtgcagtggctcatgcctgggtaatctcagcactttgggaggacacgatggatggatcacctgagctcgggagtttgagaccagcctgggcaacatggtgaaatcccatgtctacaaaaaatacaaaaattccctgggcacagtggcatgattacatgattaatttgaagttgtttcttggttggctgccagttttagctattttgtctctactaaaaaggggaaaaaaattagcacctgccagagattaaataagaatgtattcagcttatgatttatttattagggaggtgaaattttcaggtggttagtaaggtgactttgggagtcactcttggattttgagtccctagctttgtcatttaccagctttgtgaccctgggcggactaac

SEQ ID NO: 35616 - DNA, 2108 bp, Homo sapiens
agccgcgcgctcgctcgcaggagggtgggtagtttgcccagcgtaggggggctgggcccataaaagaggaagtgcacttaagacacggccccgctggacgctgttagaaaccgtcctggctgggaaggcaagaggtgtgtgactggacaagacttgtttctggcggtcagtcttgccatcctcacagaggttggcggcccgagagagtgtgaggcagaggcggggagtggcaagggagtgaccatctcggggaacgaaggagtaaacgcggtgatgggacgcacggaaacgggagtggagaaagtcatggagagaaccctaggcggggcggtccccgcggaaaggcggctgctccagggtctccgcacccaagtaggagctggcaggcccggccccgccccgcaggccccaccccgggccccgcccccgaggcttaagccgcgccgccgcctgcgcggagccccactgcgaagcccagctgcgcgcgccttgggattgactgtccacgctcgcccggctcgtccgacgcgccctccgccagccgacagacacagccgcacgcactgccgtgttctccctgcggctcggacacatagtatgaccattaggtgtttcgtctcccacccattttctatggaaaaccaaggggatcgggccatgatagccactggcagctttgaagaacgggacacctttagagaagcttgatcttggaggcctcaccgtgagaccttacaaagccggattccggcagagttcctctatctcgtcttgttgctgattaaaggtgcccctgtctccagtttttctccatctcctgggacgtagcaggaaatcagcatcatggttgggttcaaggccacagatgtgccccctactgccactgtgaagtttcttggggctggcacagctgcctgcatcgcagatctcatcacctttcctctggatactgctaaagtccggttacagatccaaggagaaagtcaggggccagtgcgcgctacagccagcgcccagtaccgcggtgtgatgggcaccattctgaccatggtgcgtactgagggcccccgaagcctctacaatgggctggttgccggcctgcagcgccaaatgagctttgcctctgtccgcatcggcctgtatgattctgtcaaacagttctacaccaagggctctgagcatgccagcattgggagccgcctcctagcaggcagcaccacaggtgccctggctgtggctgtggcccagcccacggatgtggtaaaggtccgattccaagctcaggcccgggctggaggtggtcggagataccaaagcaccgtcaatgcctacaagaccattgcccgagaggaagggttccggggcctctggaaagggacctctcccaatgttgctcgtaatgccattgtcaactgtgctgagctggtgacctatgacctcatcaaggatgccctcctgaaagccaacctcatgacagatgacctcccttgccacttcacttctgcctttggggcaggcttctgcaccactgtcatcgcctcccctgtagacgtggtcaagacgagatacatgaactctgccctgggccagtacagtagcgctggccactgtgcccttaccatgctccagaaggaggggccccgagccttctacaaagggttcatgccctcctttctccgcttgggttcctggaacgtggtgatgttcgtcacctatgagcagctgaaacgagccctcatggctgcctgcacttcccgagaggctcccttctgagcctctcctgctgctgacctgatcacctctggctttgtctctagccgggccatgctttccttttcttccttctttctcttccctccttcccttctctccttccctctttccccacctcttccttccgctcctttacctaccaccttccctctttctacattctcatctactcattgtctcagtgctggtggagttgacatttgacagtgtgggaggcctcgtaccagccaggatcccaagcgtcccgtcccttggaaagttcagccagaatcttcgtcctgcccccgacagcccagcctagcccacttgtcatccataaagcaagctcaaccttg

SEQ ID NO: 35617 - DNA, 335 bp, Homo sapiens
acttagagaggaagaagctattactgcgaagcccagctgcgcgcgccttgggattgactgtccacgctcgcccggctcgtccgacgcgccctccgccagccgacagacacagccgcacgcactgccgtgttctccctgcggctcggacacatagtatgaccattaggtgtttcgtctcccacccattttctatggaaaaccaaggggatcgggccatgatagccactggcagctttgaagaacgggacacctttagagaagcttgatcttggaggcctcaccgtgagaccttacaaagccggctctccagatgaaccacagaagcaggaatgtgg

SEQ ID NO: 35618 - DNA, 277 bp, Homo sapiens
catgaaccctttgtagaaggctacggggccgttcatgccctcctttctccgcttgggttcctggaacgtggtgatgttcgtcacctatgagcagctgaaacgagccctcatggctgcctgcacttcccgagaggctcccttctgagcctctcctgctgctgacctgatcacctctggctttgtctctagccgggccatgctttccttttcttccttctttctcttccctccttcccttctctccttccgtccagagcttgggatcctctaggagtcg

SEQ ID NO: 35619 - DNA, 1666 bp, Homo sapiens
acttagagaggaagaagctattactgcgaagcccagctgcgcgcgccttgggattgactgtccacgctcgcccggctcgtccgacgcgccctccgccagccgacagacacagccgcacgcactgccgtgttctccctgcggctcggacacatagtatgaccattaggtgtttcgtctcccacccattttctatggaaaaccaaggggatcgggccatgatagccactggcagctttgaagaacgggacacctttagagaagcttgatcttggaggcctcaccgtgagaccttacaaagccggattccggcagagttcctctatctcgtcttgttgctgattaaaggtgcccctgtctccagtttttctccatctcctgggacgtagcaggaaatcagcatcatggttgggttcaaggccacagatgtgccccctactgccactgtgaagtttcttggggctggcacagctgcctgcatcgcagatctcatcacctttcctctggatactgctaaagtccggttacagatccaaggagaaagtcaggggccagtgcgcgctacagccagcgcccagtaccgcggtgtgatgggcaccattctgaccatggtgcgtactgagggcccccgaagcctctacaatgggctggttgccggcctgcagcgccaaatgagctttgcctctgtccgcatcggcctgtatgattctgtcaaacagttctacaccaagggctctgagcatgccagcattgggagccgcctcctagcaggcagcaccacaggtgccctggctgtggctgtggcccagcccacggatgtggtaaaggtccgattccaagctcaggcccgggctggaggtggtcggagataccaaagcaccgtcaatgcctacaagaccattgcccgagaggaagggttccggggcctctggaaagggacctctcccaatgttgctcgtaatgccattgtcaactgtgctgagctggtgacctatgacctcatcaaggatgccctcctgaaagccaacctcatgacagatgacctcccttgccacttcacttctgcctttggggcaggcttctgcaccactgtcatcgcctcccctgtagacgtggtcaagacgagatacatgaactctgccctgggccagtacagtagcgctggccactgtgcccttaccatgctccagaaggaggggccccgagccttctacaaagggttcatgccctcctttctccgcttgggttcctggaacgtggtgatgttcgtcacctatgagcagctgaaacgagccctcatggctgcctgcacttcccgagaggctcccttctgagcctctcctgctgctgacctgatcacctctggctttgtctctagccgggccatgctttccttttcttccttctttctcttccctccttcccttctctccttccctctttccccacctcttccttccgctcctttacctaccaccttccctctttctacattctcatctactcattgtctcagtgctggtggagttgacatttgacagtgtgggaggcctcgtaccagccaggatcccaagcgtcccgtcccttggaaagttcagccagaatcttcgtcctgcccccgacagcccagcctagcccacttgtcatccataaagcaagctcaaccttg

SEQ ID NO: 35620 - DNA, 2461 bp, Homo sapiens
agccgcgcgctcgctcgcaggagggtgggtagtttgcccagcgtaggggggctgggcccataaaagaggaagtgcacttaagacacggccccgctggacgctgttagaaaccgtcctggctgggaaggcaagaggtgtgtgactggacaagacttgtttctggcggtcagtcttgccatcctcacagaggttggcggcccgagagagtgtgaggcagaggcggggagtggcaagggagtgaccatctcggggaacgaaggagtaaacgcggtgatgggacgcacggaaacgggagtggagaaagtcatggagagaaccctaggcggggcggtccccgcggaaaggcggctgctccagggtctccgcacccaagtaggagctggcaggcccggccccgccccgcaggccccaccccgggccccgcccccgaggcttaagccgcgccgccgcctgcgcggagccccactgcgaagcccagctgcgcgcgccttgggattgactgtccacgctcgcccggctcgtccgacgcgccctccgccagccgacagacacagccgcacgcactgccgtgttctccctgcggctcggacacatagtatgaccattaggtgtttcgtctcccacccattttctatggaaaaccaaggggatcgggccatgatagccactggcagctttgaagaacgggacacctttagagaagcttgatcttggaggcctcaccgtgagaccttacaaagccggattccggcagagttcctctatctcgtcttgttgctgattaaaggtgcccctgtctccagtttttctccatctcctgggacgtagcaggaaatcagcatcatggttgggttcaaggccacagatgtgccccctactgccactgtgaagtttcttggggctggcacagctgcctgcatcgcagatctcatcacctttcctctggatactgctaaagtccggttacagatccaaggagaaagtcaggggccagtgcgcgctacagccagcgcccagtaccgcggtgtgatgggcaccattctgaccatggtgcgtactgagggcccccgaagcctctacaatgggctggttgccggcctgcagcgccaaatgagctttgcctctgtccgcatcggcctgtatgattctgtcaaacagttctacaccaagggctctgagcatgccagcattgggagccgcctcctagcaggcagcaccacaggtgccctggctgtggctgtggcccagcccacggatgtggtaaaggtccgattccaagctcaggcccgggctggaggtggtcggagataccaaagcaccgtcaatgcctacaagaccattgcccgagaggaagggttccggggcctctggaaagggacctctcccaatgttgctcgtaatgccattgtcaactgtgctgagctggtgacctatgacctcatcaaggatgccctcctgaaagccaacctcatgacagatgacctcccttgccacttcacttctgcctttggggcaggcttctgcaccactgtcatcgcctcccctgtagacgtggtcaagacgagatacatgaactctgccctgggccagtacagtagcgctggccactgtgcccttaccatgctccagaaggaggggccccgagccttctacaaagggttcatgccctcctttctccgcttgggttcctggaacgtggtgatgttcgtcacctatgagcagctgaaacgagccctcatggctgcctgcacttcccgagaggctcccttctgagcctctcctgctgctgacctgatcacctctggctttgtctctagccgggccatgctttccttttcttccttctttctcttccctccttcccttctctccttccctctttccccacctcttccttccgctcctttacctaccaccttccctctttctacattctcatctactcattgtctcagtgctggtggagttgacatttgacagtgtgggaggcctcgtaccagccaggatcccaagcgtcccgtcccttggaaagttcagccagaatcttcgtcctgcccccgacagcccagcctagcccacttgtcatccataaagcaagctcaaccttgaaaaaaaaaaaaaaacaaaaaaaaaaaaaaaaaaaaaaaaaaaaaaaaaagaaaaaaaaaaaaaaaaaaaacaacacaaaaaacaacaaaaacaacaaacaaacaaaaaaagggggggggacccacaaaacaacccccacgcagggggcaaccaaaaacggcacgcaaaccaccttattgacaaaaaaaagagacgcccaccataaaagagacacgaccaacaaaaacaacaggaccgcgagcgcaccctaaaacaacaaggcctgacagaaaacaaaccactagcggaccacacagagaaaacagcacacaacggggagaaacaacacgagagcgacaaaacagccacagaa

SEQ ID NO: 35621 - DNA, 2485 bp, Homo sapiens
agccgcgcgctcgctcgcaggagggtgggtagtttgcccagcgtaggggggctgggcccataaaagaggaagtgcacttaagacacggccccgctggacgctgttagaaaccgtcctggctgggaaggcaagaggtgtgtgactggacaagacttgtttctggcggtcagtcttgccatcctcacagaggttggcggcccgagagagtgtgaggcagaggcggggagtggcaagggagtgaccatctcggggaacgaaggagtaaacgcggtgatgggacgcacggaaacgggagtggagaaagtcatggagagaaccctaggcggggcggtccccgcggaaaggcggctgctccagggtctccgcacccaagtaggagctggcaggcccggccccgccccgcaggccccaccccgggccccgcccccgaggcttaagccgcgccgccgcctgcgcggagccccactgcgaagcccagctgcgcgcgccttgggattgactgtccacgctcgcccggctcgtccgacgcgccctccgccagccgacagacacagccgcacgcactgccgtgttctccctgcggctcggacacatagtatgaccattaggtgtttcgtctcccacccattttctatggaaaaccaaggggatcgggccatgatagccactggcagctttgaagaacgggacacctttagagaagcttgatcttggaggcctcaccgtgagaccttacaaagccggattccggcagagttcctctatctcgtcttgttgctgattaaaggtgcccctgtctccagtttttctccatctcctgggacgtagcaggaaatcagcatcatggttgggttcaaggccacagatgtgccccctactgccactgtgaagtttcttggggctggcacagctgcctgcatcgcagatctcatcacctttcctctggatactgctaaagtccggttacagatccaaggagaaagtcaggggccagtgcgcgctacagccagcgcccagtaccgcggtgtgatgggcaccattctgaccatggtgcgtactgagggcccccgaagcctctacaatgggctggttgccggcctgcagcgccaaatgagctttgcctctgtccgcatcggcctgtatgattctgtcaaacagttctacaccaagggctctgagcatgccagcattgggagccgcctcctagcaggcagcaccacaggtgccctggctgtggctgtggcccagcccacggatgtggtaaaggtccgattccaagctcaggcccgggctggaggtggtcggagataccaaagcaccgtcaatgcctacaagaccattgcccgagaggaagggttccggggcctctggaaagggacctctcccaatgttgctcgtaatgccattgtcaactgtgctgagctggtgacctatgacctcatcaaggatgccctcctgaaagccaacctcatgacagatgacctcccttgccacttcacttctgcctttggggcaggcttctgcaccactgtcatcgcctcccctgtagacgtggtcaagacgagatacatgaactctgccctgggccagtacagtagcgctggccactgtgcccttaccatgctccagaaggaggggccccgagccttctacaaagggttcatgccctcctttctccgcttgggttcctggaacgtggtgatgttcgtcacctatgagcagctgaaacgagccctcatggctgcctgcacttcccgagaggctcccttctgagcctctcctgctgctgacctgatcacctctggctttgtctctagccgggccatgctttccttttcttccttctttctcttccctccttcccttctctccttccctctttccccacctcttccttccgctcctttacctaccaccttccctctttctacattctcatctactcattgtctcagtgctggtggagttgacatttgacagtgtgggaggcctcgtaccagccaggatcccaagcgtcccgtcccttggaaagttcagccagaatcttcgtcctgcccccgacagcccagcctagcccacttgtcatccataaagcaagctcaaccttgtggcgtctcctccctctcttgtagctcttaccagaggtcttggtccaatggcctttttgggtacctggtgggcaggggaggaaccacctgactttgaaaatgggtgtgatccaccttccacctccagcatccaatctgaagcccgtgtaggtcatctggtccatttctctctagacccaggccctgtactaacatggggagtgcaggagccacctgagagacagcagtgcctccccttcctttgccgggccacttgagctcttactcagaatctggtactctagtgcctgccatcccaaccccccacccacaccgcaggccttgtttatctgcacaacaagagtgctcctgtgtgccctgcatctcctgcagttcca

SEQ ID NO: 35622 - DNA, 2165 bp, Homo sapiens
  misc_feature (2153)..(2153): n is a, c, g, or t
agccgcgcgctcgctcgcaggagggtgggtagtttgcccagcgtaggggggctgggcccataaaagaggaagtgcacttaagacacggccccgctggacgctgttagaaaccgtcctggctgggaaggcaagaggtgtgtgactggacaagacttgtttctggcggtcagtcttgccatcctcacagaggttggcggcccgagagagtgtgaggcagaggcggggagtggcaagggagtgaccatctcggggaacgaaggagtaaacgcggtgatgggacgcacggaaacgggagtggagaaagtcatggagagaaccctaggcggggcggtccccgcggaaaggcggctgctccagggtctccgcacccaagtaggagctggcaggcccggccccgccccgcaggccccaccccgggccccgcccccgaggcttaagccgcgccgccgcctgcgcggagccccactgcgaagcccagctgcgcgcgccttgggattgactgtccacgctcgcccggctcgtccgacgcgccctccgccagccgacagacacagccgcacgcactgccgtgttctccctgcggctcggacacatagtatgaccattaggtgtttcgtctcccacccattttctatggaaaaccaaggggatcgggccatgatagccactggcagctttgaagaacgggacacctttagagaagcttgatcttggaggcctcaccgtgagaccttacaaagccggattccggcagagttcctctatctcgtcttgttgctgattaaaggtgcccctgtctccagtttttctccatctcctgggacgtagcaggaaatcagcatcatggttgggttcaaggccacagatgtgccccctactgccactgtgaagtttcttggggctggcacagctgcctgcatcgcagatctcatcacctttcctctggatactgctaaagtccggttacagatccaaggagaaagtcaggggccagtgcgcgctacagccagcgcccagtaccgcggtgtgatgggcaccattctgaccatggtgcgtactgagggcccccgaagcctctacaatgggctggttgccggcctgcagcgccaaatgagctttgcctctgtccgcatcggcctgtatgattctgtcaaacagttctacaccaagggctctgagcatgccagcattgggagccgcctcctagcaggcagcaccacaggtgccctggctgtggctgtggcccagcccacggatgtggtaaaggtccgattccaagctcaggcccgggctggaggtggtcggagataccaaagcaccgtcaatgcctacaagaccattgcccgagaggaagggttccggggcctctggaaagggacctctcccaatgttgctcgtaatgccattgtcaactgtgctgagctggtgacctatgacctcatcaaggatgccctcctgaaagccaacctcatgacagatgacctcccttgccacttcacttctgcctttggggcaggcttctgcaccactgtcatcgcctcccctgtagacgtggtcaagacgagatacatgaactctgccctgggccagtacagtagcgctggccactgtgcccttaccatgctccagaaggaggggccccgagccttctacaaagggttcatgccctcctttctccgcttgggttcctggaacgtggtgatgttcgtcacctatgagcagctgaaacgagccctcatggctgcctgcacttcccgagaggctcccttctgagcctctcctgctgctgacctgatcacctctggctttgtctctagccgggccatgctttccttttcttccttctttctcttccctccttcccttctctccttccctctttccccacctcttccttccgctcctttacctaccaccttccctctttctacattctcatctactcattgtctcagtgctggtggagttgacatttgacagtgtgggaggcctcgtaccagccaggatcccaagcgtcccgtcccttggaaagttcagccagaatcttcgtcctgcccccgacagcccagcctagcccacttgtcatccataaagcaagctcaaccttgagaatcttcgtcctgcccccgacaagtgggctaggctgggctgtnccgggctagttc

SEQ ID NO: 35623 - DNA, 2119 bp, Homo sapiens
agccgcgcgctcgctcgcaggagggtgggtagtttgcccagcgtaggggggctgggcccataaaagaggaagtgcacttaagacacggccccgctggacgctgttagaaaccgtcctggctgggaaggcaagaggtgtgtgactggacaagacttgtttctggcggtcagtcttgccatcctcacagaggttggcggcccgagagagtgtgaggcagaggcggggagtggcaagggagtgaccatctcggggaacgaaggagtaaacgcggtgatgggacgcacggaaacgggagtggagaaagtcatggagagaaccctaggcggggcggtccccgcggaaaggcggctgctccagggtctccgcacccaagtaggagctggcaggcccggccccgccccgcaggccccaccccgggccccgcccccgaggcttaagccgcgccgccgcctgcgcggagccccactgcgaagcccagctgcgcgcgccttgggattgactgtccacgctcgcccggctcgtccgacgcgccctccgccagccgacagacacagccgcacgcactgccgtgttctccctgcggctcggacacatagtatgaccattaggtgtttcgtctcccacccattttctatggaaaaccaaggggatcgggccatgatagccactggcagctttgaagaacgggacacctttagagaagcttgatcttggaggcctcaccgtgagaccttacaaagccggattccggcagagttcctctatctcgtcttgttgctgattaaaggtgcccctgtctccagtttttctccatctcctgggacgtagcaggaaatcagcatcatggttgggttcaaggccacagatgtgccccctactgccactgtgaagtttcttggggctggcacagctgcctgcatcgcagatctcatcacctttcctctggatactgctaaagtccggttacagatccaaggagaaagtcaggggccagtgcgcgctacagccagcgcccagtaccgcggtgtgatgggcaccattctgaccatggtgcgtactgagggcccccgaagcctctacaatgggctggttgccggcctgcagcgccaaatgagctttgcctctgtccgcatcggcctgtatgattctgtcaaacagttctacaccaagggctctgagcatgccagcattgggagccgcctcctagcaggcagcaccacaggtgccctggctgtggctgtggcccagcccacggatgtggtaaaggtccgattccaagctcaggcccgggctggaggtggtcggagataccaaagcaccgtcaatgcctacaagaccattgcccgagaggaagggttccggggcctctggaaagggacctctcccaatgttgctcgtaatgccattgtcaactgtgctgagctggtgacctatgacctcatcaaggatgccctcctgaaagccaacctcatgacagatgacctcccttgccacttcacttctgcctttggggcaggcttctgcaccactgtcatcgcctcccctgtagacgtggtcaagacgagatacatgaactctgccctgggccagtacagtagcgctggccactgtgcccttaccatgctccagaaggaggggccccgagccttctacaaagggttcatgccctcctttctccgcttgggttcctggaacgtggtgatgttcgtcacctatgagcagctgaaacgagccctcatggctgcctgcacttcccgagaggctcccttctgagcctctcctgctgctgacctgatcacctctggctttgtctctagccgggccatgctttccttttcttccttctttctcttccctccttcccttctctccttccctctttccccacctcttccttccgctcctttacctaccaccttccctctttctacattctcatctactcattgtctcagtgctggtggagttgacatttgacagtgtgggaggcctcgtaccagccaggatcccaagcgtcccgtcccttggaaagttcagccagaatcttcgtactgaacccgtcaccaacagactgactgtcttgcccagcgtttatcctctagagtcagctatcagcggt

SEQ ID NO: 35624 - DNA, 2153 bp, Homo sapiens
agccgcgcgctcgctcgcaggagggtgggtagtttgcccagcgtaggggggctgggcccataaaagaggaagtgcacttaagacacggccccgctggacgctgttagaaaccgtcctggctgggaaggcaagaggtgtgtgactggacaagacttgtttctggcggtcagtcttgccatcctcacagaggttggcggcccgagagagtgtgaggcagaggcggggagtggcaagggagtgaccatctcggggaacgaaggagtaaacgcggtgatgggacgcacggaaacgggagtggagaaagtcatggagagaaccctaggcggggcggtccccgcggaaaggcggctgctccagggtctccgcacccaagtaggagctggcaggcccggccccgccccgcaggccccaccccgggccccgcccccgaggcttaagccgcgccgccgcctgcgcggagccccactgcgaagcccagctgcgcgcgccttgggattgactgtccacgctcgcccggctcgtccgacgcgccctccgccagccgacagacacagccgcacgcactgccgtgttctccctgcggctcggacacatagtatgaccattaggtgtttcgtctcccacccattttctatggaaaaccaaggggatcgggccatgatagccactggcagctttgaagaacgggacacctttagagaagcttgatcttggaggcctcaccgtgagaccttacaaagccggattccggcagagttcctctatctcgtcttgttgctgattaaaggtgcccctgtctccagtttttctccatctcctgggacgtagcaggaaatcagcatcatggttgggttcaaggccacagatgtgccccctactgccactgtgaagtttcttggggctggcacagctgcctgcatcgcagatctcatcacctttcctctggatactgctaaagtccggttacagatccaaggagaaagtcaggggccagtgcgcgctacagccagcgcccagtaccgcggtgtgatgggcaccattctgaccatggtgcgtactgagggcccccgaagcctctacaatgggctggttgccggcctgcagcgccaaatgagctttgcctctgtccgcatcggcctgtatgattctgtcaaacagttctacaccaagggctctgagcatgccagcattgggagccgcctcctagcaggcagcaccacaggtgccctggctgtggctgtggcccagcccacggatgtggtaaaggtccgattccaagctcaggcccgggctggaggtggtcggagataccaaagcaccgtcaatgcctacaagaccattgcccgagaggaagggttccggggcctctggaaagggacctctcccaatgttgctcgtaatgccattgtcaactgtgctgagctggtgacctatgacctcatcaaggatgccctcctgaaagccaacctcatgacagatgacctcccttgccacttcacttctgcctttggggcaggcttctgcaccactgtcatcgcctcccctgtagacgtggtcaagacgagatacatgaactctgccctgggccagtacagtagcgctggccactgtgcccttaccatgctccagaaggaggggccccgagccttctacaaagggttcatgccctcctttctccgcttgggttcctggaacgtggtgatgttcgtcacctatgagcagctgaaacgagccctcatggctgcctgcacttcccgagaggctcccttctgagcctctcctgctgctgacctgatcacctctggctttgtctctagccgggccatgctttccttttcttccttctttctcttccctccttcccttctctccttccctctttccccacctcttccttccgctcctttacctaccaccttccctctttccccacctcttccttccgctcctttacctaccaccttccctctttctacattctcatctactcattgtctcagtgctggtggagttgacatttgacagtgtgggaggcctcgtaccagccaggatcccaagcgtcccgtcccttggaaagttcagccagaatcttcgtcctgcccccgacagcccagcctagcccacttgtcatccataaagcaagctcaaccttg

SEQ ID NO: 35625 - DNA, 2008 bp, Homo sapiens
  misc_feature (1887)..(1888): n is a, c, g, or t
  misc_feature (1893)..(1893): n is a, c, g, or t
agccgcgcgctcgctcgcaggagggtgggtagtttgcccagcgtaggggggctgggcccataaaagaggaagtgcacttaagacacggccccgctggacgctgttagaaaccgtcctggctgggaaggcaagaggtgtgtgactggacaagacttgtttctggcggtcagtcttgccatcctcacagaggttggcggcccgagagagtgtgaggcagaggcggggagtggcaagggagtgaccatctcggggaacgaaggagtaaacgcggtgatgggacgcacggaaacgggagtggagaaagtcatggagagaaccctaggcggggcggtccccgcggaaaggcggctgctccagggtctccgcacccaagtaggagctggcaggcccggccccgccccgcaggccccaccccgggccccgcccccgaggcttaagccgcgccgccgcctgcgcggagccccactgcgaagcccagctgcgcgcgccttgggattgactgtccacgctcgcccggctcgtccgacgcgccctccgccagccgacagacacagccgcacgcactgccgtgttctccctgcggctcggacacatagtatgaccattaggtgtttcgtctcccacccattttctatggaaaaccaaggggatcgggccatgatagccactggcagctttgaagaacgggacacctttagagaagcttgatcttggaggcctcaccgtgagaccttacaaagccggattccggcagagttcctctatctcgtcttgttgctgattaaaggtgcccctgtctccagtttttctccatctcctgggacgtagcaggaaatcagcatcatggttgggttcaaggccacagatgtgccccctactgccactgtgaagtttcttggggctggcacagctgcctgcatcgcagatctcatcacctttcctctggatactgctaaagtccggttacagatccaaggagaaagtcaggggccagtgcgcgctacagccagcgcccagtaccgcggtgtgatgggcaccattctgaccatggtgcgtactgagggcccccgaagcctctacaatgggctggttgccggcctgcagcgccaaatgagctttgcctctgtccgcatcggcctgtatgattctgtcaaacagttctacaccaagggctctgagcatgccagcattgggagccgcctcctagcaggcagcaccacaggtgccctggctgtggctgtggcccagcccacggatgtggtaaaggtccgattccaagctcaggcccgggctggaggtggtcggagataccaaagcaccgtcaatgcctacaagaccattgcccgagaggaagggttccggggcctctggaaagggacctctcccaatgttgctcgtaatgccattgtcaactgtgctgagctggtgacctatgacctcatcaaggatgccctcctgaaagccaacctcatgacagatgacctcccttgccacttcacttctgcctttggggcaggcttctgcaccactgtcatcgcctcccctgtagacgtggtcaagacgagatacatgaactctgccctgggccagtacagtagcgctggccactgtgcccttaccatgctccagaaggaggggccccgagccttctacaaagggttcatgccctcctttctccgcttgggttcctggaacgtggtgatgttcgtcacctatgagcagctgaaacgagccctcatggctgcctgcacttcccgagaggctcccttctgagcctctcctgctgctgacctgatcacctctggctttgtctctagccgggccatgctttccttttcttccttctttctcttccctccttcccttctctccttccgtctctttctnntactntctctcttctctatactctccttcctttctttcttccttcctctctgtctctctttccctctctctctctatttctcacttactctccttccttccttcatctcgtctcttctct

SEQ ID NO: 35626 - DNA, 1861 bp, Homo sapiens
agccgcgcgctcgctcgcaggagggtgggtagtttgcccagcgtaggggggctgggcccataaaagaggaagtgcacttaagacacggccccgctggacgctgttagaaaccgtcctggctgggaaggcaagaggtgtgtgactggacaagacttgtttctggcggtcagtcttgccatcctcacagaggttggcggcccgagagagtgtgaggcagaggcggggagtggcaagggagtgaccatctcggggaacgaaggagtaaacgcggtgatgggacgcacggaaacgggagtggagaaagtcatggagagaaccctaggcggggcggtccccgcggaaaggcggctgctccagggtctccgcacccaagtaggagctggcaggcccggccccgccccgcaggccccaccccgggccccgcccccgaggcttaagccgcgccgccgcctgcgcggagccccactgcgaagcccagctgcgcgcgccttgggattgactgtccacgctcgcccggctcgtccgacgcgccctccgccagccgacagacacagccgcacgcactgccgtgttctccctgcggctcggacacatagtatgaccattaggtgtttcgtctcccacccattttctatggaaaaccaaggggatcgggccatgatagccactggcagctttgaagaacgggacacctttagagaagcttgatcttggaggcctcaccgtgagaccttacaaagccggattccggcagagttcctctatctcgtcttgttgctgattaaaggtgcccctgtctccagtttttctccatctcctgggacgtagcaggaaatcagcatcatggttgggttcaaggccacagatgtgccccctactgccactgtgaagtttcttggggctggcacagctgcctgcatcgcagatctcatcacctttcctctggatactgctaaagtccggttacagatccaaggagaaagtcaggggccagtgcgcgctacagccagcgcccagtaccgcggtgtgatgggcaccattctgaccatggtgcgtactgagggcccccgaagcctctacaatgggctggttgccggcctgcagcgccaaatgagctttgcctctgtccgcatcggcctgtatgattctgtcaaacagttctacaccaagggctctgagcatgccagcattgggagccgcctcctagcaggcagcaccacaggtgccctggctgtggctgtggcccagcccacggatgtggtaaaggtccgattccaagctcaggcccgggctggaggtggtcggagataccaaagcaccgtcaatgcctacaagaccattgcccgagaggaagggttccggggcctctggaaagggacctctcccaatgttgctcgtaatgccattgtcaactgtgctgagctggtgacctatgacctcatcaaggatgccctcctgaaagccaacctcatgacagatgacctcccttgccacttcacttctgcctttggggcaggcttctgcaccactgtcatcgcctcccctgtagacgtggtcaagacgagatacatgaactctgccctgggccagtacagtagcgctggccactgtgcccttaccatgctccagaaggaggggccccgagccttctacaaagggttcatgccctcctttctccgcttgggttcctggaacgtggtgatgttcgtcacctatgagcagctgaaacgagccctcatggctgcctgcacttcccgagaggctcccttctgagcctctcctgctgctgacctgatcacctctggctttgggcacggacacatcgctcagcacgcggatgggatcctctaaagcgcgcaga

SEQ ID NO: 35627 - DNA, 2007 bp, Homo sapiens
  misc_feature (102)..(102): n is a, c, g, or t
  misc_feature (104)..(105): n is a, c, g, or t
  misc_feature (118)..(118): n is a, c, g, or t
gcgctgcgcgatgctacttggaatagttcacagcctcgtcccgcgactcgttgcccgaacgtctgctactctcgtacgagtacgacaatgaacacagacgcntnntactgccgagatncatccctgcggctcggacacatagtatgaccattaggtgtttcgtctcccacccattttctatggaaaaccaaggggatcgggccatgatagccactggcagctttgaagaacgggacacctttagagaagcttgatcttggaggcctcaccgtgagaccttacaaagccggattccggcagagttcctctatctcgtcttgttgctgattaaaggtgcccctgtctccagtttttctccatctcctgggacgtagcaggaaatcagcatcatggttgggttcaaggccacagatgtgccccctactgccactgtgaagtttcttggggctggcacagctgcctgcatcgcagatctcatcacctttcctctggatactgctaaagtccggttacagatccaaggagaaagtcaggggccagtgcgcgctacagccagcgcccagtaccgcggtgtgatgggcaccattctgaccatggtgcgtactgagggcccccgaagcctctacaatgggctggttgccggcctgcagcgccaaatgagctttgcctctgtccgcatcggcctgtatgattctgtcaaacagttctacaccaagggctctgagcatgccagcattgggagccgcctcctagcaggcagcaccacaggtgccctggctgtggctgtggcccagcccacggatgtggtaaaggtccgattccaagctcaggcccgggctggaggtggtcggagataccaaagcaccgtcaatgcctacaagaccattgcccgagaggaagggttccggggcctctggaaagggacctctcccaatgttgctcgtaatgccattgtcaactgtgctgagctggtgacctatgacctcatcaaggatgccctcctgaaagccaacctcatgacagatgacctcccttgccacttcacttctgcctttggggcaggcttctgcaccactgtcatcgcctcccctgtagacgtggtcaagacgagatacatgaactctgccctgggccagtacagtagcgctggccactgtgcccttaccatgctccagaaggaggggccccgagccttctacaaagggttcatgccctcctttctccgcttgggttcctggaacgtggtgatgttcgtcacctatgagcagctgaaacgagccctcatggctgcctgcacttcccgagaggctcccttctgagcctctcctgctgctgacctgatcacctctggctttgtctctagccgggccatgctttccttttcttccttctttctcttccctccttcccttctctccttccctctttccccacctcttccttccgctcctttacctaccaccttccctctttctacattctcatctactcattgtctcagtgctggtggagttgacatttgacagtgtgggaggcctcgtaccagccaggatcccaagcgtcccgtcccttggaaagttcagccagaatcttcgtcctgcccccgacagcccagcctagcccacttgtcatccataaagcaagctcaaccttgaaaaaaaaaaaaaaacaaaaaaaaaaaaaaaaaaaaaaaaaaaaaaaaaagaaaaaaaaaaaaaaaaaaaacaacacaaaaaacaacaaaaacaacaaacaaacaaaaaaagggggggggacccacaaaacaacccccacgcagggggcaaccaaaaacggcacgcaaaccaccttattgacaaaaaaaagagacgcccaccataaaagagacacgaccaacaaaaacaacaggaccgcgagcgcaccctaaaacaacaaggcctgacagaaaacaaaccactagcggaccacacagagaaaacagcacacaacggggagaaacaacacgagagcgacaaaacagccacagaa

SEQ ID NO: 35628 - DNA, 1997 bp, Homo sapiens
  misc_feature (92)..(92): n is a, c, g, or t
  misc_feature (94)..(95): n is a, c, g, or t
  misc_feature (108)..(108): n is a, c, g, or t
gggctgcgcagatgcggatatggaatgttcacgctctcccggatccgtccgaacgtcgctactctgtacgagtcacgacatacacagacgcntnntactgccgagatncatccctgcggctcggacacatagtatgaccattaggtgtttcgtctcccacccattttctatggaaaaccaaggggatcgggccatgatagccactggcagctttgaagaacgggacacctttagagaagcttgatcttggaggcctcaccgtgagaccttacaaagccggattccggcagagttcctctatctcgtcttgttgctgattaaaggtgcccctgtctccagtttttctccatctcctgggacgtagcaggaaatcagcatcatggttgggttcaaggccacagatgtgccccctactgccactgtgaagtttcttggggctggcacagctgcctgcatcgcagatctcatcacctttcctctggatactgctaaagtccggttacagatccaaggagaaagtcaggggccagtgcgcgctacagccagcgcccagtaccgcggtgtgatgggcaccattctgaccatggtgcgtactgagggcccccgaagcctctacaatgggctggttgccggcctgcagcgccaaatgagctttgcctctgtccgcatcggcctgtatgattctgtcaaacagttctacaccaagggctctgagcatgccagcattgggagccgcctcctagcaggcagcaccacaggtgccctggctgtggctgtggcccagcccacggatgtggtaaaggtccgattccaagctcaggcccgggctggaggtggtcggagataccaaagcaccgtcaatgcctacaagaccattgcccgagaggaagggttccggggcctctggaaagggacctctcccaatgttgctcgtaatgccattgtcaactgtgctgagctggtgacctatgacctcatcaaggatgccctcctgaaagccaacctcatgacagatgacctcccttgccacttcacttctgcctttggggcaggcttctgcaccactgtcatcgcctcccctgtagacgtggtcaagacgagatacatgaactctgccctgggccagtacagtagcgctggccactgtgcccttaccatgctccagaaggaggggccccgagccttctacaaagggttcatgccctcctttctccgcttgggttcctggaacgtggtgatgttcgtcacctatgagcagctgaaacgagccctcatggctgcctgcacttcccgagaggctcccttctgagcctctcctgctgctgacctgatcacctctggctttgtctctagccgggccatgctttccttttcttccttctttctcttccctccttcccttctctccttccctctttccccacctcttccttccgctcctttacctaccaccttccctctttctacattctcatctactcattgtctcagtgctggtggagttgacatttgacagtgtgggaggcctcgtaccagccaggatcccaagcgtcccgtcccttggaaagttcagccagaatcttcgtcctgcccccgacagcccagcctagcccacttgtcatccataaagcaagctcaaccttgaaaaaaaaaaaaaaacaaaaaaaaaaaaaaaaaaaaaaaaaaaaaaaaaagaaaaaaaaaaaaaaaaaaaacaacacaaaaaacaacaaaaacaacaaacaaacaaaaaaagggggggggacccacaaaacaacccccacgcagggggcaaccaaaaacggcacgcaaaccaccttattgacaaaaaaaagagacgcccaccataaaagagacacgaccaacaaaaacaacaggaccgcgagcgcaccctaaaacaacaaggcctgacagaaaacaaaccactagcggaccacacagagaaaacagcacacaacggggagaaacaacacgagagcgacaaaacagccacagaa

SEQ ID NO: 35629 - DNA, 1844 bp, Homo sapiens
agccgcgcgctcgctcgcaggagggtgggtagtttgcccagcgtaggggggctgggcccataaaagaggaagtgcacttaagacacggccccgctggacgctgttagaaaccgtcctggctgggaaggcaagaggtgtgtgactggacaagacttgtttctggcggtcagtcttgccatcctcacagaggttggcggcccgagagagtgtgaggcagaggcggggagtggcaagggagtgaccatctcggggaacgaaggagtaaacgcggtgatgggacgcacggaaacgggagtggagaaagtcatggagagaaccctaggcggggcggtccccgcggaaaggcggctgctccagggtctccgcacccaagtaggagctggcaggcccggccccgccccgcaggccccaccccgggccccgcccccgaggcttaagccgcgccgccgcctgcgcggagccccactgcgaagcccagctgcgcgcgccttgggattgactgtccacgctcgcccggctcgtccgacgcgccctccgccagccgacagacacagccgcacgcactgccgtgttctccctgcggctcggacacatagtatgaccattaggtgtttcgtctcccacccattttctatggaaaaccaaggggatcgggccatgatagccactggcagctttgaagaacgggacacctttagagaagcttgatcttggaggcctcaccgtgagaccttacaaagccggattccggcagagttcctctatctcgtcttgttgctgattaaaggtgcccctgtctccagtttttctccatctcctgggacgtagcaggaaatcagcatcatggttgggttcaaggccacagatgtgccccctactgccactgtgaagtttcttggggctggcacagctgcctgcatcgcagatctcatcacctttcctctggatactgctaaagtccggttacagatccaaggagaaagtcaggggccagtgcgcgctacagccagcgcccagtaccgcggtgtgatgggcaccattctgaccatggtgcgtactgagggcccccgaagcctctacaatgggctggttgccggcctgcagcgccaaatgagctttgcctctgtccgcatcggcctgtatgattctgtcaaacagttctacaccaagggctctgagcatgccagcattgggagccgcctcctagcaggcagcaccacaggtgccctggctgtggctgtggcccagcccacggatgtggtaaaggtccgattccaagctcaggcccgggctggaggtggtcggagataccaaagcaccgtcaatgcctacaagaccattgcccgagaggaagggttccggggcctctggaaagggacctctcccaatgttgctcgtaatgccattgtcaactgtgctgagctggtgacctatgacctcatcaaggatgccctcctgaaagccaacctcatgacagatgacctcccttgccacttcacttctgcctttggggcaggcttctgcaccactgtcatcgcctcccctgtagacgtggtcaagacgagatacatgaactctgccctgggccagtacagtagcgctggccactgtgcccttaccatgctccagaaggaggggccccgagccttctacaaagggttcatgccctcctttctccgcttgggttcctggaacgtggtgatgttcgtcacctatgagcagctgaaacgagccctcatggctgcctgcacttcccgagaggctcccttctgagcctctcctgctgctgacctgatcacctctggctttggccaatgccgagaatggtctgaagtacatcgagg

SEQ ID NO: 35630 - DNA, 1990 bp, Homo sapiens
gtctttgggcagcagctgggtcttattcttctctggccttcacaacatcctgcaacccagctcaaggtcaggaatgtgacagactcatgtcatcatatctctgatgcccagagaagggataccatttgcctgagccttctcagtactgtttaatcagcctgtgagaactttccttgtgaaaggccctgtctgtgcctggggctgataaaacagcaagaacgaactgaggagctgggcagcagtgcaaagcaaatactaccagctttggtgcctattccggcagagttcctctatctcgtcttgttgctgattaaaggtgcccctgtctccagtttttctccatctcctgggacgtagcaggaaatcagcatcatggttgggttcaaggccacagatgtgccccctactgccactgtgaagtttcttggggctggcacagctgcctgcatcgcagatctcatcacctttcctctggatactgctaaagtccggttacagatccaaggagaaagtcaggggccagtgcgcgctacagccagcgcccagtaccgcggtgtgatgggcaccattctgaccatggtgcgtactgagggcccccgaagcctctacaatgggctggttgccggcctgcagcgccaaatgagctttgcctctgtccgcatcggcctgtatgattctgtcaaacagttctacaccaagggctctgagcatgccagcattgggagccgcctcctagcaggcagcaccacaggtgccctggctgtggctgtggcccagcccacggatgtggtaaaggtccgattccaagctcaggcccgggctggaggtggtcggagataccaaagcaccgtcaatgcctacaagaccattgcccgagaggaagggttccggggcctctggaaagggacctctcccaatgttgctcgtaatgccattgtcaactgtgctgagctggtgacctatgacctcatcaaggatgccctcctgaaagccaacctcatgacagatgacctcccttgccacttcacttctgcctttggggcaggcttctgcaccactgtcatcgcctcccctgtagacgtggtcaagacgagatacatgaactctgccctgggccagtacagtagcgctggccactgtgcccttaccatgctccagaaggaggggccccgagccttctacaaagggttcatgccctcctttctccgcttgggttcctggaacgtggtgatgttcgtcacctatgagcagctgaaacgagccctcatggctgcctgcacttcccgagaggctcccttctgagcctctcctgctgctgacctgatcacctctggctttgtctctagccgggccatgctttccttttcttccttctttctcttccctccttcccttctctccttccctctttccccacctcttccttccgctcctttacctaccaccttccctctttctacattctcatctactcattgtctcagtgctggtggagttgacatttgacagtgtgggaggcctcgtaccagccaggatcccaagcgtcccgtcccttggaaagttcagccagaatcttcgtcctgcccccgacagcccagcctagcccacttgtcatccataaagcaagctcaaccttgaaaaaaaaaaaaaaacaaaaaaaaaaaaaaaaaaaaaaaaaaaaaaaaaagaaaaaaaaaaaaaaaaaaaacaacacaaaaaacaacaaaaacaacaaacaaacaaaaaaagggggggggacccacaaaacaacccccacgcagggggcaaccaaaaacggcacgcaaaccaccttattgacaaaaaaaagagacgcccaccataaaagagacacgaccaacaaaaacaacaggaccgcgagcgcaccctaaaacaacaaggcctgacagaaaacaaaccactagcggaccacacagagaaaacagcacacaacggggagaaacaacacgagagcgacaaaacagccacagaa

SEQ ID NO: 35631 - DNA, 1725 bp, Homo sapiens
agccgcgcgctcgctcgcaggagggtgggtagtttgcccagcgtaggggggctgggcccataaaagaggaagtgcacttaagacacggccccgctggacgctgttagaaaccgtcctggctgggaaggcaagaggtgtgtgactggacaagacttgtttctggcggtcagtcttgccatcctcacagaggttggcggcccgagagagtgtgaggcagaggcggggagtggcaagggagtgaccatctcggggaacgaaggagtaaacgcggtgatgggacgcacggaaacgggagtggagaaagtcatggagagaaccctaggcggggcggtccccgcggaaaggcggctgctccagggtctccgcacccaagtaggagctggcaggcccggccccgccccgcaggccccaccccgggccccgcccccgaggcttaagccgcgccgccgcctgcgcggagccccactgcgaagcccagctgcgcgcgccttgggattgactgtccacgctcgcccggctcgtccgacgcgccctccgccagccgacagacacagccgcacgcactgccgtgttctccctgcggctcggacacatagtatgaccattaggtgtttcgtctcccacccattttctatggaaaaccaaggggatcgggccatgatagccactggcagctttgaagaacgggacacctttagagaagcttgatcttggaggcctcaccgtgagaccttacaaagccggattccggcagagttcctctatctcgtcttgttgctgattaaaggtgcccctgtctccagtttttctccatctcctgggacgtagcaggaaatcagcatcatggttgggttcaaggccacagatgtgccccctactgccactgtgaagtttcttggggctggcacagctgcctgcatcgcagatctcatcacctttcctctggatactgctaaagtccggttacagatccaaggagaaagtcaggggccagtgcgcgctacagccagcgcccagtaccgcggtgtgatgggcaccattctgaccatggtgcgtactgagggcccccgaagcctctacaatgggctggttgccggcctgcagcgccaaatgagctttgcctctgtccgcatcggcctgtatgattctgtcaaacagttctacaccaagggctctgagcatgccagcattgggagccgcctcctagcaggcagcaccacaggtgccctggctgtggctgtggcccagcccacggatgtggtaaaggtccgattccaagctcaggcccgggctggaggtggtcggagataccaaagcaccgtcaatgcctacaagaccattgcccgagaggaagggttccggggcctctggaaagggacctctcccaatgttgctcgtaatgccattgtcaactgtgctgagctggtgacctatgacctcatcaaggatgccctcctgaaagccaacctcatgacagatgacctcccttgccacttcacttctgcctttggggcaggcttctgcaccactgtcatcgcctcccctgtagacgtggtcaagacgagatacatgaactctgccctgggccagtacagtagcgctggccactgtgccctcctgaaagccaacctcatgacagatgacctcccttgccacttcacttctgcctttgggcagattgcactgactccctgtaacgtgtcagacgaaacatcgtcaatagct

SEQ ID NO: 35632 - DNA, 2431 bp, Homo sapiens
agccgcgcgctcgctcgcaggagggtgggtagtttgcccagcgtaggggggctgggcccataaaagaggaagtgcacttaagacacggccccgctggacgctgttagaaaccgtcctggctgggaaggcaagaggtgtgtgactggacaagacttgtttctggcggtcagtcttgccatcctcacagaggttggcggcccgagagagtgtgaggcagaggcggggagtggcaagggagtgaccatctcggggaacgaaggagtaaacgcggtgatgggacgcacggaaacgggagtggagaaagtcatggagagaaccctaggcggggcggtccccgcggaaaggcggctgctccagggtctccgcacccaagtaggagctggcaggcccggccccgccccgcaggccccaccccgggccccgcccccgaggcttaagccgcgccgccgcctgcgcggagccccactgcgaagcccagctgcgcgcgccttgggattgactgtccacgctcgcccggctcgtccgacgcgccctccgccagccgacagacacagccgcacgcactgccgtgttctccctgcggctcggacacatagtatgaccattaggtgtttcgtctcccacccattttctatggaaaaccaaggggatcgggccatgatagccactggcagctttgaagaacgggacacctttagagaagcttgatcttggaggcctcaccgtgagaccttacaaagccggattccggcagagttcctctatctcgtcttgttgctgattaaaggtgcccctgtctccagtttttctccatctcctgggacgtagcaggaaatcagcatcatggttgggttcaaggccacagatgtgccccctactgccactgtgaagtttcttggggctggcacagctgcctgcatcgcagatctcatcacctttcctctggatactgctaaagtccggttacagatccaaggagaaagtcaggggccagtgcgcgctacagccagcgcccagtaccgcggtgtgatgggcaccattctgaccatggtgcgtactgagggcccccgaagcctctacaatgggctggttgccggcctgcagcgccaaatgagctttgcctctgtccgcatcggcctgtatgattctgtcaaacagttctacaccaagggctctgagcatgccagcattgggagccgcctcctagcaggcagcaccacaggtgccctggctgtggctgtggcccagcccacggatgtggtaaaggtccgattccaagctcaggcccgggctggaggtggtcggagataccaaagcaccgtcaatgcctacaagaccattgcccgagaggaagggttccggggcctctggaaagggacctctcccaatgttgctcgtaatgccattgtcaactgtgctgagctggtgacctatgacctcatcaaggatgccctcctgaaagccaacctcatgacagttggggcaggcttctgcaccactgtcatcgcctcccctgtagacgtggtcaagacgagatacatgaactctgccctgggccagtacagtagcgctggccactgtgcccttaccatgctccagaaggaggggccccgagccttctacaaagggttcatgccctcctttctccgcttgggttcctggaacgtggtgatgttcgtcacctatgagcagctgaaacgagccctcatggctgcctgcacttcccgagaggctcccttctgagcctctcctgctgctgacctgatcacctctggctttgtctctagccgggccatgctttccttttcttccttctttctcttccctccttcccttctctccttccctctttccccacctcttccttccgctcctttacctaccaccttccctctttctacattctcatctactcattgtctcagtgctggtggagttgacatttgacagtgtgggaggcctcgtaccagccaggatcccaagcgtcccgtcccttggaaagttcagccagaatcttcgtcctgcccccgacagcccagcctagcccacttgtcatccataaagcaagctcaaccttgaaaaaaaaaaaaaaacaaaaaaaaaaaaaaaaaaaaaaaaaaaaaaaaaagaaaaaaaaaaaaaaaaaaaacaacacaaaaaacaacaaaaacaacaaacaaacaaaaaaagggggggggacccacaaaacaacccccacgcagggggcaaccaaaaacggcacgcaaaccaccttattgacaaaaaaaagagacgcccaccataaaagagacacgaccaacaaaaacaacaggaccgcgagcgcaccctaaaacaacaaggcctgacagaaaacaaaccactagcggaccacacagagaaaacagcacacaacggggagaaacaacacgagagcgacaaaacagccacagaa

SEQ ID NO: 35633 - DNA, 2078 bp, Homo sapiens
agccgcgcgctcgctcgcaggagggtgggtagtttgcccagcgtaggggggctgggcccataaaagaggaagtgcacttaagacacggccccgctggacgctgttagaaaccgtcctggctgggaaggcaagaggtgtgtgactggacaagacttgtttctggcggtcagtcttgccatcctcacagaggttggcggcccgagagagtgtgaggcagaggcggggagtggcaagggagtgaccatctcggggaacgaaggagtaaacgcggtgatgggacgcacggaaacgggagtggagaaagtcatggagagaaccctaggcggggcggtccccgcggaaaggcggctgctccagggtctccgcacccaagtaggagctggcaggcccggccccgccccgcaggccccaccccgggccccgcccccgaggcttaagccgcgccgccgcctgcgcggagccccactgcgaagcccagctgcgcgcgccttgggattgactgtccacgctcgcccggctcgtccgacgcgccctccgccagccgacagacacagccgcacgcactgccgtgttctccctgcggctcggacacatagtatgaccattaggtgtttcgtctcccacccattttctatggaaaaccaaggggatcgggccatgatagccactggcagctttgaagaacgggacacctttagagaagcttgatcttggaggcctcaccgtgagaccttacaaagccggattccggcagagttcctctatctcgtcttgttgctgattaaaggtgcccctgtctccagtttttctccatctcctgggacgtagcaggaaatcagcatcatggttgggttcaaggccacagatgtgccccctactgccactgtgaagtttcttggggctggcacagctgcctgcatcgcagatctcatcacctttcctctggatactgctaaagtccggttacagatccaaggagaaagtcaggggccagtgcgcgctacagccagcgcccagtaccgcggtgtgatgggcaccattctgaccatggtgcgtactgagggcccccgaagcctctacaatgggctggttgccggcctgcagcgccaaatgagctttgcctctgtccgcatcggcctgtatgattctgtcaaacagttctacaccaagggctctgagcatgccagcattgggagccgcctcctagcaggcagcaccacaggtgccctggctgtggctgtggcccagcccacggatgtggtaaaggtccgattccaagctcaggcccgggctggaggtggtcggagataccaaagcaccgtcaatgcctacaagaccattgcccgagaggaagggttccggggcctctggaaagggacctctcccaatgttgctcgtaatgccattgtcaactgtgctgagctggtgacctatgacctcatcaaggatgccctcctgaaagccaacctcatgacagttggggcaggcttctgcaccactgtcatcgcctcccctgtagacgtggtcaagacgagatacatgaactctgccctgggccagtacagtagcgctggccactgtgcccttaccatgctccagaaggaggggccccgagccttctacaaagggttcatgccctcctttctccgcttgggttcctggaacgtggtgatgttcgtcacctatgagcagctgaaacgagccctcatggctgcctgcacttcccgagaggctcccttctgagcctctcctgctgctgacctgatcacctctggctttgtctctagccgggccatgctttccttttcttccttctttctcttccctccttcccttctctccttccctctttccccacctcttccttccgctcctttacctaccaccttccctctttctacattctcatctactcattgtctcagtgctggtggagttgacatttgacagtgtgggaggcctcgtaccagccaggatcccaagcgtcccgtcccttggaaagttcagccagaatcttcgtcctgcccccgacagcccagcctagcccacttgtcatccataaagcaagctcaaccttg

SEQ ID NO: 35634 - DNA, 2280 bp, Homo sapiens
agccgcgcgctcgctcgcaggagggtgggtagtttgcccagcgtaggggggctgggcccataaaagaggaagtgcacttaagacacggccccgctggacgctgttagaaaccgtcctggctgggaaggcaagaggtgtgtgactggacaagacttgtttctggcggtcagtcttgccatcctcacagaggttggcggcccgagagagtgtgaggcagaggcggggagtggcaagggagtgaccatctcggggaacgaaggagtaaacgcggtgatgggacgcacggaaacgggagtggagaaagtcatggagagaaccctaggcggggcggtccccgcggaaaggcggctgctccagggtctccgcacccaagtaggagctggcaggcccggccccgccccgcaggccccaccccgggccccgcccccgaggcttaagccgcgccgccgcctgcgcggagccccactgcgaagcccagctgcgcgcgccttgggattgactgtccacgctcgcccggctcgtccgacgcgccctccgccagccgacagacacagccgcacgcactgccgtgttctccctgcggctcggacacatagtatgaccattaggtgtttcgtctcccacccattttctatggaaaaccaaggggatcgggccatgatagccactggcagctttgaagaacgggacacctttagagaagcttgatcttggaggcctcaccgtgagaccttacaaagccggattccggcagagttcctctatctcgtcttgttgctgattaaaggtgcccctgtctccagtttttctccatctcctgggacgtagcaggaaatcagcatcatggttgggttcaaggccacagatgtgccccctactgccactgtgaagtttcttggggctggcacagctgcctgcatcgcagatctcatcacctttcctctggatactgctaaagtccggttacagatccaaggagaaagtcaggggccagtgcgcgctacagccagcgcccagtaccgcggtgtgatgggcaccattctgaccatggtgcgtactgagggcccccgaagcctctacaatgggctggttgccggcctgcagcgccaaatgagctttgcctctgtccgcatcggcctgtatgattctgtcaaacagttctacaccaagggctctgagcatgccagcattgggagccgcctcctagcaggcagcaccacaggtgccctggctgtggctgtggcccagcccacggatgtggtaaaggtccgattccaagctcaggcccgggctggaggtggtcggagataccaaagcaccgtcaatgcctacaagaccattgcccgagaggaagggttccggggcctctggaaagggacctctcccaatgttgctcgtaatgccattgtcaactgtgctgagctggtgacctatgacctcatcaaggatgccctcctgaaagccaacctcatgacaggttcatgccctcctttctccgcttgggttcctggaacgtggtgatgttcgtcacctatgagcagctgaaacgagccctcatggctgcctgcacttcccgagaggctcccttctgagcctctcctgctgctgacctgatcacctctggctttgtctctagccgggccatgctttccttttcttccttctttctcttccctccttcccttctctccttccctctttccccacctcttccttccgctcctttacctaccaccttccctctttctacattctcatctactcattgtctcagtgctggtggagttgacatttgacagtgtgggaggcctcgtaccagccaggatcccaagcgtcccgtcccttggaaagttcagccagaatcttcgtcctgcccccgacagcccagcctagcccacttgtcatccataaagcaagctcaaccttgaaaaaaaaaaaaaaacaaaaaaaaaaaaaaaaaaaaaaaaaaaaaaaaaagaaaaaaaaaaaaaaaaaaaacaacacaaaaaacaacaaaaacaacaaacaaacaaaaaaagggggggggacccacaaaacaacccccacgcagggggcaaccaaaaacggcacgcaaaccaccttattgacaaaaaaaagagacgcccaccataaaagagacacgaccaacaaaaacaacaggaccgcgagcgcaccctaaaacaacaaggcctgacagaaaacaaaccactagcggaccacacagagaaaacagcacacaacggggagaaacaacacgagagcgacaaaacagccacagaa

SEQ ID NO: 35635 - DNA, 1680 bp, Homo sapiens
tgactacgctgctgctgagttttcaccgggatttggagctgagtctgggcctctaccacttgcggctgctgtgcaaactgcagcgcagaggagagggctgcagtgggaacaccggctgggggcagcctcccgggcagctgcggcagtggggtgtgcaagctggcagcgttctgcacgggaggccccgtggaggggtcatactgctgctgactctgcctctgtccagcgagctgcgcgggcgcggtgtgatgggcaccattctgaccatggtgcgtactgagggcccccgaagcctctacaatgggctggttgccggcctgcagcgccaaatgagctttgcctctgtccgcatcggcctgtatgattctgtcaaacagttctacaccaagggctctgagcatgccagcattgggagccgcctcctagcaggcagcaccacaggtgccctggctgtggctgtggcccagcccacggatgtggtaaaggtccgattccaagctcaggcccgggctggaggtggtcggagataccaaagcaccgtcaatgcctacaagaccattgcccgagaggaagggttccggggcctctggaaagggacctctcccaatgttgctcgtaatgccattgtcaactgtgctgagctggtgacctatgacctcatcaaggatgccctcctgaaagccaacctcatgacagatgacctcccttgccacttcacttctgcctttggggcaggcttctgcaccactgtcatcgcctcccctgtagacgtggtcaagacgagatacatgaactctgccctgggccagtacagtagcgctggccactgtgcccttaccatgctccagaaggaggggccccgagccttctacaaagggttcatgccctcctttctccgcttgggttcctggaacgtggtgatgttcgtcacctatgagcagctgaaacgagccctcatggctgcctgcacttcccgagaggctcccttctgagcctctcctgctgctgacctgatcacctctggctttgtctctagccgggccatgctttccttttcttccttctttctcttccctccttcccttctctccttccctctttccccacctcttccttccgctcctttacctaccaccttccctctttctacattctcatctactcattgtctcagtgctggtggagttgacatttgacagtgtgggaggcctcgtaccagccaggatcccaagcgtcccgtcccttggaaagttcagccagaatcttcgtcctgcccccgacagcccagcctagcccacttgtcatccataaagcaagctcaaccttgaaaaaaaaaaaaaaacaaaaaaaaaaaaaaaaaaaaaaaaaaaaaaaaaagaaaaaaaaaaaaaaaaaaaacaacacaaaaaacaacaaaaacaacaaacaaacaaaaaaagggggggggacccacaaaacaacccccacgcagggggcaaccaaaaacggcacgcaaaccaccttattgacaaaaaaaagagacgcccaccataaaagagacacgaccaacaaaaacaacaggaccgcgagcgcaccctaaaacaacaaggcctgacagaaaacaaaccactagcggaccacacagagaaaacagcacacaacggggagaaacaacacgagagcgacaaaacagccacagaa

SEQ ID NO: 35636 - DNA, 1652 bp, Homo sapiens
agccgcgcgctcgctcgcaggagggtgggtagtttgcccagcgtaggggggctgggcccataaaagaggaagtgcacttaagacacggccccgctggacgctgttagaaaccgtcctggctgggaaggcaagaggtgtgtgactggacaagacttgtttctggcggtcagtcttgccatcctcacagaggttggcggcccgagagagtgtgaggcagaggcggggagtggcaagggagtgaccatctcggggaacgaaggagtaaacgcggtgatgggacgcacggaaacgggagtggagaaagtcatggagagaaccctaggcggggcggtccccgcggaaaggcggctgctccagggtctccgcacccaagtaggagctggcaggcccggccccgccccgcaggccccaccccgggccccgcccccgaggcttaagccgcgccgccgcctgcgcggagccccactgcgaagcccagctgcgcgcgccttgggattgactgtccacgctcgcccggctcgtccgacgcgccctccgccagccgacagacacagccgcacgcactgccgtgttctccctgcggctcggacacatagtatgaccattaggtgtttcgtctcccacccattttctatggaaaaccaaggggatcgggccatgatagccactggcagctttgaagaacgggacacctttagagaagcttgatcttggaggcctcaccgtgagaccttacaaagccggattccggcagagttcctctatctcgtcttgttgctgattaaaggtgcccctgtctccagtttttctccatctcctgggacgtagcaggaaatcagcatcatggttgggttcaaggccacagatgtgccccctactgccactgtgaagtttcttggggctggcacagctgcctgcatcgcagatctcatcacctttcctctggatactgctaaagtccggttacagatccaaggagaaagtcaggggccagtgcgcgctacagccagcgcccagtaccgcggtgtgatgggcaccattctgaccatggtgcgtactgagggcccccgaagcctctacaatgggctggttgccggcctgcagcgccaaatgagctttgcctctgtccgcatcggcctgtatgattctgtcaaacagttctacaccaagggctctgagcatgccagcattgggagccgcctcctagcaggcagcaccacaggtgccctggctgtggctgtggcccagcccacggatgtggtaaaggtccgattccaagctcaggcccgggctggaggtggtcggagataccaaagcaccgtcaatgcctacaagaccattgcccgagaggaagggttccggggcctctggaaagggacctctcccaatgttgctcgtaatgccattgtcaactgtgctgagctggtgacctatgacctcatcaaggatgccctcctgaaagccaacctcatgacagatgacctcccttgccacttcacttctgcctttggggcaggcttctgcaccactgtcatcgcctcccctgaattttgcttcctttgggagctcattctttttcccaaggctcacatgctccttgcctctgctctgtgcactcatgctcatacgcggatgggatcctctagaaccgc

SEQ ID NO: 35637 - DNA, 2123 bp, Homo sapiens
agccgcgcgctcgctcgcaggagggtgggtagtttgcccagcgtaggggggctgggcccataaaagaggaagtgcacttaagacacggccccgctggacgctgttagaaaccgtcctggctgggaaggcaagaggtgtgtgactggacaagacttgtttctggcggtcagtcttgccatcctcacagaggttggcggcccgagagagtgtgaggcagaggcggggagtggcaagggagtgaccatctcggggaacgaaggagtaaacgcggtgatgggacgcacggaaacgggagtggagaaagtcatggagagaaccctaggcggggcggtccccgcggaaaggcggctgctccagggtctccgcacccaagtaggagctggcaggcccggccccgccccgcaggccccaccccgggccccgcccccgaggcttaagccgcgccgccgcctgcgcggagccccactgcgaagcccagctgcgcgcgccttgggattgactgtccacgctcgcccggctcgtccgacgcgccctccgccagccgacagacacagccgcacgcactgccgtgttctccctgcggctcggacacatagtatgaccattaggtgtttcgtctcccacccattttctatggaaaaccaaggggatcgggccatgatagccactggcagctttgaagaacgggacacctttagagaagcttgatcttggaggcctcaccgtgagaccttacaaagccggattccggcagagttcctctatctcgtcttgttgctgattaaaggtgcccctgtctccagtttttctccatctcctgggacgtagcaggaaatcagcatcatggttgggttcaaggccacagatgtgccccctactgccactgtgaagtttcttggggctggcacagctgcctgcatcgcagatctcatcacctttcctctggatactgctaaagtccggttacagatccaaggagaaagtcaggggccagtgcgcgctacagccagcgcccagtaccgcggtgtgatgggcaccattctgaccatggtgcgtactgagggcccccgaagcctctacaatgggctggttgccggcctgcagcgccaaatgagctttgcctctgtccgcatcggcctgtatgattctgtcaaacagttctacaccaagggctctgagcatgccagcattgggagccgcctcctagcaggcagcaccacaggtgccctggctgtggctgtggcccagcccacggatgtggtaaaggtccgattccaagctcaggcccgggctggaggtggtcggagataccaaagcaccgtcaatgcctacaagaccattgcccgagaggaagggttccggggcctctggaaagggacctctcccaatgttgctcgtaatgccattgtcaactgtgctgagctggtgacctatgacctcatcaaggatgccctcctgaaagccaacctcatgacagttggggcaggcttctgcaccactgtcatcgcctcccctgtagacgtggtcaagacgagatacatgaactctgccctgggccagtacagtagcgctggccactgtgcccttaccatgctccagaaggaggggccccgagccttctacaaagggttcatgccctcctttctccgcttgggttcctggaacgtggtgatgttcgtcacctatgagcagctgaaacgagccctcatggctgcctgcacttcccgagaggctcccttctgagcctctcctgctgctgacctgatcacctctggctttgtctctagccgggccatgctttccttttcttccttctttctcttccctccttcccttctctccttccctctttccccacctcttccttccgctcctttacctaccaccttccctctttccccacctcttccttccgctcctttacctaccaccttccctctttctacattctcatctactcattgtctcagtgctggtggagttgacatttgacagtgtgggaggcctcgtaccagccaggatcccaagcgtcccgtcccttggaaagttcagccagaatcttcgtcctgcccccgacagcccagcctagcccacttgtcatccataaagcaagctcaaccttg

SEQ ID NO: 35638 - DNA, 1730 bp, Homo sapiens
agccgcgcgctcgctcgcaggagggtgggtagtttgcccagcgtaggggggctgggcccataaaagaggaagtgcacttaagacacggccccgctggacgctgttagaaaccgtcctggctgggaaggcaagaggtgtgtgactggacaagacttgtttctggcggtcagtcttgccatcctcacagaggttggcggcccgagagagtgtgaggcagaggcggggagtggcaagggagtgaccatctcggggaacgaaggagtaaacgcggtgatgggacgcacggaaacgggagtggagaaagtcatggagagaaccctaggcggggcggtccccgcggaaaggcggctgctccagggtctccgcacccaagtaggagctggcaggcccggccccgccccgcaggccccaccccgggccccgcccccgaggcttaagccgcgccgccgcctgcgcggagccccactgcgaagcccagctgcgcgcgccttgggattgactgtccacgctcgcccggctcgtccgacgcgccctccgccagccgacagacacagccgcacgcactgccgtgttctccctgcggctcggacacatagtatgaccattaggtgtttcgtctcccacccattttctatggaaaaccaaggggatcgggccatgatagccactggcagctttgaagaacgggacacctttagagaagcttgatcttggaggcctcaccgtgagaccttacaaagccggattccggcagagttcctctatctcgtcttgttgctgattaaaggtgcccctgtctccagtttttctccatctcctgggacgtagcaggaaatcagcatcatggttgggttcaaggccacagatgtgccccctactgccactgtgaagtttcttggggctggcacagctgcctgcatcgcagatctcatcacctttcctctggatactgctaaagtccggttacagatccaaggagaaagtcaggggccagtgcgcgctacagccagcgcccagtaccgcggtgtgatgggcaccattctgaccatggtgcgtactgagggcccccgaagcctctacaatgggctggttgccggcctgcagcgccaaatgagctttgcctctgtccgcatcggcctgtatgattctgtcaaacagttctacaccaagggctctgagcatgccagcattgggagccgcctcctagcaggcagcaccacaggtgccctggctgtggctgtggcccagcccacggatgtggtaaaggtccgattccaagctcaggcccgggctggaggtggtcggagataccaaagcaccgtcaatgcctacaagaccattgcccgagaggaagggttccggggcctctggaaagggacctctcccaatgttgctcgtaatgccattgtcaactgtgctgagctggtgacctatgacctcatcaaggatgccctcctgaaagccaacctcatgacaggttcatgccctcctttctccgcttgggttcctggaacgtggtgatgttcgtcacctatgagcagctgaaacgagccctcatggctgcctgcacttcccgagaggctcccttctgagcctctcctgctgctgacctgatcacctctggctttgtctctagccgggccatgctttccttttcttccttctttctcttccctccttcccttctctccttccgagccacagtcgaagggatccatcaagagtcacac

SEQ ID NO: 35639 - DNA, 1559 bp, Homo sapiens
agccgcgcgctcgctcgcaggagggtgggtagtttgcccagcgtaggggggctgggcccataaaagaggaagtgcacttaagacacggccccgctggacgctgttagaaaccgtcctggctgggaaggcaagaggtgtgtgactggacaagacttgtttctggcggtcagtcttgccatcctcacagaggttggcggcccgagagagtgtgaggcagaggcggggagtggcaagggagtgaccatctcggggaacgaaggagtaaacgcggtgatgggacgcacggaaacgggagtggagaaagtcatggagagaaccctaggcggggcggtccccgcggaaaggcggctgctccagggtctccgcacccaagtaggagctggcaggcccggccccgccccgcaggccccaccccgggccccgcccccgaggcttaagccgcgccgccgcctgcgcggagccccactgcgaagcccagctgcgcgcgccttgggattgactgtccacgctcgcccggctcgtccgacgcgccctccgccagccgacagacacagccgcacgcactgccgtgttctccctgcggctcggacacatagtatgaccattaggtgtttcgtctcccacccattttctatggaaaaccaaggggatcgggccatgatagccactggcagctttgaagaacgggacacctttagagaagcttgatcttggaggcctcaccgtgagaccttacaaagccggattccggcagagttcctctatctcgtcttgttgctgattaaaggtgcccctgtctccagtttttctccatctcctgggacgtagcaggaaatcagcatcatggttgggttcaaggccacagatgtgccccctactgccactgtgaagtttcttggggctggcacagctgcctgcatcgcagatctcatcacctttcctctggatactgctaaagtccggttacagatccaaggagaaagtcaggggccagtgcgcgctacagccagcgcccagtaccgcggtgtgatgggcaccattctgaccatggtgcgtactgagggcccccgaagcctctacaatgggctggttgccggcctgcagcgccaaatgagctttgcctctgtccgcatcggcctgtatgattctgtcaaacagttctacaccaagggctctgagcatgccagcattgggagccgcctcctagcaggcagcaccacaggtgccctggctgtggctgtggcccagcccacggatgtggtaaaggtccgattccaagctcaggcccgggctggaggtggtcggagataccaaagcaccgtcaatgcctacaagaccattgcccgagaggaagggttccggggcctctggaaagggacctctcccaatgttgctcgtaatgccattgtcaactgtgctgagctggtgacctatgacctcatcaaggatgccctcctgaaagccaacctcatgacagcctcccttgccacttcacttctgcctttgggcagattgcactgactccctgtaacgtgtcagacgaaacatcgtcaatagct

SEQ ID NO: 35640 - DNA, 1328 bp, Homo sapiens
aaatgagtgcaagcccgctggccactgaccccatggctcgcccacagatgccagcattgggagccgcctcctagcaggcagcaccacaggtgccctggctgtggctgtggcccagcccacggatgtggtaaaggtccgattccaagctcaggcccgggctggaggtggtcggagataccaaagcaccgtcaatgcctacaagaccattgcccgagaggaagggttccggggcctctggaaagggacctctcccaatgttgctcgtaatgccattgtcaactgtgctgagctggtgacctatgacctcatcaaggatgccctcctgaaagccaacctcatgacagatgacctcccttgccacttcacttctgcctttggggcaggcttctgcaccactgtcatcgcctcccctgtagacgtggtcaagacgagatacatgaactctgccctgggccagtacagtagcgctggccactgtgcccttaccatgctccagaaggaggggccccgagccttctacaaagggttcatgccctcctttctccgcttgggttcctggaacgtggtgatgttcgtcacctatgagcagctgaaacgagccctcatggctgcctgcacttcccgagaggctcccttctgagcctctcctgctgctgacctgatcacctctggctttgtctctagccgggccatgctttccttttcttccttctttctcttccctccttcccttctctccttccctctttccccacctcttccttccgctcctttacctaccaccttccctctttctacattctcatctactcattgtctcagtgctggtggagttgacatttgacagtgtgggaggcctcgtaccagccaggatcccaagcgtcccgtcccttggaaagttcagccagaatcttcgtcctgcccccgacagcccagcctagcccacttgtcatccataaagcaagctcaaccttgaaaaaaaaaaaaaaacaaaaaaaaaaaaaaaaaaaaaaaaaaaaaaaaaagaaaaaaaaaaaaaaaaaaaacaacacaaaaaacaacaaaaacaacaaacaaacaaaaaaagggggggggacccacaaaacaacccccacgcagggggcaaccaaaaacggcacgcaaaccaccttattgacaaaaaaaagagacgcccaccataaaagagacacgaccaacaaaaacaacaggaccgcgagcgcaccctaaaacaacaaggcctgacagaaaacaaaccactagcggaccacacagagaaaacagcacacaacggggagaaacaacacgagagcgacaaaacagccacagaa

SEQ ID NO: 35641 - DNA, 1567 bp, Homo sapiens
agccgcgcgctcgctcgcaggagggtgggtagtttgcccagcgtaggggggctgggcccataaaagaggaagtgcacttaagacacggccccgctggacgctgttagaaaccgtcctggctgggaaggcaagaggtgtgtgactggacaagacttgtttctggcggtcagtcttgccatcctcacagaggttggcggcccgagagagtgtgaggcagaggcggggagtggcaagggagtgaccatctcggggaacgaaggagtaaacgcggtgatgggacgcacggaaacgggagtggagaaagtcatggagagaaccctaggcggggcggtccccgcggaaaggcggctgctccagggtctccgcacccaagtaggagctggcaggcccggccccgccccgcaggccccaccccgggccccgcccccgaggcttaagccgcgccgccgcctgcgcggagccccactgcgaagcccagctgcgcgcgccttgggattgactgtccacgctcgcccggctcgtccgacgcgccctccgccagccgacagacacagccgcacgcactgccgtgttctccctgcggctcggacacatagtatgaccattaggtgtttcgtctcccacccattttctatggaaaaccaaggggatcgggccatgatagccactggcagctttgaagaacgggacacctttagagaagcttgatcttggaggcctcaccgtgagaccttacaaagccggattccggcagagttcctctatctcgtcttgttgctgattaaaggtgcccctgtctccagtttttctccatctcctgggacgtagcaggaaatcagcatcatggttgggttcaaggccacagatgtgccccctactgccactgtgaagtttcttggggctggcacagctgcctgcatcgcagatctcatcacctttcctctggatactgctaaagtccggttacagatccaaggagaaagtcaggggccagtgcgcgctacagccagcgcccagtaccgcggtgtgatgggcaccattctgaccatggtgcgtactgagggcccccgaagcctctacaatgggctggttgccggcctgcagcgccaaatgagctttgcctctgtccgcatcggcctgtatgattctgtcaaacagttctacaccaagggctctgagcatgccagcattgggagccgcctcctagcaggcagcaccacaggtgccctggctgtggctgtggcccagcccacggatgtggtaaaggtccgattccaagctcaggcccgggctggaggtggtcggagataccaaagcaccgtcaatgcctacaagaccattgcccgagaggaagggttccggggcctctggaaagggacctctcccaatgttgctcgtaatgccattgtctcagtgctggtggagttgacatttgacagtgtgggaggcctcgtaccagccaggatcccaagcgtcccgtcccttggaaagttcagccagaatcttcgtcctgcccccgacagcccagcctagcccacttgtcatccataaagcaagctcaaccttg

SEQ ID NO: 35642 - DNA, 1930 bp, Homo sapiens
agccgcgcgctcgctcgcaggagggtgggtagtttgcccagcgtaggggggctgggcccataaaagaggaagtgcacttaagacacggccccgctggacgctgttagaaaccgtcctggctgggaaggcaagaggtgtgtgactggacaagacttgtttctggcggtcagtcttgccatcctcacagaggttggcggcccgagagagtgtgaggcagaggcggggagtggcaagggagtgaccatctcggggaacgaaggagtaaacgcggtgatgggacgcacggaaacgggagtggagaaagtcatggagagaaccctaggcggggcggtccccgcggaaaggcggctgctccagggtctccgcacccaagtaggagctggcaggcccggccccgccccgcaggccccaccccgggccccgcccccgaggcttaagccgcgccgccgcctgcgcggagccccactgcgaagcccagctgcgcgcgccttgggattgactgtccacgctcgcccggctcgtccgacgcgccctccgccagccgacagacacagccgcacgcactgccgtgttctccctgcggctcggacacatagtatgaccattaggtgtttcgtctcccacccattttctatggaaaaccaaggggatcgggccatgatagccactggcagctttgaagaacgggacacctttagagaagcttgatcttggaggcctcaccgtgagaccttacaaagccggattccggcagagttcctctatctcgtcttgttgctgattaaaggtgcccctgtctccagtttttctccatctcctgggacgtagcaggaaatcagcatcatggttgggttcaaggccacagatgtgccccctactgccactgtgaagtttcttggggctggcacagctgcctgcatcgcagatctcatcacctttcctctggatactgctaaagtccggttacagatccaaggagaaagtcaggggccagtgcgcgctacagccagcgcccagtaccgcggtgtgatgggcaccattctgaccatggtgcgtactgagggcccccgaagcctctacaatgggctggttgccggcctgcagcgccaaatgagctttgcctctgtccgcatcggcctgtatgattctgtcaaacagttctacaccaagggctctgagcatgccagcattgggagccgcctcctagcaggcagcaccacaggtgccctggctgtggctgtggcccagcccacggatgtggtaaaggtccgattccaagtctctagccgggccatgctttccttttcttccttctttctcttccctccttcccttctctccttccctctttccccacctcttccttccgctcctttacctaccaccttccctctttctacattctcatctactcattgtctcagtgctggtggagttgacatttgacagtgtgggaggcctcgtaccagccaggatcccaagcgtcccgtcccttggaaagttcagccagaatcttcgtcctgcccccgacagcccagcctagcccacttgtcatccataaagcaagctcaaccttgaaaaaaaaaaaaaaacaaaaaaaaaaaaaaaaaaaaaaaaaaaaaaaaaagaaaaaaaaaaaaaaaaaaaacaacacaaaaaacaacaaaaacaacaaacaaacaaaaaaagggggggggacccacaaaacaacccccacgcagggggcaaccaaaaacggcacgcaaaccaccttattgacaaaaaaaagagacgcccaccataaaagagacacgaccaacaaaaacaacaggaccgcgagcgcaccctaaaacaacaaggcctgacagaaaacaaaccactagcggaccacacagagaaaacagcacacaacggggagaaacaacacgagagcgacaaaacagccacagaa

SEQ ID NO: 35643 - DNA, 1409 bp, Homo sapiens
agccgcgcgctcgctcgcaggagggtgggtagtttgcccagcgtaggggggctgggcccataaaagaggaagtgcacttaagacacggccccgctggacgctgttagaaaccgtcctggctgggaaggcaagaggtgtgtgactggacaagacttgtttctggcggtcagtcttgccatcctcacagaggttggcggcccgagagagtgtgaggcagaggcggggagtggcaagggagtgaccatctcggggaacgaaggagtaaacgcggtgatgggacgcacggaaacgggagtggagaaagtcatggagagaaccctaggcggggcggtccccgcggaaaggcggctgctccagggtctccgcacccaagtaggagctggcaggcccggccccgccccgcaggccccaccccgggccccgcccccgaggcttaagccgcgccgccgcctgcgcggagccccactgcgaagcccagctgcgcgcgccttgggattgactgtccacgctcgcccggctcgtccgacgcgccctccgccagccgacagacacagccgcacgcactgccgtgttctccctgcggctcggacacatagtatgaccattaggtgtttcgtctcccacccattttctatggaaaaccaaggggatcgggccatgatagccactggcagctttgaagaacgggacacctttagagaagcttgatcttggaggcctcaccgtgagaccttacaaagccggattccggcagagttcctctatctcgtcttgttgctgattaaaggtgcccctgtctccagtttttctccatctcctgggacgtagcaggaaatcagcatcatggttgggttcaaggccacagatgtgccccctactgccactgtgaagtttcttggggctggcacagctgcctgcatcgcagatctcatcacctttcctctggatactgctaaagtccggttacagatccaaggagaaagtcaggggccagtgcgcgctacagccagcgcccagtaccgcggtgtgatgggcaccattctgaccatggtgcgtactgagggcccccgaagcctctacaatgggctggttgccggcctgcagcgccaaatgagctttgcctctgtccgcatcggcctgtatgattctgtcaaacagttctacaccaagggctctgagcatgccagcattgggagccgcctcctagcaggcagcaccacaggtgccctggctgtggctgtggcccagcccacggatgtggtaaaggtccgattccaagctcaggcccgggctggaggtggtcggagataccaaagcaccgtcccttggaaagttcagccagaatcttcgtcctgcccccgacagcccagcctagcccacttgtcatccataaagcaagctcaaccttg

SEQ ID NO: 35644 - DNA, 1182 bp, Homo sapiens
aggccggataccttcctctcgggcatggtcttgtaggcattgacgggtgctttggtatctccgaccacctccagcccgggcctgagcttggaaaggggacctctcccaatgttgctcgtaatgccattgtcaactgtgctgagctggtgacctatgacctcatcaaggatgccctcctgaaagccaacctcatgacagatgacctcccttgccacttcacttctgcctttggggcaggcttctgcaccactgtcatcgcctcccctgtagacgtggtcaagacgagatacatgaactctgccctgggccagtacagtagcgctggccactgtgcccttaccatgctccagaaggaggggccccgagccttctacaaagggttcatgccctcctttctccgcttgggttcctggaacgtggtgatgttcgtcacctatgagcagctgaaacgagccctcatggctgcctgcacttcccgagaggctcccttctgagcctctcctgctgctgacctgatcacctctggctttgtctctagccgggccatgctttccttttcttccttctttctcttccctccttcccttctctccttccctctttccccacctcttccttccgctcctttacctaccaccttccctctttctacattctcatctactcattgtctcagtgctggtggagttgacatttgacagtgtgggaggcctcgtaccagccaggatcccaagcgtcccgtcccttggaaagttcagccagaatcttcgtcctgcccccgacagcccagcctagcccacttgtcatccataaagcaagctcaaccttgaaaaaaaaaaaaaaacaaaaaaaaaaaaaaaaaaaaaaaaaaaaaaaaaagaaaaaaaaaaaaaaaaaaaacaacacaaaaaacaacaaaaacaacaaacaaacaaaaaaagggggggggacccacaaaacaacccccacgcagggggcaaccaaaaacggcacgcaaaccaccttattgacaaaaaaaagagacgcccaccataaaagagacacgaccaacaaaaacaacaggaccgcgagcgcaccctaaaacaacaaggcctgacagaaaacaaaccactagcggaccacacagagaaaacagcacacaacggggagaaacaacacgagagcgacaaaacagccacagaa

SEQ ID NO: 35645 - DNA, 1105 bp, Homo sapiens
aggggaggtctagattctgcatctgctcaaagaacttgtaggttggatttacgtagggtttcgagtgaagtgacctatgacctcatcaaggatgccctcctgaaagccaacctcatgacagatgacctcccttgccacttcacttctgcctttggggcaggcttctgcaccactgtcatcgcctcccctgtagacgtggtcaagacgagatacatgaactctgccctgggccagtacagtagcgctggccactgtgcccttaccatgctccagaaggaggggccccgagccttctacaaagggttcatgccctcctttctccgcttgggttcctggaacgtggtgatgttcgtcacctatgagcagctgaaacgagccctcatggctgcctgcacttcccgagaggctcccttctgagcctctcctgctgctgacctgatcacctctggctttgtctctagccgggccatgctttccttttcttccttctttctcttccctccttcccttctctccttccctctttccccacctcttccttccgctcctttacctaccaccttccctctttctacattctcatctactcattgtctcagtgctggtggagttgacatttgacagtgtgggaggcctcgtaccagccaggatcccaagcgtcccgtcccttggaaagttcagccagaatcttcgtcctgcccccgacagcccagcctagcccacttgtcatccataaagcaagctcaaccttgaaaaaaaaaaaaaaacaaaaaaaaaaaaaaaaaaaaaaaaaaaaaaaaaagaaaaaaaaaaaaaaaaaaaacaacacaaaaaacaacaaaaacaacaaacaaacaaaaaaagggggggggacccacaaaacaacccccacgcagggggcaaccaaaaacggcacgcaaaccaccttattgacaaaaaaaagagacgcccaccataaaagagacacgaccaacaaaaacaacaggaccgcgagcgcaccctaaaacaacaaggcctgacagaaaacaaaccactagcggaccacacagagaaaacagcacacaacggggagaaacaacacgagagcgacaaaacagccacagaa

SEQ ID NO: 35646 - DNA, 1185 bp, Homo sapiens
agccgcgcgctcgctcgcaggagggtgggtagtttgcccagcgtaggggggctgggcccataaaagaggaagtgcacttaagacacggccccgctggacgctgttagaaaccgtcctggctgggaaggcaagaggtgtgtgactggacaagacttgtttctggcggtcagtcttgccatcctcacagaggttggcggcccgagagagtgtgaggcagaggcggggagtggcaagggagtgaccatctcggggaacgaaggagtaaacgcggtgatgggacgcacggaaacgggagtggagaaagtcatggagagaaccctaggcggggcggtccccgcggaaaggcggctgctccagggtctccgcacccaagtaggagctggcaggcccggccccgccccgcaggccccaccccgggccccgcccccgaggcttaagccgcgccgccgcctgcgcggagccccactgcgaagcccagctgcgcgcgccttgggattgactgtccacgctcgcccggctcgtccgacgcgccctccgccagccgacagacacagccgcacgcactgccgtgttctccctgcggctcggacacatagtatgaccattaggtgtttcgtctcccacccattttctatggaaaaccaaggggatcgggccatgatagccactggcagctttgaagaacgggacacctttagagaagcttgatcttggaggcctcaccgtgagaccttacaaagccggattccggcagagttcctctatctcgtcttgttgctgattaaaggtgcccctgtctccagtttttctccatctcctgggacgtagcaggaaatcagcatcatggttgggttcaaggccacagatgtgccccctactgccactgtgaagtttcttggggctggcacagctgcctgcatcgcagatctcatcacctttcctctggatactgctaaagtccggttacagatccaaggagaaagtcaggggccagtgcgcgctacagccagcgcccagtaccgcggtgtgatgggcaccattctgaccatggtgcgtactgagggcccccgaagcctctacaatgggctggttgccggcctgcagcgccaaatgagctttgcctctgtcctgcccccgacagcccagcctagcccacttgtcatccataaagcaagctcaaccttg

SEQ ID NO: 35647 - DNA, 849 bp, Homo sapiens
atcaaaagtttggtgaaatttgagactttagtatccatcttaatgatagtggcaggaggcagacaaatcctagggagacaagggtgggtccctggtgaaaccccaccttcaaaccaaagacagtttaaagcatgaaagccaagctacaagtctccagtaaatccacggaccggattaagaatctctcttcccctttagcacacttccctctgattgatccacacacttccttctttctcttccctccttcccttctctccttccctctttccccacctcttccttccgctcctttacctaccaccttccctctttctacattctcatctactcattgtctcagtgctggtggagttgacatttgacagtgtgggaggcctcgtaccagccaggatcccaagcgtcccgtcccttggaaagttcagccagaatcttcgtcctgcccccgacagcccagcctagcccacttgtcatccataaagcaagctcaaccttgaaaaaaaaaaaaaaacaaaaaaaaaaaaaaaaaaaaaaaaaaaaaaaaaagaaaaaaaaaaaaaaaaaaaacaacacaaaaaacaacaaaaacaacaaacaaacaaaaaaagggggggggacccacaaaacaacccccacgcagggggcaaccaaaaacggcacgcaaaccaccttattgacaaaaaaaagagacgcccaccataaaagagacacgaccaacaaaaacaacaggaccgcgagcgcaccctaaaacaacaaggcctgacagaaaacaaaccactagcggaccacacagagaaaacagcacacaacggggagaaacaacacgagagcgacaaaacagccacagaa

SEQ ID NO: 35648 - DNA, 682 bp, Homo sapiens
tccaagggttgagcttgcttatggataacaatctctagccgggccatgctttccttttcttccttctttctcttccctccttcccttctctccttccctctttccccacctcttccttccgctcctttacctaccaccttccctctttctacattctcatctactcattgtctcagtgctggtggagttgacatttgacagtgtgggaggcctcgtaccagccaggatcccaagcgtcccgtcccttggaaagttcagccagaatcttcgtcctgcccccgacagcccagcctagcccacttgtcatccataaagcaagctcaaccttgaaaaaaaaaaaaaaacaaaaaaaaaaaaaaaaaaaaaaaaaaaaaaaaaagaaaaaaaaaaaaaaaaaaaacaacacaaaaaacaacaaaaacaacaaacaaacaaaaaaagggggggggacccacaaaacaacccccacgcagggggcaaccaaaaacggcacgcaaaccaccttattgacaaaaaaaagagacgcccaccataaaagagacacgaccaacaaaaacaacaggaccgcgagcgcaccctaaaacaacaaggcctgacagaaaacaaaccactagcggaccacacagagaaaacagcacacaacggggagaaacaacacgagagcgacaaaacagccacagaa

SEQ ID NO: 35649 - DNA, 1222 bp, Homo sapiens
  misc_feature (976)..(976): n is a, c, g, or t
  misc_feature (979)..(979): n is a, c, g, or t
  misc_feature (983)..(983): n is a, c, g, or t
  misc_feature (987)..(990): n is a, c, g, or t
  misc_feature (994)..(994): n is a, c, g, or t
  misc_feature (996)..(996): n is a, c, g, or t
  misc_feature (998)..(998): n is a, c, g, or t
  misc_feature (1000)..(1000): n is a, c, g, or t
  misc_feature (1006)..(1006): n is a, c, g, or t
  misc_feature (1010)..(1010): n is a, c, g, or t
  misc_feature (1012)..(1012): n is a, c, g, or t
  misc_feature (1017)..(1017): n is a, c, g, or t
  misc_feature (1022)..(1022): n is a, c, g, or t
  misc_feature (1024)..(1025): n is a, c, g, or t
  misc_feature (1027)..(1027): n is a, c, g, or t
  misc_feature (1029)..(1029): n is a, c, g, or t
  misc_feature (1032)..(1034): n is a, c, g, or t
  misc_feature (1044)..(1044): n is a, c, g, or t
  misc_feature (1049)..(1052): n is a, c, g, or t
  misc_feature (1055)..(1055): n is a, c, g, or t
  misc_feature (1060)..(1060): n is a, c, g, or t
  misc_feature (1062)..(1064): n is a, c, g, or t
  misc_feature (1070)..(1070): n is a, c, g, or t
  misc_feature (1073)..(1073): n is a, c, g, or t
  misc_feature (1084)..(1086): n is a, c, g, or t
  misc_feature (1089)..(1090): n is a, c, g, or t
  misc_feature (1093)..(1093): n is a, c, g, or t
  misc_feature (1096)..(1097): n is a, c, g, or t
  misc_feature (1101)..(1101): n is a, c, g, or t
  misc_feature (1125)..(1125): n is a, c, g, or t
  misc_feature (1127)..(1127): n is a, c, g, or t
  misc_feature (1133)..(1133): n is a, c, g, or t
  misc_feature (1139)..(1139): n is a, c, g, or t
  misc_feature (1146)..(1146): n is a, c, g, or t
  misc_feature (1151)..(1151): n is a, c, g, or t
  misc_feature (1159)..(1160): n is a, c, g, or t
  misc_feature (1162)..(1162): n is a, c, g, or t
  misc_feature (1202)..(1202): n is a, c, g, or t
agccgcgcgctcgctcgcaggagggtgggtagtttgcccagcgtaggggggctgggcccataaaagaggaagtgcacttaagacacggccccgctggacgctgttagaaaccgtcctggctgggaaggcaagaggtgtgtgactggacaagacttgtttctggcggtcagtcttgccatcctcacagaggttggcggcccgagagagtgtgaggcagaggcggggagtggcaagggagtgaccatctcggggaacgaaggagtaaacgcggtgatgggacgcacggaaacgggagtggagaaagtcatggagagaaccctaggcggggcggtccccgcggaaaggcggctgctccagggtctccgcacccaagtaggagctggcaggcccggccccgccccgcaggccccaccccgggccccgcccccgaggcttaagccgcgccgccgcctgcgcggagccccactgcgaagcccagctgcgcgcgccttgggattgactgtccacgctcgcccggctcgtccgacgcgccctccgccagccgacagacacagccgcacgcactgccgtgttctccctgcggctcggacacatagtatgaccattaggtgtttcgtctcccacccattttctatggaaaaccaaggggatcgggccatgatagccactggcagctttgaagaacgggacacctttagagaagcttgatcttggaggcctcaccgtgagaccttacaaagccggattccggcagagttcctctatctcgtcttgttgctgattaaaggtgcccctgtctccagtttttctccatctcctgggacgtagcaggaaatcagcatcatggttgggttcaaggccacagatgtgccccctactgccactgtgaagtttcttggggctggcacagctgcctgcatcgcagatctcatcacctttcctctggatactgctaaagtccggttacagatccaanganaaantcannnnccantncncnctacantcancncccantaccncnntntnatnnncaccattctnaccannnntcntaccnannncccccnaancctccacaaannnctnntcnccnncccncatctccaaaatatcctttcctcntncctcancttccnttaatantcttncaaacatnncnacaccaatttctcttatcattccatcatttttatcctccncctatcattcatcaccacat

SEQ ID NO: 35650 - DNA, 1206 bp, Homo sapiens
agccgcgcgctcgctcgcaggagggtgggtagtttgcccagcgtaggggggctgggcccataaaagaggaagtgcacttaagacacggccccgctggacgctgttagaaaccgtcctggctgggaaggcaagaggtgtgtgactggacaagacttgtttctggcggtcagtcttgccatcctcacagaggttggcggcccgagagagtgtgaggcagaggcggggagtggcaagggagtgaccatctcggggaacgaaggagtaaacgcggtgatgggacgcacggaaacgggagtggagaaagtcatggagagaaccctaggcggggcggtccccgcggaaaggcggctgctccagggtctccgcacccaagtaggagctggcaggcccggccccgccccgcaggccccaccccgggccccgcccccgaggcttaagccgcgccgccgcctgcgcggagccccactgcgaagcccagctgcgcgcgccttgggattgactgtccacgctcgcccggctcgtccgacgcgccctccgccagccgacagacacagccgcacgcactgccgtgttctccctgcggctcggacacatagtatgaccattaggtgtttcgtctcccacccattttctatggaaaaccaaggggatcgggccatgatagccactggcagctttgaagaacgggacacctttagagaagcttgatcttggaggcctcaccgtgagaccttacaaagccgggtaagagtccagtccaaggaagaggtctcttgctgcctcctaaccctgtggtctaggggcaggagtcagcagggcattaacaaaaataattaccatccccacccccgacagtgaagtggctctttccagttcacagagcactctcacacctccccgctctcattctggcccttcagctgactcggacaagccaaggatcttggtccccattttataaaggagaaaactgaggcccacgtgtaacagtgattggccccaagtcatcccgggagccagcagaagagctaggacaggaacctattgttctaacttcatattgatgctagcttttgactatccctgaaaccgagattggtaatcagcccggctctgaaactggttatttgctggggactgtaaaataggattaactatttctagtcctgcattttaattgctgttagtagggccatcttacccacc

SEQ ID NO: 35651 - DNA, 537 bp, Homo sapiens
ctcaggatcatacagacagtaaatgactgatccaaaatctaaacccacttctgttcccaaggcccatcagttcctcactgggcagctgccttagagaaggatgtgcagaggaggtggtaggaggagggataaacctgagctaaaagaatcagtaaaactctcacacttcattctatgatggatacttgtaaaaacatgagctttctagactgttatatgggttacagaatgggcaaacccaaatgacttcgtgtaatcggctttcatattaggatatgaagccgggtgtggtgattcacgtctgtaatcccagcactttgagaggctgagctgggaggatcagttgagcccagttcaagaccagcctgggcaacatggcaaaaacctgtctctcctaaaaaattaataaatttagctgggtgtggtggtgtgtgcctatagtcccagctgcactggaggctgaggtgggcagatcacctgagtccaggaggtcaagactgcaatgagccatgattgcgctactgcgctccagcctgg

SEQ ID NO: 35652 - DNA, 681 bp, Homo sapiens
ctcaaatgcaaaaatcctcttgaacttttctgggtagcctactctactctttcctaatagtaccactacagtatacagcactgtaaaattttttgctttaaaagtttgtttataaactggcatttataagtatactttttgagctgatttaagaatcaagtttttttttctagggaaatgcttctttgtaattatctgtcactagcaaaatttgttttaacatatatttttctaaaaatatgatatgtaaactgtgttgtagttgtacaattaaaggtttttggtcgaacagttattacatgatgtaaaatcatgtgtaacactttaatattaattacattgtaacctaaaattcattttaaaactttttatgtggcttgaacaggaattttcttatccaaagctttgtatgtatgctttattgcctcctttgttattagcatggagaccatgggttttctgttattgttgtttcatttaaacagttcatgaatatattaagcacctgaaagaaactgttagatgctgttaataggaagaggagttaaaaacctcgtccttgcccttatctacatgtgtacatgtagaacttactgtagttccctagatgtagcaggtgctcaggaaacatttttgtagtagtaaaaaagaaatgccagtaacaaatgccagtaaataagg

SEQ ID NO: 35653 - DNA, 1517 bp, Homo sapiens
atgaaatagtaccctctaaaaaagagaaaaaaaaaatcaggcggtcaaacttagagcaacattgtcttattaaagcatagtttatttcactagaaaaaatttaatatcaaggactattacatacttcattactaggaagttctttttaaaatgacacttaaaacaatcactgaaaacttgatccacatcacaccctgtttattttccttaaacatcttggaagcctaagcttctgagaatcatgtggcaagtgtgatgggcagtaaaataccagagaagatgtttagtagcaattaaaggctgtttgcacctttaaggaccagctgggctgtagtgattcctggggccagagtggcattatgtttttacaaaataatgacatatgtcacatgtttgcatgtttgtttgcttgttgaatttttgaacagccagttgaccaatcatagaaagtattactttctttcatatggtttttggttcactggcttaagaggtttctcagaatatctatggccacagcagcataccagtttccatcctaataggaatgaaattaattttgtatctactgataacagaatctgggtcacatgaaaaaaaatcattttatccgtcttttaagtatatgtttaaaataataatttatgtgtctgcatattgcagaacagctctgagagcaacagtttcccattaactctttctgaccaatagtgctggcaccgttgcttcctctttgggaagaggaaagggtgtgtgaacatggctaacaatcttcaaatacccaaattgtgatagcataaataaagtatttattttatgcctcagtatattattatttaattttttaggtaatgcctatctcttggtctattaaggaaagaagcaatcagtagagaattcaggatagttttgtttaaattcttgcagattacatgtttttacagtggcctgctattgaggaaaggtattcttctatacaacttgttttaacctttgagaacattgacagaaattatgcaatggtttgttgagatacggacttgatggtgctgtttaatcagtttgcttccaaagtggcctactcaagaggccctaagactggtagaaattaaaaggatttcaaaaactttctattcctttcttaaacctaccagcaaactaggattgtgatagcaatgaatggtatgatgaagaaagtttgaccaaatttgtttttttgttgttgttgttgttttgaatttgaaatcattcttattccctttaagaatgtttatgtatgagtgtgaagatgctagcgaacctatgctcagatattcatcgtaagtctcccttcacctgttacagagtttcagatcggtcactgatagtatgtatttctttagtaagaatgtgttaaaattacaatgatcttttaaaaagatgatgcagttctgtatttattgtgctgtgtctggtcctaagtggagccaattaaacaagtttcatatgtatttttccagtgttgaatctcacacact

SEQ ID NO: 35654 - DNA, 622 bp, Homo sapiens
gttacagtatttcagatagttcttatcatgcaactgagatctacatttgtgataaacaaggatattgaggagattgttttgactcaaggaatcatatgtaactcaaataaacatgtttggaataataatgtctgaaaattataattattgatgacattacatagcaaatacagttaaatatttaatgtgttaggcaataaagctagacctgcagtggatggcttattctaggaaattgtcaaactgacttaaatttaaatttctgatccttagaattaggtgttaaggacatgctttttttttttttttgatagagtctagctctgtcgccaggctggagtgcagtggcgtgatcttggctcactgcaaccgctgcctcctgggttcaagcaattctcctgcctcagtctcccgagtagctgggactacaggcatgcgcccctatgcccatctctactaaaaatacaaaaaattagctggacgtggtggcgggtacctctaatccagcttctaggaaagctgaggcaggagaatcacttgaatcggggaggtggaggttgcagtgagccaagatggtgccattgcactccagcctgggcaacaagcatgaaaatctgtctca

SEQ ID NO: 35655 - DNA, 503 bp, Homo sapiens
cataaacaaagttattgattcaggttctgaaatcccaaagacgttagtacaaatcacagtactgctacttactggccctgcaaccatacccaaacaatgatctctctaattctcatgtgttaaacagtattgatagcacctatttcaaagtttatatgaggattaaattagctaacacatgcaaacggctggcacactgtgcctggcccatagtaagcacccaatgctatctattacctcatgaccattattctggctttagtagggaaacaaaaacttactgatcattttttatatatctgtttattctgtatagtgataaattaagtagcttcagaaaacttataacattattataaaataaagattttaaagtcacttcatgattcttacattatgtttttttgtttgttttcttttgttttgagacagagtctcactctgccacccaggctggagtggagtggtgcaatcagagtggctcactacaaagcctcaatctc

SEQ ID NO: 35656 - DNA, 1653 bp, Homo sapiens
  misc_feature (1)..(1): n is a, c, g, or t
  misc_feature (3)..(3): n is a, c, g, or t
  misc_feature (614)..(614): n is a, c, g, or t
  misc_feature (947)..(947): n is a, c, g, or t
ngnggagaagatatgaggtaattaagggtacaagaagttgagattcaaacatcctccaccttcccaccccccactgccagtgggtgataaggaaatgatcacagacgactgaagtgagctaacatgattgtggatatacccatattaattcataccggaaacacagatgagaaggttgagaaggaatagtaaagaccatgagttcggtttagattcacagagtgtggaagtccaagaggaaggtaaaaaggactgaaggcccagagtcaactgtacagtagtacaagctacggaggtggatataatcactcaagaaagatatggcaaaatggtaagtggtggggtgatggtaaaaagagacaagggtctagtgtggtggttgaaagaagcagctgaagtcagattagtcacttaaattacttgattttctgagccttcgtttcaactgcaagataaagcttacaatggcatcaacttgagatggctggtgcattaaagatataattcatataaagccattagaccaaaccctgcatgagagctcaatgaatgtcagcaattcttaccatagtgtaccattataatgttggcataaaattagattttcagaaaanataagcttattaacatgtattagttatagaggcttattactaaaaatgcatgatgaaaaacctatgggcaagcaaaaatattttagaattctccacctcttctctcaatacccatactcttaagagttatattaaaggcagacttgtttaaatgtcaggacatttaccttagcttctttcctttagttagcctagtggctcttaaattttagtttgcttaagaataacaatagcaacacagtgtttagtacgaagtcatgcatgtatttcaactaagtagatattttaaggaattttctgcagtaattttgaaaaaacttttatcaccataantggtgattttggaattgaattacccatgtgcccatccacctcccactgcatctcccagttgcagcgggaggtgaacgggcacatgggtaaaattatatattgggtacacatatatatatgatgaaatttaacagactaaaacaaggtttaagaagagttatcttgtccaacatcatatagtcgataagaaacaggatttgaactcgggtctgccttactcaaaggcaaggtctcttttcagttttctctatgctacatctgtaggatagggagatcccaagcaggtttagtacggtgcttcactgaaggaatatcaacatttaagaagatggtggagagataatcgtagactatggtgtgcagaagccaacaaaggctgaagtaacatacaatcttcaatttctactgaaatgggaaattttgaagacactaataacccttacaaaggagggtgaaaataaaatatgaggcaaacagtaaatctcaggaatgaggtagacgaaaaaataagcgcagcatattgactaaagcacatttcttcctctatagtttgggaactgtgtcacagtcggaccaatatatggctctaaccaacatgtagcttttcttttcttttctttttttttttttttggtcttcttaatttgaggatttagcattccagttgtcatgtttgatgccattctgaaataaatctcttaggaag

SEQ ID NO: 35657 - DNA, 2594 bp, Homo sapiens
  misc_feature (1)..(1): n is a, c, g, or t
  misc_feature (3)..(3): n is a, c, g, or t
  misc_feature (614)..(614): n is a, c, g, or t
  misc_feature (947)..(947): n is a, c, g, or t
ngnggagaagatatgaggtaattaagggtacaagaagttgagattcaaacatcctccaccttcccaccccccactgccagtgggtgataaggaaatgatcacagacgactgaagtgagctaacatgattgtggatatacccatattaattcataccggaaacacagatgagaaggttgagaaggaatagtaaagaccatgagttcggtttagattcacagagtgtggaagtccaagaggaaggtaaaaaggactgaaggcccagagtcaactgtacagtagtacaagctacggaggtggatataatcactcaagaaagatatggcaaaatggtaagtggtggggtgatggtaaaaagagacaagggtctagtgtggtggttgaaagaagcagctgaagtcagattagtcacttaaattacttgattttctgagccttcgtttcaactgcaagataaagcttacaatggcatcaacttgagatggctggtgcattaaagatataattcatataaagccattagaccaaaccctgcatgagagctcaatgaatgtcagcaattcttaccatagtgtaccattataatgttggcataaaattagattttcagaaaanataagcttattaacatgtattagttatagaggcttattactaaaaatgcatgatgaaaaacctatgggcaagcaaaaatattttagaattctccacctcttctctcaatacccatactcttaagagttatattaaaggcagacttgtttaaatgtcaggacatttaccttagcttctttcctttagttagcctagtggctcttaaattttagtttgcttaagaataacaatagcaacacagtgtttagtacgaagtcatgcatgtatttcaactaagtagatattttaaggaattttctgcagtaattttgaaaaaacttttatcaccataantggtgattttggaattgaattacccatgtgcccatccacctcccactgcatctcccagttgcagcgggaggtgaacgggcacatgggtaaaattatatattgggtacacatatatatatgatgaaatttaacagactaaaacaaggtttaagaagagttatcttgtccaacatcatatagtcgataagaaacaggatttgaactcgggtctgccttactcaaaggcaaggtctcttttcagttttctctatgctacatctgtaggatagggagatcccaagcaggtttagtacggtgcttcactgaaggaatatcaacatttaagaagatggtggagagataatcgtagactatggtgtgcagaagccaacaaaggctgaagtaacatacaatcttcaatttctactgaaatgggaaattttgaagacactaataacccttacaaaggagggtgaaaataaaatatgaggcaaacagtaaatctcaggaatgaggtagacgaaaaaataagcgcagcatattgactaaagcacatttcttcctctatagtttgggaactgtgtcacagtcggaccaatatatggctctaaccaacatgtagcttttcttttcttttctttttttttttttttggtcttcttaatttgaggatttagcattccagttgtcatgtttgatgccattctgaaataaatctcttaggaagaaaaactgctttttgactctagattttgtttatagcattaaatattatttaaacactatgtcactgaaactttcaaatcctaagcttaattagaaatatacaacactttaaaagcttacaaattttgcatttttaaattattttcatcatatcacaaattatatgacagcttatatcacaactcatgagaagatactgatcttgggttaaacagctgaagagggcaattagctttagactgcacctattttcatctagccatctggaaaatgtaagctgtggtcacacagtggacagacagagaaggagactaaattactaaaattcaaactgcattcctgattactcataacgtatacatatggatcagaaacatcaaaatgaaaacatattgtggatgccaaagtcaagtcttggtttctaaaaatgttcaggatgggattcggatgtttttaaaactgtcctccccacactaagtctccttaatctagtatttgatctttgctgggagccccaaggagccgttccatgggtctatgtgtttatcttccataatatgtgcctactactcctaacctgtcactacatcttcaatgtaattcctttttccctctattaatgtatctaaacttatcagcttatgctaattgtacagaccccagttttaaagttagaaatagaatccttgagcatatcctaggattccgtgtgttttaaataaactatgacagtaaaatccaatgtgtgacctaaataaaacagaagcttatactagagtctgtcatttctttctaatcaatctatttcacctttatgttttaaatgaagtacagggttgctctctggtgctaactagttgtactctatttcacatttatactttaaatggggtacatggttgtactctggccatgccgctaactagctgtgtgaccttgaat

SEQ ID NO: 35658 - DNA, 609 bp, Homo sapiens
tctaggtatgcaggattaaagagttaaatatgtgaaagtaagaagctattgactggtcacctctcttacagacaaacctaaagtacaagcattgtcacctctaggttatattcagagaattcatcaatgttagtgtaagagacattggggattatgtgtagtcttgtaatttatttatcccagttttccttattagccctggctttccatttcctggttgaggctccgttaatttccttttaggccctacctcttatacttatgctattgaattatttgtcattgttccctagcgccccacctcatctccaaatgaattgatcattttcttcttcccaccttgtgcttgctcctgccatcaacctttgtcaaggtccctttacacattcatctttcctgttgctttcagtacttttagaaatattcagccaagtttagcttcaaattactttattgtgatgactttgacacagaaggtactgaataaatattttttaccatgggctgggcatggtcacttatgcctgtaatcccaacaacttgggaggctgaggtgggaagatccttgagcccaggagttgaagaccagcctgggcaacatagtgagac

SEQ ID NO: 35659 - DNA, 364 bp, Homo sapiens
cctctcctggtatacaaattttgtagaggtgtaagttgccatacgttcctcctcaggcctgagctctaacttcctagtaatctcctagatccatgaaatgtgagagagagaaaaaggaagaactgagcctgtgataaatattacacaaacaagttgaaattaatacttctgcaaagaaatattttcattcagccagctggatttgagtacttatagtggaacaggaattaaaagaaattttaaaaatgtataagcaaaaactcagttgtatgtaagaaaaaccagttccccctgaggaagagaaagatctgaagtcctttaaaaattgactgcctatttttctgtagctagtgagccttatctc

SEQ ID NO: 35660 - DNA, 303 bp, Homo sapiens
gcccatttcaagtcgtcttcaaggtaaagtgccatatttgtttgtagtgcttatatatttcttaaatgtttaacatgtgtaaacccactgtttttaaatgtgtcactggtgaagttttaaagtgctatgccctaataccatttttcatataagccctgtggtttgtatttgtgggacttttcatagtgtagtgatttttagaaactaaaatggaattcagtttcctaaaaggttgtataggctggcctttttcctttctgtatgaaatgtttgcttaataaaatattttgttgttcaacataa

SEQ ID NO: 35661 - DNA, 315 bp, Homo sapiens
ctcctgggttcaagcaattatcttgcctcagcatccgaagtagcctcccaagtagctgggactataggtgcatgccaccatgcctggctaatttttgtatatttaggagagacaaggtttcaccatgttggccaggctggttttgaactcctgacctcaagtgatctgcccacctcggtctcccaaagtgctgggattacaggcgtgagccgccccgcccagccacaatgtgctattttggttgaagcaaatgaaaatctaatctcacacagataaggagttggaaaagggaagatcatgcagacccgttttagg

SEQ ID NO: 35662 - DNA, 315 bp, Homo sapiens
tgttgttgttttaaatacaattatttatttaagcaattattaagcaaataatgcaaattgttaagcaaaagagctttcataacaatgcttgttcttctggcttggaaagctctgcagcctaatcagagagcctgtgttttactactttaatcaacttcccttgtgtactctggacagcctcaaaattattcaattatcacatctctcaaactgcattttcttaaatcaggcacagaaactcactttggtgagaaagtaagagggccttgtgcaaaaagccttttcttttgtaaagcagtacagccaagtttagga

SEQ ID NO: 35663 - DNA, 489 bp, Homo sapiens
tgttggttgtcttttctaattctggattgtgtttgaatgtatctgagatgcattgaacttgcttagagtttccatggactcattgtacttagagcagaaggaatgagaacatggtcaactattaatatcctctagcttgaaactatctacagtctgaaactttagtcatcttagggaaggaggatatggaagtatagaagtctctgatgagggccatgtgcagtgtctcacgcctgtaatcccagcactttgggaggctgaggcgggtggatcacctgaggttaggagttcgagaccagcctggacaacatggtgaaaccctgtctctactaaaaatacaaaaatttagccaggcatggtagtgggcacctgtaatcccagctacttgggaggctgaggcaggagaatcacttgaacccaggaggcagagattgcagtgagctgaggtcgcaccactgcactctagcctgggcaacaagagcgaaaatc

SEQ ID NO: 35664 - DNA, 657 bp, Homo sapiens
ctacaattaactgttaggtgataataaattcactgtcaatggggacattgatttatgtcatggggtccatctagcaaagaagtggcatttagttaaaatatgagctatgtaagcatctttcctgagcctgagataccgtgacttgatgaccactaaaatatctgaccatccatggctttgactccttggaaggtttcagattctattatcatgcttcttcatgtaagcagaaaacaggtgttatagtgtctttctctgtggctagttactttagttggttattttatgtttctaattaccattgaattattgggttcagggcaatgtatttattacactgtgagcaagtaagctttgtgttctacgaccctagggtaaatcccttaaattcatcaagattcccttgaaatgcaagtatggataaatgaactccaatcccatttcccaattctgggaaccagactaagatatatgcactaataaaggcactctggtaactttattttttattcaaaaaatattaatccctgggtagaaacaactcattacaaaaaaaaaagtgctacattttgcagaaggtcatttcagttttattagtcctaatgttggatctcctttcctaaaatctgaaataaacttgcaatttctgaattgata

SEQ ID NO: 35665 - DNA, 720 bp, Homo sapiens
ccaggcttagtaattctgacttttgaaatctcctgtcgtgaacaaatctacactgcactttatttcttgccccgtcctggaattcagccactcctgcactacatttcttaaggtgaagaagtgaaagacgaagacaccaatccaagtgaacgtgtgttattctcttctataatgctattgtattatattccctcttttttttttttaaattctcttgatttctctgcacaaaagagggaaattcttccaaagcaacggaaagtttccttgaaatacttttatctagtcacacttacatagtgtaatgtctctctcttacagcattgtacagtttgggatttgtttttaatcctgtggaaaatgtcctaacagggctttggtgtatctttgttccaatttctacattgcttggggagggggagaagctttctttgtattaaatgaaatacacctctacttcattaaataaatagacacctcaaccattagttgctaatgaaacaaaaatctaagtaaaacatctaactatccaaatactacattttctctacctttgccccaaaatgtgcctcatctccctgcacctccaaataatatttctagtgttttcattttattagttttgcaatgtcactgtccagatagaattattcgatgacttaaaacaactttcgtaagattttcaagccctaaattaaaaaatcatatttcaatacaaaa

SEQ ID NO: 35666 - DNA, 479 bp, Homo sapiens
gcagagcccccgtctgctcattgctatcatcatcaggggtatagtcagggacaccttgggcagctccctgcagcaaaaggagccaggtagaagaaccagtgtgggtgggctgggagctggaggaagagatggaagagtccagaacctgctctttctcacaacccacgtcatcttcatggacccacaggcatctgtcaccacagccctgatccatgctcatcggttatcctggggccacctttgaaaagcgttcatatttattatacactaggatgcaggtcattgtagtagttcagatcattaactttggtatgaagcattcattcaacaaatatttatttaaatgaatgtcaggcatgtgccaggcctgtatctcagcatctaggaatatatccgtgaacaaaatagatttaaattctgtgtttttttaaaaagacactatattgcccaggctggtctcaaactcccgggctcaaggg

SEQ ID NO: 35667 - DNA, 360 bp, Homo sapiens
  misc_feature (41)..(41): n is a, c, g, or t
cggtgattgtggatattctaggacctgtggctctggcacanagtacccagggccaccccagcctcacaagtcactgtgcccaaggccctgagggaagaacagcttgctcactagtgcctgaaggaggctcccaaggcagccaccttgtacactggagacactcccagcagtgggaggcagatcaaggccaggacaccgttaatgaagctttgactagggtgaggcatctcagggccagctggccttgctgcttctcaccccactctaagccttgatctgtccacatacttgaccctgttagaatctggtgtctgcccctcccccatcctgatgtaacacatctctgtagcctgaagccgg

SEQ ID NO: 35668 - DNA, 355 bp, Homo sapiens
aggacttatttatttaaagtgcttaagctttggttttagagtttctaagagatctagtggaatttgctattatgaaaagcattacccatgctattatgaaaagcatgaaaagattaagaaatctggctaaaggtcaggtgcccagcttcgaggaaaagttgggcttttagggatcaggaagcattaaaggcacacaaactttacattttgggagtcattttgttgagtaggtgaagtgagggatttggtcttgatatttggctgccccatctctatgtgggagctcaaagttaaaaacccactgtaggtaaatgagaaggacagctcttgaacctgggccagtctatattccttc

SEQ ID NO: 35669 - DNA, 365 bp, Homo sapiens
tttaatttaatttaatttaatttaatttaatttaaaacagtcgcttgttttaatttaatttaatttaaatagttccaagaccccctggatcacaagaccaaaccagacctgcaggaactttcctcctcccctcctttccctcaccccctgtacagaaacaaatatatcttcacacccatgcagtataaagttgaaaaataagatttcattttatttgctgcctcagtacttgtaccctaaagggtctcaaaggcttctattgccagatatgtcccccctacaatgggaaaggcccccacctggctatttcctttatcagttggggcagccgccctccacaggtcctcaccgtaatgggtttgtat

SEQ ID NO: 35670 - DNA, 398 bp, Homo sapiens
gcgtatgcaagcatattcaaggagacctgaatgcaaagtaaaactatgaaatttctcaggaaaattgggctagggaaagagctctcagaacttcaaaagtataatctggcggggcacagtggctcacgcctgtaatcccaacactttgggaggccaaggcaggcggatcttctgagttaggcgttcgagaccagcctgaccaacatggagaaaccccgtctctactaaaaatacaaaaattagctgggcatagtggcaggtgcctgtaatcccagctactcaggaggctgagacaggaggactgcttgagcctgggaggcggaggttgcagcaagccaaaaatgcgctactgaactctagcctgggcaacagagagagactctgtcaaaaaaaaaaaa

SEQ ID NO: 35671 - DNA, 583 bp, Homo sapiens
ctttccttcacagtcagcctgcatggtggtctgaggccttcccccctacagcctctcccctttatctttcacggtaatcacccctcattactcgtacttctaactccatcttgaaagctgcttcctggaagatccaaacggacacaaggagggactgaaggattagaatgagggaagtaacccatgcactgcttatttgagatggggaaccgaaggactttggcagttcctacacagagacagatggcagagatgacaaggtttctcagagaatgcgtgagtaactggaatggcttttcctgatgacccagacagcctgctcaagagcacactgttgcagctgccctccttggatggaactatggaatgatttttattcttctacttcccaggtgaatgggaaaccaaggacacagtcagcatttaacaaaaaggaatctgcatctcagtcagaactgtattgcatttgcttctctctggattaccttgaagttactccccttccctcaataataatggcattatgaaaaaaattggaattgatcaaatgaagtaaagagtaaacagaggaaagactaaaaaa

SEQ ID NO: 35672 - DNA, 600 bp, Homo sapiens
ggtcattagtattagtaatcattcctaaatgtatatgtaaacatttatttcagtgttaaatattgaagtgtttggtctttatttagaagtttgatgttgtgttttatgaccagaaatatgctgtgaacttaattctttcttatagcagttagcctatgggaaaattggttttgttctacattattttttttaaagtcataatttccaagatcctatcaactccattaagtgaggatttggcagttcctacacagagacagatggcagagatgacaaggtttctcagagaatgcgtgagtaactggaatggcttttcctgatgacccagacagcctgctcaagagcacactgttgcagctgccctccttggatggaactatggaatgatttttattcttctacttcccaggtgaatgggaaaccaaggacacagtcagcatttaacaaaaaggaatctgcatctcagtcagaactgtattgcatttgcttctctctggattaccttgaagttactccccttccctcaataataatggcattatgaaaaaaattggaattgatcaaatgaagtaaagagtaaacagaggaaagactaaaaaa

SEQ ID NO: 35673 - DNA, 387 bp, Homo sapiens
gtgcagtggcaggatgatagctcactgcagctatgaactgggttcgagtggttcttccacctcagcctgctgcgtagctgaggctacaggtatgtgccgcaactcccagctaattttatttttttttattttttgtagagatggggtcttgctatgttgcgcagcctgatctccaactcatagcctgaagagatcctcccactttggccctgcaacaggcataagccactatgcccagcccttttatttttagaacttttgtacaacatatatattcttttgtatatgtgccatactgtatacacacttttaaaaaaatgttttacacaatgaccaggtgtagtggctcacacctgtaatccacacctgtaatcccagcactttggg

SEQ ID NO: 35674 - DNA, 470 bp, Homo sapiens
ctaggacttagaaggcttaagatattatggtaatttctcaatttttttttagtacttgttgcatgcaagaggcagaaaaaaatttaaactaattcagacaaaaagagaatgcattcttttatgcaattgaaatgattctgacttcaaacacaggtggatccaggagattaagtaatatgccatcaggattgagtctcagtccatctcttggttctgtgttggacattctcatataggctgtcctgatacagaaacatgatgattatcggtggctctagacatacatcttattagtttctagtagaaagaggatgaactttttctccaaagagtttcacaaaaatcctgcagttagcattactggttctgatgtcctggttgcttcatcttgtcatccctgagttaactccaatagctatttaaaatggataaaagttgaaagcaggattccccaaggaacatctattaac

SEQ ID NO: 35675 - DNA, 339 bp, Homo sapiens
ttttttttgagatggagtcttgctctgtcaccaggctggagtgcagtggcgcatctcagctcactacaacctctgcctcccaggttcaagcaattctcctgccccagccttccgaatagctgggactacaggtgtgcaccaccatgcccagctaatttttgtatatttggtagagacggggtttcaccatgttggccaggatggtcttgatctcttgacctcgtgatctgcctgccttggcctcctaaagtgttgggattacaggcgtgagccaccacgcctggccaacatcatttattaagtaggaaatcctttccccattgcttttgtcaggtttgt

SEQ ID NO: 35676 - DNA, 419 bp, Homo sapiens
ttctctcagtaattttctgtcaataatatttctctcaataatttctctcttttctatgtaaagttcttgtatgtctttggttagatacattcctagctatttgctactgttgtaaatgttactatttttgagttttattttctaattattgctgatatataggaatataatttattactgtccttatattcagtaactgtactaaactaacttattcttaaagattctttaaggcatgctgcataattaattctaccatttgtgaataatgacagtttcacttttctctggttcttaacctattttatcatgaaggaaatggagtaaaactttttttagtggattggcaacttccagagaattagattgttttgaatgtgtctaggtagaaactaatacttgtctaaaacaaaaaaaaa

SEQ ID NO: 35677 - DNA, 417 bp, Homo sapiens
acctgatcagttttttgatagttcaggaactgtcatgctgcaaataccaattgttagggaagggagacctcaggtgtatgaatctttgaactaaattaaattgtatttcctactctccataactttaaacgtgatgcaaaaacatcgtatgatgtttaagtgtttctttgtctagcctctttcttcaagcaaatgttgagtcttttaattgaacttatttttagtgttctcatgtggataaatttccctaacagtagtttgccaaagataggatagcttctcttgtgatgtatactaatgttgagtttttaaaggcttggttgtcccctttatgctttcaaccttggtcaggcttggaaaggtagattcaggattgatttcagctgtttttttcctgcggtatatgagtctaaaggc

SEQ ID NO: 35678 - DNA, 394 bp, Homo sapiens
ttcactcatcacatcacactgtttctcccctcctagctgttaccacaacctgcaactaacttatcagttgtctactttattgtttatctgtacctgcatagggaccttaggctgtcttgcttcctgctacgttccaaaaagcctataatcatgtccaatgtcatagagggccccatacatatttattaaataaattaatccaggaaggcaaagctggatcaaactacatcagcacatctggagaattatagcagtcagaggaggaaaactgtgagttaggatggaatccagcagaatggttcactacctaagccaatagacctgaaaagtcttctatcattccttgactggacacttccctgcatgaaaccacgccatagtacaggtccacttt

SEQ ID NO: 35679 - DNA, 290 bp, Homo sapiens
taaatagactgcaggacaaattattatatctttaaggtattttcagtactaaatgcttaactttagagatgtttataaatgataacaataaatacttctgtatagcaaaaagaacctttaaatgatggcctatttagggtaatcaatgctgattataactaaattcccatataaagtattttgagttctttttttgttttaattattaaagtaaatatctttaatttctgtgtatgtatataactctctccacatatatatggagagagagagagtgcgagcaagcacac

SEQ ID NO: 35680 - DNA, 911 bp, Homo sapiens
tccctgtcacaagatagaagagtttcagtctaggcttaatggcaaccattggacaaagatgctttcttccacctaacaggccattaacatcttaaaggtatttttgtatctctaattttgtttataataggtgctcaacagaatgagctgaatggctgttacaaagggggtttgtaccttgggtaagagattaaaatataactcaaaatttccttctaacgctgcacctatggaaccatgtgatagaggtgtattaaaattgttatcgaagaatatatagcatatggtaaacaacagtttgcatatggaaaatgtctttgataatttaaccagaactgcattatattcaataacggattttctttataacaaacaacaggagaaaatggagttggcacacagtggatcactttgatatttttaatagtccaagtctggattttatttattcctgagccaacaattttgaacagcatattttccatgtttctgactgtaacaaaacattttcctcattgttccattgtaaatattcctcttgttggaactctttttaatcctgagatttaaacctgtacctttcaattgtctgtgacctttcaatttcactttcaatagttgaagaacttggctttgtaaatctctcagaagcttgaaaatatcttgtctctaccccctcagcccatttcatttgccaataattattttgtaagtagggttgaaatgaactcagctggccttgtgaaatgtttaaacttgcacaaacaactacatttttgttcaacaaatagcagtttactcagccaaaatcactttggatattgccattacaaatactgttaaacttcagaaatcatgtctgtaaattagatgagccaaaataaaggacaattgggttgatgctgcattag

SEQ ID NO: 35681 - DNA, 455 bp, Homo sapiens
  misc_feature (380)..(380): n is a, c, g, or t
  misc_feature (399)..(399): n is a, c, g, or t
  misc_feature (450)..(450): n is a, c, g, or t
cttctcagtttttggtgaatgtgtaatttaccatttgagaataattaaagggggaaggaagaaaatatctcaaaatatagtgaaatttttccttttttggtgcctgtttattcttggaaacaaattaatctttaaacagcatttttgcctcctgacctcaggtgatcctcctgcctcggccccgcaaagtgctgggattacaggcatgcaccacggcgcccggcctaatttttctattttctgtaagaggtgaggtcttgccatgttgcccagggccagtctcaaactcctagcctaaggcaaactgcctcaagccatctgcttcacctttacctgccaatgttgctgggggttacaggcatgagccactggttttcagnctaagggaaaaatattttnaagttgacaatgtagggaatgaggttaggttttttcaaaggggttcattanggatt

SEQ ID NO: 35682 - DNA, 297 bp, Homo sapiens
gtgggtgaaagacctttggtctctccctgctgggtagggtggttcacagttttgttccttttgtgcatttgtgcaggagactgagaagggtttcttctgagcagaaagcttagcctggggcttactggccagagctgcctgcagcctgggaagcaggtggagtctgcagtgctggcagcgccgccgtgcagcggtgtagccgtgtgtgcgcgtgtgtgtgtgtggtgagaaaccccacttttgctggggactgactcgtgaagaccacaaggtctgggcaacacagccttggcccgt

SEQ ID NO: 35683 - DNA, 495 bp, Homo sapiens
  misc_feature (33)..(33): n is a, c, g, or t
aatgcaaggattgccaggggaccccctgaaaanaatgtgaagtgactgaacagtgttaaccttagaagactagaacctaatgagttatggcaaacagatgttatgcacgtccctgaatttggaaaactaaggtcctctttggattcccagcacgaggcatcaaaccataccatggcatggctaggacccaacccggtaccaaaatgaagaaaatgaccctacaggacccacaatcccggatgatgtggcttccttggatgacacaggccctggacattacctgggggatgctgaagaagacaactcaggaggccaagcaaatcctgctccaggcacagacaccattcactccaggaactccagaagagaagggcctttttccactgtgtccattgatgaatcttcatcactgagaatggaatatgccacatagcagatgctcaataaatatgttgaattatgaaacaaattaaaaagcacttttagtcatattca

SEQ ID NO: 35684 - DNA, 725 bp, Homo sapiens
  misc_feature (33)..(33): n is a, c, g, or t
aatgcaaggattgccaggggaccccctgaaaanaatgtgaagtgactgaacagtgttaaccttagaagactagaacctaatgagttatggcaaacagatgttatgcacgtccctgaatttggaaaactaaggtcctctttggattcccagcacgaggcatcaaaccataccatggcatggctaggacccaacccggtaccaaaatgaagaaaatgaccctacaggacccacaatcccggatgatgtggcttccttggatgacacaggccctggacattacctgggggatgctgaagaagacaactcaggaggccaagcaaatcctgctccaggcacagacaccattcactccaggaagctgccattcattcgacataagtaggtgcttcatctgataagcgctgcttgtgtaatttatcaatgacagagaaggcagatagcagcatgcatacttggggctgcatttgaaggagagcaacatccctttgttttcacagaggagaacaagcatgagttgagattgtggtgcttcttgaagtctcatccagatcagaaacctgctgctctgtccacattccatccaccaaagcaacccatatggccatgtccagcatcagatggggaaaggcagttctcctctagcacgaggagctgcaaagccacatggcaaaggatgagtgtgtaaaaaataaatgcaggagggcaggaggcattgggaacaatga

SEQ ID NO: 35685 - DNA, 630 bp, Homo sapiens
gggactgcagctggaaagtcaagacaaagatgtgtgctggagaatagtaaaaaatgcatacaaattctccaagcaccaggagagtgcctctttctttagcagcctggaatcatctatgcctggaaacatcaatgtcttctggccagacaaaggccaaggagtgaaaggcgctatgcccagcaagaaaaacttacaagtggtgaaagtgcctgtgcagggatggggtcaggggctgggtcagaatgtccaaacctcagcatcgttacaggaggttcaaagtgccttttcctctgactcagaagcacctggtattaaagaattccatgctgcagaggctatgctccacgcaagagctagaacagcattttagggtggaaactaaatggaatggaggcgcaaatgctgttgaggagacagttgccctgggccaggtcctagcctcaccttccagctgcaagaagttgcttgagctttctacgcttctgcaccctcatctataaagtgaacagaatgacagtgccccataatgacagctttgataaggattaaatgaaattaagtatgtaaaatgtttaatacagtgcctagtaaattcttaataaataaatggatgacagtgaaaaaaaaaaa

SEQ ID NO: 35686 - DNA, 502 bp, Homo sapiens
tcagaatggcctgggctgaaactcctgaaaaagttagagttgacatttctcccctggggaagtccaggggcagaaggtgagtgtagaggaggagtggggactagactggctgcagccaaaaagggcatttgaagacaggcagagtgacctttggaggcaggaaagggcacagttttcctgctctccaaggcctcctaatggggcttttatttccatctgtccttggccttccccaagctgggttcaaggtttgaatgcccagggctgcttcaaacaggtgtacaggttgggcactgcacaaaggcaacaagagaacgggttagtgggacatccggcccaccctctaccagtggagccatgtgcccaggtgctggctgggtctccccaggaggagtgctgctccgtcattccacagcgtcatccctcacagccctggaaccgcctcttccaagactaaaactttccccatcctgtcttatggctggaagcccagcttaggagg

SEQ ID NO: 35687 - DNA, 333 bp, Homo sapiens
tttttttgaggcagggtctcactgtgtcacccaggctggagtgcactggtgggatcatggctcactgcagcttcaacctcccaagctcaagcaatcctcccgcctcagccttccaagtagctgggaatacaggcactccccacaatgcccagctaatttttgtattttttgtagacggaggctcgtcatgttgcccaggctagtctcaaactcctggactcacgccatccacccaccttggcctcccaaagtgctgggattataggcataagccactgcacctggaggaatactgtcttaatacgacaaattagtactaaagctagtatcttc

SEQ ID NO: 35688 - DNA, 316 bp, Homo sapiens
gctcgacatttaatctctcagtggctacattacatttatcatgaaattgatggacacttgaaattaaatgtgtccttaggttgtaatgacagaaatatagagtacaggaccacagagatattattcttgatcttgaccttgatcttgactggtcaggcttcatctagaatatttaccaattctgggtacatcaccagatagagatattcagaggagagggagcagaatgaagtagcttgtgaaaaccatgtcataagacaaattgaaatacttaaggtatatatctgggaaaacaaaacccagaagttaaaattct

SEQ ID NO: 35689 - DNA, 834 bp, Homo sapiens
ctgaaagttcagagtctgaggtggctgtctgggcctcttgggaagagctagcagaagagagcacttgggttgaccacaaacatggaagggcttacagggctcatcttctgttttctggaaatattttctcaaactattagagatgagtgaaggagcaagagtgaccaagtccttgatggttttcctcctccagaattactgaagcccatggaattatgagatgtcaagagaacctcccttcttttttttaaattttctactccaataaaatactttttcaatgcttgttttatgccaagcactttgttatgtgttgaggataagccgcttggttctttgctaggtattaagtactaacttgtcctcagaatttggaccaatgccttgagtttgggaatacttttattaaggttattagttagggtgagattttattgagggatgtattagaaatgacacagggtctagagttaggccaaagttcaaatctcagtcctgcctcttagtatctatgtgtaaatccctcttgaaatgccaattttggccgggcacggtggctcatgcctgtaatcccagcactttgggaggccaaggaggacagatcgtctgaggtcgggagttcaagaccagcctgaccaacatggagaaaccccatctctacttaaaaaacaaaacaaaacaaaaaacaaattagccaggcatgctggcgcatgcctgtaatctcagctactcgggaggctgaggtaggagaatcacttgaacacgggaggcagaggttgcggtgagctgagatcatgccattgcactccagcctgggcaacaagagcaaaactc

SEQ ID NO: 35690 - DNA, 523 bp, Homo sapiens
aaaggaaattttatgctacccctctggcttttgtgggattctttcacatcccaggtgcctcttggagacagatctcagaagggctgtggtgtcagaagggacatggaggaggtcaggagggctcatggttccttttctttagaactgatacgaggcttggctagtcactgtgagctccagcagctccagcagcctggaataagacacctagaaggctcatccctccatgtccatgtccttttttgttttttagattgaacaaccatgctttgtttaaaaaataatctcagcaaactagggatacaagagaatttcctcaacctgtcgaagggcatctttaaaatatctactgctaacatcctatgtaatgatgaaaggctgaatgttttcccctaagattgagaataagacagagatgtcaactcttaccacttctattcaacgttgtactgaaaattctagccactgcaatcatgttttaattgggagtagggggaaagagggagggaaggagaaaaaaaaa

SEQ ID NO: 35691 - DNA, 171 bp, Homo sapiens
ggacacatggctaaaaggagttaagaatggcaaaagctaggttctcagaacacattcaaaaccagctttattcttttgggctcagtatcaccccgcagatatacaacacgaagtcactgctaattcttgtttgtctgtgggccttagtttcgcttgatagaaaaaaaaaaa

SEQ ID NO: 35692 - DNA, 438 bp, Homo sapiens
ttttttttttgtatttttagtagagacaaggtttcaccatgttggccaggctggtctctaactcctgagctcaagtgatccgcccacctcggcctcccaaagtgctaggattacaggtatgagccaccaggcccagcctaaaatgtacttttcaatgctttgttagtaatacgggaatccagataatataggatttaaggaattaagatcaaacagaccaggttccagtttctgctccatctctcttagcagttttatgaccttgaacgcaccctgtaagtgtccctaagcaccagttctctcatctgtgaaatgagaattatcacaactcccactttagagtttttgtgaagattaaattagacaatacatgccaaatgtttaacataaagtacatgttcaataaatgttaggtgatgacaatgataaatacaaaaa

SEQ ID NO: 35693 - DNA, 858 bp, Homo sapiens
tgggacaataagcctggaggtttctctccctgtgctttttctcgcttgttgtgatatccctgcctaccaaaactcccaagaagtgtcagctccaatgatgtttctttgaatcaccccatctggcaagatgcaaacactcttgcttttgaattgctttgtcactttctgtcttagctgttgagcacagttcaaaacccatttgctgagcctgtcctgtggacagccatggtggcaggagccagggatgtagaagtgaccctggagtcaccagggttcagtgtgtgtcttgcctgcctggattgtacaagcacccacggctcagagacggagacttcctcctctctgtaactgcacttggcacctggtagtgagtctggtcaaacagatgctcctgcactcaccagtgaatagacccataagatgtgccgcctttgagatctttgctttggtggatttgaaatatgggaggaagagctgagctgcactgtgtgtgggccagagtggtgcgtcgcaggcatgaagaggccaggagtagggagagttccatgggggtcaggatcagagaggtccatagtaggttcaggtgtggtggctcatgcctgtaatcccagcactttgggaggctgaggtgggaggatcacttgaggtcaggagttcgagaccagcctggccaacatggtgaaactgtctcaactaaaaatacaaatattagccgggcgtggtgacacgtgcctgtaatcccagctactctggaggctgaggcaggagaatcacttgaacctgggaggcggaggttacagtgagctgagatcgcgccactgcactctagcctgggggactgagcgagactctgtctca

SEQ ID NO: 35694 - DNA, 470 bp, Homo sapiens
gcaaagatatgggagtggacgcgtgtgtgtctgtgcccaaggaaaaatgaaagtaaacccatgttctctcactgacattcttttcagacagagctcagccccagctctgcgccccgccgcacgtccctcataagtcgatacgggatgcagcaggtcgggagagagactctgcgggtttcaacttccctggcctcactttaatttggctgccgttcccacgctgcctacctccacccacctccaccctgagacctgacacccagtggcccagggtacctggtggctcccccaaccgatgatggggataggttccgtgtctttcacttcctcttagtaactcattattattgcctgattctcatgtgttctttatcgcattcccagacttactgaccacaaaacatttaaaacattttaccaacaagaacttgtggggtttattgtctgctgaaaggcaactgccaaaaaag

SEQ ID NO: 35695 - DNA, 645 bp, Homo sapiens
gacaccagcctgaccaacatggagaaacctcgtctttactaaaaatacaaaaaaaaaaaaaaacattagctgggcgttgtggcgcatgcctgtaatcccagctgctcgggaggctgaggcaggagaatcgcctgaacccgagaggcggaggttgcggtgagccaagatcgtgcaattgcattccagcctgggcaacaagagcgaaactatgcctcaaataaaaaacaaaacaaaacaaaaaaagagccagagtaaaaagttacagcctattagaaatgtatttggaatctggaatcagtatttacagcttggctgtgttcccatttcatgcatgatagtcaatgagcagttagttgcattcaaagcacattgctcattttggttatatttaccttcaaaatcaggaaaatacggaataaatatttgcgtttatgtggttaatactcactaaacttttgaatagatttgtttttcactatccctttcttttgtaaaattattcataaaatcatttaaaaatacaaaaataaacagagttcactgaacccagatggtaaatggtggtgatgactattttttcttgtataccgaaagttattaatagaatattccagctgccctcctccagaatcttttaaaaaaaaa

SEQ ID NO: 35696 - DNA, 803 bp, Homo sapiens
aagattttagctatttcacatcctcccaagatagtaggaagttgtctgcgcatattttttttttctcaaggcttctctgtactcagccattatttaattaaacaccagccatatgctgggatctgctggttctctgcttgacgcattgccagcctggtggcctcaactgcaatttgaagttgacaggcgtacaatacaaagctcaggagacactaggaagaaaaggacttggcttggaggaatcaggaagacccagggagagaaaagtgtgccgctccaagggagggtttgcccaagagtggctcagcggaaacgtggcagtggaatttggaatctggattgtttgtcagaattgataaagacattcttataaggaaatgtatctgtgaaaagttgtttgccactcggggagggagaaaaatgattatagaattttggagacaaaaatgtatacgcagcagtcattatacacatgatcagaaggaaaaccagaagatccaggggccaaaggggaataattgatttcttaaatggcagcaagactggatttgacaactctcacgatcaagaatatttctctgtatttaatctacatctcttctgctcttagactttatattcattttctcttttttacccattattggtctttttcaaaaacaaaaatttgagacagggtcttgctcttacagcccaggctggaaagcagtggtacaatcataattcacagcagccttgaacttctggggtcaagtgaccctcccaagtagctgggactacttgggtgcttgccactaccccct

SEQ ID NO: 35697 - DNA, 418 bp, Homo sapiens
taatgcaaattcccgttgtactgtatttaattatgcacaaaatggtgcccttgactcagatttcagtgaagaacttcatttttttacttttaagtctccaagtaggaaattcaattagcgttatgaaagaaacactaaaatgtggcatttaattgcaaaatatattttaagcttttcatttatccagtgactttgccagcagtcactgaccccttcattcagagatccttttctgtttcaaaaatgcaatgcttcctttttagtatattcaagcatttgtgaaaattattgccctcatgtactcagaatgctgaataataagtgtaataaatgttatttctggttctcctttggttctcattctaacatttttatgagagatttaaaggagcaaataaactataattagaaaaaaaaa

SEQ ID NO: 35698 - DNA, 1323 bp, Homo sapiens
agcctcacgcctgcctccctatccttccaggaagtagagggaggcctgaagacccgggaatcctccaatggctctgccctgtcgccctgtttcaatcctctgcctggtgtttacatcccttgtttctgtttttgtttcctgtatctcctctctacacctctgtgtctaatacagtagccattattacaatgaaagaaaataacacattcagtccctcagtgccactagctatatttccagtgctcggaagccacatgtggctgatggctgtcaaattggacagcatggtagggaacatgtccatcatcaaagaaagttctagagtgtctgctccttaagacaggactctatgtacatggtcccagctgtgcccccagcacctagtgtggggtctgccatgcagtgggcatctgggaggtaaatggattggtgatgggatggcacactgtgttaggcaatgctgggtgtaccccgagtcggtaacctgccttttggggtgagagagccacaccatttctctctgtgcctgcactgcagaggaagcacatacacccacatgtatggagttgaagtgtcatgcccaaggagggagaggtgatggaagcactgggcagtggtgagcagcagacctcaactccaccccaccctgcactcaccaggtgggggacctctttgagccttaacatccgtgcctggaaaatggggccggcatttgtgtcttgcatacgtcttggctgttgcaaggcttgtgtcagatgagagcaggtatacgagtgctttggaaactccaaagctgtgttttttcaaatgtgatccatggaccagaagcagcagaaagtgggaaccttctggaatgcagcctaagcctctcccagagggcagcaggatcagggcaagaaggagacagccctttagaaaggcagctgcccagtgaagcctaaggaagtgtggcagcgccgtccaccctgtgtgtgacatggtggagggtctgtccctgagccggcagcctgtaccccacgcctctcagccccctcagaaagcctcctgccccctgcactcccagcctctcccttgtgcccattcccattgctagaattgttggcaacagtgcagcagcagcgatgacagcaggtagcgcccattttgccatgtgcaggcacggggttgttttacgttcattcatttaacccaatggagagtatctgtgttccaaacatcaaaaagggacagtaaaaatacggtcctataggactgccattgtatacatggtctgttgttgactgaaaggtcattatgtgacatgtgactgtattatccttggcc

SEQ ID NO: 35699 - DNA, 595 bp, Homo sapiens
caaagccaagacgtatgcaagacacaaatgagagcaggtatacgagtgctttggaaactccaaagctgtgttttttcaaatgtgatccatggaccagaagcagcagaaagtgggaaccttctggaatgcagcctaagcctctcccagagggcagcaggatcagggcaagaaggagacagccctttagaaaggcagctgcccagtgaagcctaaggaagtgtggcagcgccgtccaccctgtgtgtgacatggtggagggtctgtccctgagccggcagcctgtaccccacgcctctcagccccctcagaaagcctcctgccccctgcactcccagcctctcccttgtgcccattcccattgctagaattgttggcaacagtgcagcagcagcgatgacagcaggtagcgcccattttgccatgtgcaggcacggggttgttttacgttcattcatttaacccaatggagagtatctgtgttccaaacatcaaaaagggacagtaaaaatacggtcctataggactgccattgtatacatggtctgttgttgactgaaaggtcattatgtgacatgtgactgtattatccttggcc

SEQ ID NO: 35700 - DNA, 198 bp, Homo sapiens
tcaccatctataggacaatatgtgctttgcaataataacattagatttctagaaacacacacacatgcataacaccaggaacaaattttcctataacttattttattgatttcttttacatatatgaaatagaaaaatgatattccaaagaattatacctctcaattttttttaggaaaaatgtttaaaaaataaaaa

SEQ ID NO: 35701 - DNA, 431 bp, Homo sapiens
ctaccaacctctgaagggggaggaagggagaaagggagagggcagaaagaaaagaactcacagaaaaataattaacaaattagtatatgatttttgttaaacttgaaccatttagacatttctcaattggaaaacaatcctaaaatcaaaatatgtgaggccaagcacaatggctcatgcctgtaatgggaggccaaagtgggaggataacttgagtccaggagttcaagaccatcttaggcaacacagtgagacctcatctccacaaaaaaattaatttaaaaaaaattagctgggcatggtggcactgcaagtcccagctactcagggagctaaaggaggaggatcacttgagcccaggaggtcaaggtggcagtgacctgtgatgacaccactgcactccatcctgggcaacagtgaaactctgcctt

SEQ ID NO: 35702 - DNA, 182 bp, Homo sapiens
catgacactactggttaatacataactgagagttaataaattttgctgtgttacagtctaatttgctctctaccaacagagaccttctttctttttctgtttagtttttcaaaacaagagttatttaatgtgcttgaaaactagacatttttcctagttgtgttcactgaattagcatttat

SEQ ID NO: 35703 - DNA, 401 bp, Homo sapiens
attttagtgaaagtctcctaaaactagtcctggatgtgttttcatcacacttgaagtttaattaactgataactcaggcacaatggaaatacttagatagatgctcttaaattacatttaaacaaaactatttacaagcgatctagtaaaaatctgtgtctttaatgggctatttttaatgtttcctaaacaaattattgtaggtgggccaattttccctctttacttgttacttagaagcccatttggacatgttctaccccgatctggttctctcaccccactggctacagaatagtgtgtttttgtttgaaagggtcaaaacattaagaatgtgacatccaaaatatgtgctatttttttttcctggagtcaaaacccctaaagtataaatcgttttt

SEQ ID NO: 35704 - DNA, 840 bp, Homo sapiens
tcctgcccggatgttgcatttcccaagaccaccctggcctgccatgccctcatcctgtgcctttaaaaacccccgagaccctggcaggcagacgcacaagcagctggacattgagaggagcatataggcagagaatacaggggctgctggatgtcgaaaggaacgcaccagcataggagcacaccggcatgctggcaggccattgaccagcggaagaatgcagagtttgtcgcgggaggtcagagaagagtcaggccgccatacctgactccaggagaaaaccgtctcccttctggttcccccgtctgccgagagctacttccactcaataaaactttccactcattcttcaagcccacgtgtgatccaattcttcccgtacaccaagctattgcgaaaggggttgagttcttgatttgattcactgcttggtcgctgttggtgtatagaagaactaccgatttgtgtacattaatcttggacctggaaactttgctgaattcttttatcagttctaggagctttctggaggagtccttagggttttcaagtgctggtaatgatgtatacctggcagctgaccgtcaaatcttatgaaggattaaaacataaagtttgcattaaaggtcaaaacagtcacaagcctgctcaaattcggaaagaggggacggaaatggaacctcttcatgggaggaagaaacagggtcttgctctgttgccctggctggagtgcaatggtatgatcatagctcacagtagccttgaactcctgggcccaagccatcctcctacctcagcaaccagagtagctgggattacaggcgaatgccaccacacctg

SEQ ID NO: 35705 - DNA, 753 bp, Homo sapiens
caggcgcccaccatcacaaaaatacaaataatttttgtatttttagtacagacagggtttcaccacgttggccaggctggtctcacacttctggcctcaagtgatccacctgcctcagcctcccaaagtgctgggattacaggagtgagccaccgtacccagcctcctcccaccctttttgaagggttgatgtttcaagtctgtgaactgtggatgggccttgcctttagccctccagtcagtgctgctcttaggattccaatgaacacaacacccaggacttgcctttcatatctggagctcaaaatgctcaccttcaggtctgagaagccccagaatttgccatggggctactggacggtcatgtccttggagccaagcttagtagagagagagccacccagaaaggtggacagggcggcaggctgctcaccagagcatggccgtgtgctcacaaggggtcctgtttgatgaaagtgtcaaaccaagcaagtaccatcttggaggaaatgggcctgaagagtgcttgggacaaggaacaagcgtgtcttcgcctctcttgtgagatgaggtgtagcttgcttcagcacattggatgtccggcctggttttgaacctcagccttacttcctactaattatatgaccctttagcaaagttacttggcttctccaagccttagttccccctactagcgcctgtgtaggaatggaaggtgcttatacagtgcctgccctgtggtggaaaagccag

SEQ ID NO: 35706 - DNA, 339 bp, Homo sapiens
gaagcgggggtgcgtgcgcgtgtgagtgcgtgtgtgagtgtctgtgtgtgtgtctgtgtgtgtgtgtgagtgagttttgccatgttggccaggttggtctcaaactcatgacctcaggtgatccgcccgccttggcctcccaaagtgctgggattgcaggcttgagccactgtgcccagcccctttctgttctttctagggtaggcgccacactttcctgagtgttttttgatctagcttgagaaggttttcagtactgctttgctataagtttgtctttccttgtatcctgtcatacttacttaaggtagtattccccacataaaaattctgtgctat

SEQ ID NO: 35707 - DNA, 533 bp, Homo sapiens
ccaaagatttttgactaaaaacagatatagtaaaaatgatgtattaggagggtagactggaagttgggttcaaattgaagacagaaagataagctctacagtagtgtgcatggataagtatggtgatgagtccccaggttacaaacggactctgaattgatgagaagtttccaaatctgaaagagattgctaaagaagagcctacagaatataatgactgatgggaaagcagtccaatttcagatccctcatgtgttgcgaaatgggcataaatatagtgcacacaaggtttctaaatattttaagtctcttcctggattcaccaatgtatatttcaccaacatatatatgaaattgtaacttgttaaacttctctgttacttcaagtttcactcttgtctttttagaggatacgcaaacctcatttcatcatttctactctagagactgcttatttggtagaatgaaaaagtacaacttggatagtaaactactgtattcagattttgcacaaaaacaacaaaatacaatct

SEQ ID NO: 35708 - DNA, 281 bp, Homo sapiens
acagtcccagggtaggagagtatgtcaggatgagtgctttagtgtacaccttaaaccagagtagtgtatgggtcagggagtccctgatgccttcctgaaatgaagatctagttacctttgaaaagacattgtcttgcctttactttgtggagtcattctgttcagggttaagaagcagggatggagagttcgggccacccgcactgaagtctcattctacctcctcctggctgtgagtcctggagccagccccttgtgttttgagtactcagttcacacct

SEQ ID NO: 35709 - DNA, 445 bp, Homo sapiens
catgtccttaagccttaaccagttgtacaaatcacccacttgactctctttcactttatcagggccagaaaagttaccctaaccgacgaaaagaaggagaaggtccccactgacccctgctccagcccagttctgtgctggatcagtatagttttgcctttcctgatgactcaccgtcccgtctccctgacttctatccaataggccctactgccagccaattgttcaccttttaagttcaactggaaagaaatttgattttaagacaatcagggtctggtctgtattcacaggttatcatttgggttagttaggtctcttacagccctttcttttcctgtctttttttgattcgaggtgagagtctatacaatcagttgcctgcctgctctaacttgagtgcctgttctacttaggcagattctgttctaaccatcgagaacct

SEQ ID NO: 35710 - DNA, 343 bp, Homo sapiens
gggcctctaaaatcacgaagctgaagggaaaattcaagctgggaatgcttagacaaacctgctgttagaaatagataatcggtgccatgaagaaaagtcagcatggagacaaaggatttctccacaaggccctttttattttctgccgaaagggtgctccccgcagatggaacaattttgacaattttggtgtcaatccgtatggggacccgttctcctctggcagtggtctctagtcctctctcatgaggaggtgtcccgtcaccttgtttcggtggcctcaggggtgaggaatcaagacccacccagtgtgacaaataaacccagactctcagcaatgtgg

SEQ ID NO: 35711 - DNA, 347 bp, Homo sapiens
gtttggcctttagcacagtgccaaacacagagagatagcttatgataaatgttcattacattgaattatagtaaaggaagaagttcaatttcacaattctccaagttgcaggtgaaagttaataggaagagaaaccgtattccaaacaaggaaaggctatctgaagttataaggtgtgcatgtgtgtgtaaggatataggcaacgagttatttccagtgtaaggtgaaaacctataattcttatgggtgaaaacattatgtttcatgtttcggggcaatgacctaaatctgaatgttggcaatgcttgcctaatctagtcagttggctcaatgccttcagaaattta

SEQ ID NO: 35712 - DNA, 437 bp, Homo sapiens
gttggagacaagcctaggcaacatagtgagatcccatctctacaaaaattttaaaaaattagatgggtgtagtggcgcatgctgtagtcccaagtagttaggactacagatgcatgccaccatggctggctaatttcgaaaaattttttttgtagaggcaggttctcactatgtttcctaggctggtcttgaactcctgggctcaagcgattttcccaccacagcctcccaaagtgctgggatacaggtgtgagccaccatgcctggccctgtgtgtatttatttttacataacataataaaaatctgtggagtcagcaatctgacacaagaactggaacattgataacctgttttccccaatgaattcctttaccatcccatctcctgccttccttcacctgaggtaatgtctatcctgattcttccagaacatta

SEQ ID NO: 35713 - DNA, 213 bp, Homo sapiens
ggacttcagcttaacacagggagtgagggagagggcaagagcatgggcaagagggagggtttagttttgagcagatagatccagctcctagtttgccttagaccctggaacactggcttctttcattcggccctttagaggagtggcccagagtagcctagcagggactgaactctttcggatggcttccagagcattgttcccaagaccctc

SEQ ID NO: 35714 - DNA, 545 bp, Homo sapiens
tttttttggagacagagtctccctctgtcgcctaggctggagtgcaatggcacgatctcgactcactgcaacttccgcctcccagattcaagccattctcctgcctcggcctcccgaatagctgggactacaggcgcacgctgccacgcccggctaattttttgttttttttttaatagggacggggttttaccgtgttgcccaggctggtctcgacctcctaagctcaggcaatccgtccgccttggcctcccaaagtgctaggattacaggcgtgagtcaccgtgcccggcatgtaaaattattttttaaagtcaagaaaataagcagaaattcagaagaagagttaacctcttggggagacggaaggagtacactgagaagggggcacacagaggactagaaagatgtccttttttaaaactatgtgtcgagtacactcaatatgattattaaattatacatatatatttttgtttgcatattatctagttcataattaaaagtagaaaaaaagtaaacagatgaaggaatgaatgataagt

SEQ ID NO: 35715 - DNA, 476 bp, Homo sapiens
cgcttgagcctaggagtttgaggttgcagtgagctatgatcatgcttctgcactccagcctggggagcagagtgagaccctgtcttaaaaaaaaaaaagaagaagaagaaaaggtagcaggtgttaattatggaatctaggtgaggtaggcatatgggtgttcattgtataattgtttctacttttatggatgtttgaaattcttcctaataaaatgttgggaaaatctgcatatgaaaatcactgtggctgcagtaatatgaatagattggatggatacacaaatggatgtagagagaccaacttaaggctcatataatctgcttccagccacaacatactagtgctaccagactggacctttcaccataaacaactacaaaagactgggcaaaaaataggaagcaactattttcagaaaatggaaataggatatacaggattgcaatccctacgagaagggaaacacatgaggt

SEQ ID NO: 35716 - DNA, 469 bp, Homo sapiens
cagaagatagtgaccaggatgggtctgaaaatcatgtcatatgagaaatggttgaaagaaagaactggggataattagcttttactttaagcctcggtttagacccttcaagtcttggttaggttcccttgctatgtgctccacagtcctctgaacaagcctcatgccttccccactagaccaaggactttgttagggcagggtaggggctctgtgaggactttgttagggcagggtaggggctctgtgttcactatgatatccacaagacctagcatgggacaggatgtgtcctcagcaatggtcagagaatgagtgagtgaaatttccaattgtgagggccttacgtaaaaatgataaagaactgtagtgcctggcatctatagtcattaaattaaaaaacgaacaaggaacttagaagaggtcctaaaagtttttgaatggtgctttttgttttttggcctctctg

SEQ ID NO: 35717 - DNA, 1072 bp, Homo sapiens
ggcgacgggtgggtccggcgggtccccgggcggggcggggccggggcgaggggtgccgggtggttttccgcccggcagcccgcagcccgctgcgccccgggccgcgtctcccggcggtgggagggggcggcccccactcggttcctggcccctcgcggccccgtcagcctcccgctcggggtgcgccgcccttcgtctgggtctccgcccccaggacccgcggccgagagctccggagcgcggcttccccggccggctgcgcgatgggctgcgggaactccaccgccaccagcgcgggcgcgggccaaggccctgcaggagcagccaaagatgtaaactatggaggagtatatgttggcctaccatctgaagctgtcaatatggtgtccagtcaaacaaagacggttcggaaaaattagaagaaaataacatcatgactcaagaatcaagagcttgctcatcagtttggaaggaatttggctccgtgggacgttgtaatgtgcacagacatttccaaggaaattctaaacagtcacccttcccttttgcattcccccaaatcttaagtgtatacataaaaccctgggtacatattgttgtggtaatagaagggaattggttaaacagtacacttgtttatggaactttctgtggccacctacgaaagacaagttaacaaactgtcatggaggctgttgttgcccagccagggccgctgcattttgacaacatttccaccctggccactcagcacatttcatggaggtcatgtcttttcactgatacttttttgatagtttttatataacaaaatccttattctatttataacttaagatgataaggcactataaattaatgacctaaaataatatatttgtctgttatcttttgctatttctacttcactttaatttttagctgtaaaattggtaaatggattcttacaactatctctttccatttcttactatttggttttcaaatttcatttaaatgtcagaatttccttttttaggaacaatgtgtatttcattgcactatttaaaaataaactcaaatttgcatgcca

SEQ ID NO: 35718 - DNA, 1373 bp, Homo sapiens
ggcgacgggtgggtccggcgggtccccgggcggggcggggccggggcgaggggtgccgggtggttttccgcccggcagcccgcagcccgctgcgccccgggccgcgtctcccggcggtgggagggggcggcccccactcggttcctggcccctcgcggccccgtcagcctcccgctcggggtgcgccgcccttcgtctgggtctccgcccccaggacccgcggccgagagctccggagcgcggcttccccggccggctgcgcgatgggctgcgggaactccaccgccaccagcgcgggcgcgggccaaggccctgcaggagcagccaaagatgtaacagaagaatccgtaacagaagatgacaagaggagaaactatggaggagtatatgttggcctaccatctgaagctgtcaatatggtgtccagtcaaacaaagacggttcggaaaaattagaagaaaataacatcatgactcaagaatcaagagcttgctcatcagtttggaaggaatttggctccgtgggacgttgtaatgtgcacagacatttccaaggaaattctaaacagtcacccttcccttttgcattcccccaaatcttaagtgtatacataaaaccctgggtacatattgttgtggtaatagaagggaattggttaaacagtacacttgtttatggaactttctgtggccacctacgaaagacaagttaacaaactgtcatggaggctgttgttgcccagccagggccgctgcattttgacaacatttccaccctggccactcagcacatttcatggaggtcatgtcttttcactgatacttttttgatagtttttatataacaaaatccttattctatttataacttaagatgataaggcactataaattaatgacctaaaataatatatttgtctgttatcttttgctatttctacttcactttaatttttagctgtaaaattggtaaatggattcttacaactatctctttccatttcttactatttggttttcaaatttcatttaaatgtcagaatttccttttttaggaacaatgtgtatttcattgcactatttaaaaataaactcaaatttgcatgccatatgcacattttgattacatttttattttctttcgtgaaaggcatgtgcaactacaaatacttcatagctgtttgggttgctcattctacatcacgacaatctcatcatattatttctataacttttcaaggacttgcgatggatggttagtgggatatctggaaattaatttgataatgacttgtgtatctacttagtattgcaatgtaagttactcaattcaccaatgtatttcaacaattaaaacatttttatccctcttca

SEQ ID NO: 35719 - DNA, 1468 bp, Homo sapiens
ggcgacgggtgggtccggcgggtccccgggcggggcggggccggggcgaggggtgccgggtggttttccgcccggcagcccgcagcccgctgcgccccgggccgcgtctcccggcggtgggagggggcggcccccactcggttcctggcccctcgcggccccgtcagcctcccgctcggggtgcgccgcccttcgtctgggtctccgcccccaggacccgcggccgagagctccggagcgcggcttccccggccggctgcgcgatgggctgcgggaactccaccgccaccagcgcgggcgcgggccaaggccctgcaggagcagccaaagatgtaacagaagaatccgtaacagaagatgacaagaggagaaactatggaggagtatatgttggcctaccatctgaagctgtcaatatggtgtccagtcaaacaaagacggttcggaaaaattagaagaaaataacatcatgactcaagaatcaagagcttgctcatcagtttggaaggaatttggctccgtgggacgttgtaatgtgcacagacatttccaaggaaattctaaacagtcacccttcccttttgcattcccccaaatcttaagtgtatacataaaaccctgggtacatattgttgtggtaatagaagggaattggttaaacagtacacttgtttatggaactttctgtggccacctacgaaagacaagttaacaaactgtcatggaggctgttgttgcccagccagggccgctgcattttgacaacatttccaccctggccactcagcacatttcatggaggtcatgtcttttcactgatacttttttgatagtttttatataacaaaatccttattctatttataacttaagatgataaggcactataaattaatgacctaaaataatatatttgtctgttatcttttgctatttctacttcactttaatttttagctgtaaaattggtaaatggattcttacaactatctctttccatttcttactatttggttttcaaatttcatttaaatgtcagaatttccttttttaggaacaatgtgtatttcattgcactatttaaaaataaactcaaatttgcatgccaaaaaaaaaaaaaaaaaaagaaaaaggaaaaaaaaaaagaaaaaaaaaaagaaaaaaaaaaagaaaaaagagaagagaagagaaaatgaaaaaaaaaaaacagaaaagaaaaaacaaaggaaaggggggggggcgcaagaaataataattcagaccaccgggggggggaaaacatgagacaaggcaaacaggacgaaagtgaacaagggaagaagacggcagaacaacgcatgaggagataagatagatagagcacagcagagcgatcggcaaataaacaacaccgagcaaagagagaacaaaacgttagtgagaataaaaaaacaaaccacacggaggcagagaaaaaaagcaccaccaa

SEQ ID NO: 35720 - DNA, 1162 bp, Homo sapiens
cctgatcagttctgtttggaagaatgaaaatgacagctaagtggtgtgatctaactgacacagggaaagaagctgaaattgaccactcaggaaatgaggccctgcaggagcagccaaagatgtaacagaagaatccgtaacagaagatgacaagaggagaaactatggaggagtatatgttggcctaccatctgaagctgtcaatatggtgtccagtcaaacaaagacggttcggaaaaattagaagaaaataacatcatgactcaagaatcaagagcttgctcatcagtttggaaggaatttggctccgtgggacgttgtaatgtgcacagacatttccaaggaaattctaaacagtcacccttcccttttgcattcccccaaatcttaagtgtatacataaaaccctgggtacatattgttgtggtaatagaagggaattggttaaacagtacacttgtttatggaactttctgtggccacctacgaaagacaagttaacaaactgtcatggaggctgttgttgcccagccagggccgctgcattttgacaacatttccaccctggccactcagcacatttcatggaggtcatgtcttttcactgatacttttttgatagtttttatataacaaaatccttattctatttataacttaagatgataaggcactataaattaatgacctaaaataatatatttgtctgttatcttttgctatttctacttcactttaatttttagctgtaaaattggtaaatggattcttacaactatctctttccatttcttactatttggttttcaaatttcatttaaatgtcagaatttccttttttaggaacaatgtgtatttcattgcactatttaaaaataaactcaaatttgcatgccatatgcacattttgattacatttttattttctttcgtgaaaggcatgtgcaactacaaatacttcatagctgtttgggttgctcattctacatcacgacaatctcatcatattatttctataacttttcaaggacttgcgatggatggttagtgggatatctggaaattaatttgataatgacttgtgtatctacttagtattgcaatgtaagttactcaattcaccaatgtatttcaacaattaaaacatttttatccctcttca

SEQ ID NO: 35721 - DNA, 1110 bp, Homo sapiens
tagaggacgagaaaggatggccttggttaaataaatttaaattctagccctgcaggagcagccaaagatgtaacagaagaatccgtaacagaagatgacaagaggagaaactatggaggagtatatgttggcctaccatctgaagctgtcaatatggtgtccagtcaaacaaagacggttcggaaaaattagaagaaaataacatcatgactcaagaatcaagagcttgctcatcagtttggaaggaatttggctccgtgggacgttgtaatgtgcacagacatttccaaggaaattctaaacagtcacccttcccttttgcattcccccaaatcttaagtgtatacataaaaccctgggtacatattgttgtggtaatagaagggaattggttaaacagtacacttgtttatggaactttctgtggccacctacgaaagacaagttaacaaactgtcatggaggctgttgttgcccagccagggccgctgcattttgacaacatttccaccctggccactcagcacatttcatggaggtcatgtcttttcactgatacttttttgatagtttttatataacaaaatccttattctatttataacttaagatgataaggcactataaattaatgacctaaaataatatatttgtctgttatcttttgctatttctacttcactttaatttttagctgtaaaattggtaaatggattcttacaactatctctttccatttcttactatttggttttcaaatttcatttaaatgtcagaatttccttttttaggaacaatgtgtatttcattgcactatttaaaaataaactcaaatttgcatgccatatgcacattttgattacatttttattttctttcgtgaaaggcatgtgcaactacaaatacttcatagctgtttgggttgctcattctacatcacgacaatctcatcatattatttctataacttttcaaggacttgcgatggatggttagtgggatatctggaaattaatttgataatgacttgtgtatctacttagtattgcaatgtaagttactcaattcaccaatgtatttcaacaattaaaacatttttatccctcttca

SEQ ID NO: 35722 - DNA, 1085 bp, Homo sapiens
ccacggaaaaattgggatgccgttaccaaaaaaaaggggagaaattaacagaagaatccgtaacagaagatgacaagaggagaaactatggaggagtatatgttggcctaccatctgaagctgtcaatatggtgtccagtcaaacaaagacggttcggaaaaattagaagaaaataacatcatgactcaagaatcaagagcttgctcatcagtttggaaggaatttggctccgtgggacgttgtaatgtgcacagacatttccaaggaaattctaaacagtcacccttcccttttgcattcccccaaatcttaagtgtatacataaaaccctgggtacatattgttgtggtaatagaagggaattggttaaacagtacacttgtttatggaactttctgtggccacctacgaaagacaagttaacaaactgtcatggaggctgttgttgcccagccagggccgctgcattttgacaacatttccaccctggccactcagcacatttcatggaggtcatgtcttttcactgatacttttttgatagtttttatataacaaaatccttattctatttataacttaagatgataaggcactataaattaatgacctaaaataatatatttgtctgttatcttttgctatttctacttcactttaatttttagctgtaaaattggtaaatggattcttacaactatctctttccatttcttactatttggttttcaaatttcatttaaatgtcagaatttccttttttaggaacaatgtgtatttcattgcactatttaaaaataaactcaaatttgcatgccatatgcacattttgattacatttttattttctttcgtgaaaggcatgtgcaactacaaatacttcatagctgtttgggttgctcattctacatcacgacaatctcatcatattatttctataacttttcaaggacttgcgatggatggttagtgggatatctggaaattaatttgataatgacttgtgtatctacttagtattgcaatgtaagttactcaattcaccaatgtatttcaacaattaaaacatttttatccctcttca

SEQ ID NO: 35723 - DNA, 1337 bp, Homo sapiens
ggcgacgggtgggtccggcgggtccccgggcggggcggggccggggcgaggggtgccgggtggttttccgcccggcagcccgcagcccgctgcgccccgggccgcgtctcccggcggtgggagggggcggcccccactcggttcctggcccctcgcggccccgtcagcctcccgctcggggtgcgccgcccttcgtctgggtctccgcccccaggacccgcggccgagagctccggagcgcggcttccccggccggctgcgcgatgggctgcgggaactccaccgccaccagcgcgggcgcgggccaaggccctgcaggagcagccaaagatgtaaactatggaggagtatatgttggcctaccatctgaagctgtcaatatggtgtccagtcaaacaaagacggttcggaaaaattagaagaaaataacatcatgactcaagaatcaagagcttgctcatcagtttggaaggaatttggctccgtgggacgttgtaatgtgcacagacatttccaaggaaattctaaacagtcacccttcccttttgcattcccccaaatcttaagtgtatacataaaaccctgggtacatattgttgtggtaatagaagggaattggttaaacagtacacttgtttatggaactttctgtggccacctacgaaagacaagttaacaaactgtcatggaggctgttgttgcccagccagggccgctgcattttgacaacatttccaccctggccactcagcacatttcatggaggtcatgtcttttcactgatacttttttgatagtttttatataacaaaatccttattctatttataacttaagatgataaggcactataaattaatgacctaaaataatatatttgtctgttatcttttgctatttctacttcactttaatttttagctgtaaaattggtaaatggattcttacaactatctctttccatttcttactatttggttttcaaatttcatttaaatgtcagaatttccttttttaggaacaatgtgtatttcattgcactatttaaaaataaactcaaatttgcatgccatatgcacattttgattacatttttattttctttcgtgaaaggcatgtgcaactacaaatacttcatagctgtttgggttgctcattctacatcacgacaatctcatcatattatttctataacttttcaaggacttgcgatggatggttagtgggatatctggaaattaatttgataatgacttgtgtatctacttagtattgcaatgtaagttactcaattcaccaatgtatttcaacaattaaaacatttttatccctcttca

SEQ ID NO: 35724 - DNA, 1029 bp, Homo sapiens
ctgcccccagtttacacagctaggagaaactatggaggagtatatgttggcctaccatctgaagctgtcaatatggtgtccagtcaaacaaagacggttcggaaaaattagaagaaaataacatcatgactcaagaatcaagagcttgctcatcagtttggaaggaatttggctccgtgggacgttgtaatgtgcacagacatttccaaggaaattctaaacagtcacccttcccttttgcattcccccaaatcttaagtgtatacataaaaccctgggtacatattgttgtggtaatagaagggaattggttaaacagtacacttgtttatggaactttctgtggccacctacgaaagacaagttaacaaactgtcatggaggctgttgttgcccagccagggccgctgcattttgacaacatttccaccctggccactcagcacatttcatggaggtcatgtcttttcactgatacttttttgatagtttttatataacaaaatccttattctatttataacttaagatgataaggcactataaattaatgacctaaaataatatatttgtctgttatcttttgctatttctacttcactttaatttttagctgtaaaattggtaaatggattcttacaactatctctttccatttcttactatttggttttcaaatttcatttaaatgtcagaatttccttttttaggaacaatgtgtatttcattgcactatttaaaaataaactcaaatttgcatgccatatgcacattttgattacatttttattttctttcgtgaaaggcatgtgcaactacaaatacttcatagctgtttgggttgctcattctacatcacgacaatctcatcatattatttctataacttttcaaggacttgcgatggatggttagtgggatatctggaaattaatttgataatgacttgtgtatctacttagtattgcaatgtaagttactcaattcaccaatgtatttcaacaattaaaacatttttatccctcttca

SEQ ID NO: 35725 - DNA, 1408 bp, Homo sapiens
agtttcttctgcacatgaccctaggctgaaagttatgcccacttagactgctgcagactacttccagcacagagcggcttaagtgatggtgctcagatgacaatggatggcctggctgcatcagaatcccgtggggcgagtgccatgtaatgtggaggcctaggctctcccaggaggtttggaccaagtgcggaagggatggaattgtgaccgaacagtctctatttttaatttggatgatgttaatatacatgcagctaggtttgggcattgcttatcaagatgtattttaattgtaagtttgtaagtctcttttcctacccaactttgcctctttatataattatcatcaatgcttggctctacactggccacctaagtcttaaattaatattgggtgaatattaaataggtgttttacttaaaagaaagtaaataacttgtaggcttaaggctaatacattttttaacctaagttgtacctgtttgctcactcttttctcctcttctgttgtctccttagcttgctcatcagtttggaaggaatttggctccgtgggacgttgtaatgtgcacagacatttccaaggaaattctaaacagtcacccttcccttttgcattcccccaaatcttaagtgtatacataaaaccctgggtacatattgttgtggtaatagaagggaattggttaaacagtacacttgtttatggaactttctgtggccacctacgaaagacaagttaacaaactgtcatggaggctgttgttgcccagccagggccgctgcattttgacaacatttccaccctggccactcagcacatttcatggaggtcatgtcttttcactgatacttttttgatagtttttatataacaaaatccttattctatttataacttaagatgataaggcactataaattaatgacctaaaataatatatttgtctgttatcttttgctatttctacttcactttaatttttagctgtaaaattggtaaatggattcttacaactatctctttccatttcttactatttggttttcaaatttcatttaaatgtcagaatttccttttttaggaacaatgtgtatttcattgcactatttaaaaataaactcaaatttgcatgccatatgcacattttgattacatttttattttctttcgtgaaaggcatgtgcaactacaaatacttcatagctgtttgggttgctcattctacatcacgacaatctcatcatattatttctataacttttcaaggacttgcgatggatggttagtgggatatctggaaattaatttgataatgacttgtgtatctacttagtattgcaatgtaagttactcaattcaccaatgtatttcaacaattaaaacatttttatccctcttca

SEQ ID NO: 35726 - DNA, 560 bp, Homo sapiens
atcgagccggccccattacacagctatagaataaaatccttattctatttataacttaagatgataaggcactataaattaatgacctaaaataatatatttgtctgttatcttttgctatttctacttcactttaatttttagctgtaaaattggtaaatggattcttacaactatctctttccatttcttactatttggttttcaaatttcatttaaatgtcagaatttccttttttaggaacaatgtgtatttcattgcactatttaaaaataaactcaaatttgcatgccatatgcacattttgattacatttttattttctttcgtgaaaggcatgtgcaactacaaatacttcatagctgtttgggttgctcattctacatcacgacaatctcatcatattatttctataacttttcaaggacttgcgatggatggttagtgggatatctggaaattaatttgataatgacttgtgtatctacttagtattgcaatgtaagttactcaattcaccaatgtatttcaacaattaaaacatttttatccctcttca

SEQ ID NO: 35727 - DNA, 1108 bp, Homo sapiens
ggcgacgggtgggtccggcgggtccccgggcggggcggggccggggcgaggggtgccgggtggttttccgcccggcagcccgcagcccgctgcgccccgggccgcgtctcccggcggtgggagggggcggcccccactcggttcctggcccctcgcggccccgtcagcctcccgctcggggtgcgccgcccttcgtctgggtctccgcccccaggacccgcggccgagagctccggagcgcggcttccccggccggctgcgcgatgggctgcgggaactccaccgccaccagcgcgggcgcgggccaaggccctgcaggagcagccaaagatgtaacagaagaatccgtaacagaagatgacaagaggagaaactatggaggagtatatgttggcctaccatctgaagctgtcaatatggtgtccagtcaaacaaagacggttcggaaaaattagaagaaaataacatcatgactcaagaatcaagagcttgctcatcagtttggaaggaatttggctccgtgggacgttgtaatgtgcacagacatttccaaggaaattctaaacagtcacccttcccttttgcattcccccaaatcttaagtgtatacataaaaccctgggtacatattgttgtggtaatagaagggaattggttaaacagtacacttgtttatggaactttctgtggccacctacgaaagacaagttaacaaactgtcatggaggctgttgttgcccagccagggccgctgcattttgacaacatttccaccctggccactcagcacatttcatggaggtcatgtcttttcactgatacttttttgatagtttttatataacaaaatccttattctatttataacttaagatgataaggcactataaattaatgacctaaaataatatatttgtctgttatcttttgctatttctacttcactttaatttttagctgtaaaattggtaaatggattcttacaactatctctttccatttcttactatttggttttcaaatttcatttaaatgtcagaatttccttttttaggaacaatgtgtatttcattgcactatttaaaaataaactcaaatttgcatgcca

SEQ ID NO: 35728 - DNA, 1550 bp, Homo sapiens
ggcgacgggtgggtccggcgggtccccgggcggggcggggccggggcgaggggtgccgggtggttttccgcccggcagcccgcagcccgctgcgccccgggccgcgtctcccggcggtgggagggggcggcccccactcggttcctggcccctcgcggccccgtcagcctcccgctcggggtgcgccgcccttcgtctgggtctccgcccccaggacccgcggccgagagctccggagcgcggcttccccggccggctgcgcgatgggctgcgggaactccaccgccaccagcgcgggcgcgggccaaggccctgcaggagcagccaaagatgtaacagaagaatccgtaacagaagatgacaagaggagaaactatggaggagtatatgttggcctaccatctgaagctgtcaatatggtgtccagtcaaacaaagacggttcggaaaaattagaagaaaataacatcatgactcaagaatcaagagcttgctcatcagtttggaaggaatttggctccgtgggacgttgtaatgtgcacagacatttccaaggaaattctaaacagtcacccttcccttttgcattcccccaaatcttaagtgtatacataaaaccctgggtacatattgttgtggtaatagaagggaattggttaaacagtacacttgtttatggaactttctgtggccacctacgaaagacaagttaacaaactgtcatggaggctgttgttgcccagccagggccgctgcattttgacaacatttccaccctggccactcagcacatttcatggaggtcatgtcttttcactgatacttttttgatagtttttatataacaaaatccttattctatttataacttaagatgataaggcactataaattaatgacctaaaataatatatttgtctgttatcttttgctatttctacttcactttaatttttagctgtaaaattggtaaatggattcttacaactatctctttccatttcttactatttggttttcaaatttcatttaaatgtcagaatttccttttttaggaacaatgtgtatttcattgcactatttaaaaataaactcaaatttgcatgccatatgcacattttgattacatttttattttctttcgtgaaaggcatgtgcaactacaaatacttcatagctgtttgggttgctcattctacatcacgacaatctcatcatattatttctataacttttcaaggacttgcgatggatggttagtgggatatctggaaattaatttgataatgacttgtgtatctacttagtattgcaatgtaagttactcaattcaccaatgtatttcaacaattaaaacatttttatccctcttcaaaaaaaaaaaagaaagaacagggggtgaaccaagtactaggagggaaagacaagaggtgcaataaacacaaagaggggggcgaagcagggagggggaccactgtgttgggagggagatgttaaaaggggggacggggcaggaggtggagaagtgtggggaaccaaagcgaagggtgg

SEQ ID NO: 35729 - DNA, 1459 bp, Homo sapiens
ggcgacgggtgggtccggcgggtccccgggcggggcggggccggggcgaggggtgccgggtggttttccgcccggcagcccgcagcccgctgcgccccgggccgcgtctcccggcggtgggagggggcggcccccactcggttcctggcccctcgcggccccgtcagcctcccgctcggggtgcgccgcccttcgtctgggtctccgcccccaggacccgcggccgagagctccggagcgcggcttccccggccggctgcgcgatgggctgcgggaactccaccgccaccagcgcgggcgcgggccaaggccctgcaggagcagccaaagatgtgtgagaagtcagtatataataataaataaaatgatgtatctgtcctgaagtagttcactgtctactagggaccaaaatacagtgtgaacagaagaatccgtaacagaagatgacaagaggagaaactatggaggagtatatgttggcctaccatctgaagctgtcaatatggtgtccagtcaaacaaagacggttcggaaaaattagaagaaaataacatcatgactcaagaatcaagagcttgctcatcagtttggaaggaatttggctccgtgggacgttgtaatgtgcacagacatttccaaggaaattctaaacagtcacccttcccttttgcattcccccaaatcttaagtgtatacataaaaccctgggtacatattgttgtggtaatagaagggaattggttaaacagtacacttgtttatggaactttctgtggccacctacgaaagacaagttaacaaactgtcatggaggctgttgttgcccagccagggccgctgcattttgacaacatttccaccctggccactcagcacatttcatggaggtcatgtcttttcactgatacttttttgatagtttttatataacaaaatccttattctatttataacttaagatgataaggcactataaattaatgacctaaaataatatatttgtctgttatcttttgctatttctacttcactttaatttttagctgtaaaattggtaaatggattcttacaactatctctttccatttcttactatttggttttcaaatttcatttaaatgtcagaatttccttttttaggaacaatgtgtatttcattgcactatttaaaaataaactcaaatttgcatgccatatgcacattttgattacatttttattttctttcgtgaaaggcatgtgcaactacaaatacttcatagctgtttgggttgctcattctacatcacgacaatctcatcatattatttctataacttttcaaggacttgcgatggatggttagtgggatatctggaaattaatttgataatgacttgtgtatctacttagtattgcaatgtaagttactcaattcaccaatgtatttcaacaattaaaacatttttatccctcttca

SEQ ID NO: 35730 - DNA, 3003 bp, Homo sapiens
  misc_feature (1)..(1): n is a, c, g, or t
nacttaggctaggtcgaggctgggtgtgaatcggccgagggttggcagaagggtcccgggcccagagccagcggggccgtgctgagacggcgtacgtgccctgcgtgagtgcgtggcggcggcgcgtgcgctaggggagtgggcggtgaggcctggtccacgtgcgtcccttcccgggacccccgcagcttggcgcccagcggctacgtgagccaaggcacccggatgtccgcgcccctctccgagtgacaagtcccggcctccggtcccgcagtgcccgcagcctcggccggcgtccacgcattgccatggtgactgtgggcaactactgcgaggccgaagggcccgtgggtccggcctggatgcaggatggcctgagtccctgcttcttcttcacgctcgtgccctcgacgcggatggctctagggactctggccttggtgctggctcttccctgcagacgccgggagcggcccgctggtgctgattcgctgtcttggggggccggccctcgcatctctccctacgtgctgcagctgcttctggccacacttcaggcggcgctgcccctggccggcctggctggccgggtgggcactgcccggggggccccactgccaagctatctacttctggcctccgtgctggagagtctggccggcgcctgtggcctgtggctgcttgtcgtggagcggagccaggcacggcagcgtctggcaatgggcatctggatcaagttcaggcacagccctggtctcctgctcctctggactgtggcgtttgcagctgagaacttggccctggtgtcttggaacagcccacagtggtggtgggcaagggcagacttgggccagcaggttcagtttagcctgtgggtgctgcggtatgtggtctctggagggctgtttgtcctgggtctctgggcccctggacttcgtccccagtcctatacattgcaggttcatgaagaggaccaagatgtggaaaggagccaggttcggtcagcagcccaacagtctacctggcgagattttggcaggaagctccgcctcctgagtggctacctgtggcctcgagggagtccagctctgcagctggtggtgctcatctgcctggggctcatgggtttggaacgggcactcaatgtgttggtgcctatattctataggaacattgtgaacttgctgactgagaaggcaccttggaactctctggcctggactgttaccagttacgtcttcctcaagttcctccaggggggtggcactggcagtacaggcttcgtgagcaacctgcgcaccttcctgtggatccgggtgcagcagttcacgtctcggcgggtggagctgctcatcttctcccacctgcacgagctctcactgcgctggcacctggggcgccgcacaggggaggtgctgcggatcgcggatcggggcacatccagtgtcacagggctgctcagctacctggtgttcaatgtcatccccacgctggccgacatcatcattggcatcatctacttcagcatgttcttcaacgcctggtttggcctcattgtgttcctgtgcatgagtctttacctcaccctgaccattgtggtcactgagtggagaaccaagtttcgtcgtgctatgaacacacaggagaacgctacccgggcacgagcagtggactctctgctaaacttcgagacggtgaagtattacaacgccgagagttacgaagtggaacgctatcgagaggccatcatcaaatatcagggtttggagtggaagtcgagcgcttcactggttttactaaatcagacccagaacctggtgattgggctcgggctcctcgccggctccctgctttgcgcatactttgtcactgagcagaagctacaggttggggactatgtgctctttggcacctacattatccagctgtacatgcccctcaattggtttggcacctactacaggatgatccagaccaacttcattgacatggagaacatgtttgacttgctgaaagaggagacagaagtgaaggaccttcctggagcagggccccttcgctttcagaagggccgtattgagtttgagaacgtgcacttcagctatgccgatgggcgggagactctgcaggacgtgtctttcactgtgatgcctggacagacacttgccctggtgggcccatctggggcagggaagagcacaattttgcgcctgctgtttcgcttctacgacatcagctctggctgcatccgaatagatgggcaggacatttcacaggtgacccaggcctctctccggtctcacattggagttgtgccccaagacactgtcctctttaatgacaccatcgccgacaatatccgttacggccgtgtcacagctgggaatgatgaggtggaggctgctgctcaggctgcaggcatccatgatgccattatggctttccctgaagggtacaggacacaggtgggcgagcggggactgaagctgagcggcggggagaagcagcgcgtcgccattgcccgcaccatcctcaaggctccgggcatcattctgctggatgaggcaacgtcagcgctggatacatctaatgagagggccatccaggcttctctggccaaagtctgtgccaaccgcaccaccatcgtagtggcacacaggctctcaactgtggtcaatgctgaccagatcctcgtcatcaaggatggctgcatcgtggagaggggacgacacgaggctctgttgtcccgaggtggggtgtatgctgacatgtggcagctgcagcagggacaggaagaaacctctgaagacactaagcctcagaccatggaacggtgacaaaagtttggccacttccctctcaaagactaacccagaagggaataagatgtgtctcctttccctggcttatttcatcctggtcttggggtatggtgctagctatggtaagggaaagggacctttccgaaaaacatcttttggggaaataaaaatgtggactgtg

SEQ ID NO: 35731 - DNA, 631 bp, Homo sapiens
tcaagccgttcctcctgggcactgtccccacctagaacagataccatgaattcaaatctcacaaaacacactttccagttctcaagcccaaacaaggctcttgtgtattcttgaggcctcagccagcagcctgcctccttccattgagggttttgagtggcaggagcagttttacctggaccctctctataggcaacgtcagcgctggatacatctaatgagagggccatccaggcttctctggccaaagtctgtgccaaccgcaccaccatcgtagtggcacacaggctctcaactgtggtcaatgctgaccagatcctcgtcatcaaggatggctgcatcgtggagaggggacgacacgaggctctgttgtcccgaggtggggtgtatgctgacatgtggcagctgcagcagggacaggaagaaacctctgaagacactaagcctcagaccatggaacggtgacaaaagtttggccacttccctctcaaagactaacccagaagggaataagatgtgtctcctttccctggcttatttcatcctggtcttggggtatggtgctagctatggtaagggaaagggacctttccgaaaaacatcttttggggaaataaaaatgtggactgtg

SEQ ID NO: 35732 - DNA, 471 bp, Homo sapiens
ttcttaaggttccgggattattttggtgggggggcaagttcggggtggaaaactttaaggagaggcccattcaagctttctcggccaaagttcgggccaaccgcaccaccattgtaggtgcaacactgctctcaactgtggtcaatgctgaccagatcctcgtcatcaaggatggctgcatcgtggagaggggacgacacgaggctctgttgtcccgaggtggggtgtatgctgacatgtggcagctgcagcagggacaggaagaaacctctgaagacactaagcctcagaccatggaacggtgacaaaagtttggccacttccctctcaaagactaacccagaagggaataagatgtgtctcctttccctggcttatttcatcctggtcttggggtatggtgctagctatggtaagggaaagggacctttccgaaaaacatcttttggggaaataaaaatgtggactgtg

SEQ ID NO: 35733 - DNA, 3001 bp, Homo sapiens
ggtgcgagtccaacaccgagcattcccgtgggcctgcagttggcagaagggtcccgggcccagagccagcggggccgtgctgagacggcgtacgtgccctgcgtgagtgcgtggcggcggcgcgtgcgctaggggagtgggcggtgaggcctggtccacgtgcgtcccttcccgggacccccgcagcttggcgcccagcggctacgtgagccaaggcacccggatgtccgcgcccctctccgagtgacaagtcccggcctccggtcccgcagtgcccgcagcctcggccggcgtccacgcattgccatggtgactgtgggcaactactgcgaggccgaagggcccgtgggtccggcctggatgcaggatggcctgagtccctgcttcttcttcacgctcgtgccctcgacgcggatggctctagggactctggccttggtgctggctcttccctgcagacgccgggagcggcccgctggtgctgattcgctgtcttggggggccggccctcgcatctctccctacgtgctgcagctgcttctggccacacttcaggcggcgctgcccctggccggcctggctggccgggtgggcactgcccggggggccccactgccaagctatctacttctggcctccgtgctggagagtctggccggcgcctgtggcctgtggctgcttgtcgtggagcggagccaggcacggcagcgtctggcaatgggcatctggatcaagttcaggcacagccctggtctcctgctcctctggactgtggcgtttgcagctgagaacttggccctggtgtcttggaacagcccacagtggtggtgggcaagggcagacttgggccagcaggttcagtttagcctgtgggtgctgcggtatgtggtctctggagggctgtttgtcctgggtctctgggcccctggacttcgtccccagtcctatacattgcaggttcatgaagaggaccaagatgtggaaaggagccaggttcggtcagcagcccaacagtctacctggcgagattttggcaggaagctccgcctcctgagtggctacctgtggcctcgagggagtccagctctgcagctggtggtgctcatctgcctggggctcatgggtttggaacgggcactcaatgtgttggtgcctatattctataggaacattgtgaacttgctgactgagaaggcaccttggaactctctggcctggactgttaccagttacgtcttcctcaagttcctccaggggggtggcactggcagtacaggcttcgtgagcaacctgcgcaccttcctgtggatccgggtgcagcagttcacgtctcggcgggtggagctgctcatcttctcccacctgcacgagctctcactgcgctggcacctggggcgccgcacaggggaggtgctgcggatcgcggatcggggcacatccagtgtcacagggctgctcagctacctggtgttcaatgtcatccccacgctggccgacatcatcattggcatcatctacttcagcatgttcttcaacgcctggtttggcctcattgtgttcctgtgcatgagtctttacctcaccctgaccattgtggtcactgagtggagaaccaagtttcgtcgtgctatgaacacacaggagaacgctacccgggcacgagcagtggactctctgctaaacttcgagacggtgaagtattacaacgccgagagttacgaagtggaacgctatcgagaggccatcatcaaatatcagggtttggagtggaagtcgagcgcttcactggttttactaaatcagacccagaacctggtgattgggctcgggctcctcgccggctccctgctttgcgcatactttgtcactgagcagaagctacaggttggggactatgtgctctttggcacctacattatccagctgtacatgcccctcaattggtttggcacctactacaggatgatccagaccaacttcattgacatggagaacatgtttgacttgctgaaagaggagacagaagtgaaggaccttcctggagcagggccccttcgctttcagaagggccgtattgagtttgagaacgtgcacttcagctatgccgatgggcgggagactctgcaggacgtgtctttcactgtgatgcctggacagacacttgccctggtgggcccatctggggcagggaagagcacaattttgcgcctgctgtttcgcttctacgacatcagctctggctgcatccgaatagatgggcaggacatttcacaggtgacccaggcctctctccggtctcacattggagttgtgccccaagacactgtcctctttaatgacaccatcgccgacaatatccgttacggccgtgtcacagctgggaatgatgaggtggaggctgctgctcaggctgcaggcatccatgatgccattatggctttccctgaagggtacaggacacaggtgggcgagcggggactgaagctgagcggcggggagaagcagcgcgtcgccattgcccgcaccatcctcaaggctccgggcatcattctgctggatgaggcaacgtcagcgctggatacatctaatgagagggccatccaggcttctctggccaaagtctgtgccaaccgcaccaccatcgtagtggcacacaggctctcaactgtggtcaatgctgaccagatcctcgtcatcaaggatggctgcatcgtggagaggggacgacacgaggctctgttgtcccgaggtggggtgtatgctgacatgtggcagctgcagcagggacaggaagaaacctctgaagacactaagcctcagaccatggaacggtgacaaaagtttggccacttccctctcaaagactaacccagaagggaataagatgtgtctcctttccctggcttatttcatcctggtcttggggtatggtgctagctatggtaagggaaagggacctttccgaaaaacatcttttggggaaataaaaatgtggactgtg

SEQ ID NO: 35734 - DNA, 3424 bp, Homo sapiens
  misc_feature (1)..(1): n is a, c, g, or t
nacttaggctaggtcgaggctgggtgtgaatcggccgagggttggcagaagggtcccgggcccagagccagcggggccgtgctgagacggcgtacgtgccctgcgtgagtgcgtggcggcggcgcgtgcgctaggggagtgggcggtgaggcctggtccacgtgcgtcccttcccgggacccccgcagcttggcgcccagcggctacgtgagccaaggcacccggatgtccgcgcccctctccgagtgacaagtcccggcctccggtcccgcagtgcccgcagcctcggccggcgtccacgcattgccatggtgactgtgggcaactactgcgaggccgaagggcccgtgggtccggcctggatgcaggatggcctgagtccctgcttcttcttcacgctcgtgccctcgacgcggatggctctagggactctggccttggtgctggctcttccctgcagacgccgggagcggcccgctggtgctgattcgctgtcttggggggccggccctcgcatctctccctacgtgctgcagctgcttctggccacacttcaggcggcgctgcccctggccggcctggctggccgggtgggcactgcccggggggccccactgccaagctatctacttctggcctccgtgctggagagtctggccggcgcctgtggcctgtggctgcttgtcgtggagcggagccaggcacggcagcgtctggcaatgggcatctggatcaagttcaggcacagccctggtctcctgctcctctggactgtggcgtttgcagctgagaacttggccctggtgtcttggaacagcccacagtggtggtgggcaagggcagacttgggccagcaggttcagtttagcctgtgggtgctgcggtatgtggtctctggagggctgtttgtcctgggtctctgggcccctggacttcgtccccagtcctatacattgcaggttcatgaagaggaccaagatgtggaaaggagccaggttcggtcagcagcccaacagtctacctggcgagattttggcaggaagctccgcctcctgagtggctacctgtggcctcgagggagtccagctctgcagctggtggtgctcatctgcctggggctcatgggtttggaacgggcactcaatgtgttggtgcctatattctataggaacattgtgaacttgctgactgagaaggcaccttggaactctctggcctggactgttaccagttacgtcttcctcaagttcctccaggggggtggcactggcagtacaggcttcgtgagcaacctgcgcaccttcctgtggatccgggtgcagcagttcacgtctcggcgggtggagctgctcatcttctcccacctgcacgagctctcactgcgctggcacctggggcgccgcacaggggaggtgctgcggatcgcggatcggggcacatccagtgtcacagggctgctcagctacctggtgttcaatgtcatccccacgctggccgacatcatcattggcatcatctacttcagcatgttcttcaacgcctggtttggcctcattgtgttcctgtgcatgagtctttacctcaccctgaccattgtggtcactgagtggagaaccaagtttcgtcgtgctatgaacacacaggagaacgctacccgggcacgagcagtggactctctgctaaacttcgagacggtgaagtattacaacgccgagagttacgaagtggaacgctatcgagaggccatcatcaaatatcagggtttggagtggaagtcgagcgcttcactggttttactaaatcagacccagaacctggtgattgggctcgggctcctcgccggctccctgctttgcgcatactttgtcactgagcagaagctacaggttggggactatgtgctctttggcacctacattatccagctgtacatgcccctcaattggtttggcacctactacaggatgatccagaccaacttcattgacatggagaacatgtttgacttgctgaaagaggagacagaagtgaaggaccttcctggagcagggccccttcgctttcagaagggccgtattgagtttgagaacgtgcacttcagctatgccgatgggcgggagactctgcaggacgtgtctttcactgtgatgcctggacagacacttgccctggtgggcccatctggggcagggaagagcacaattttgcgcctgctgtttcgcttctacgacatcagctctggctgcatccgaatagatgggcaggacatttcacaggtgacccaggcctctctccggtctcacattggagttgtgccccaagacactgtcctctttaatgacaccatcgccgacaatatccgttacggccgtgtcacagctgggaatgatgaggtggaggctgctgctcaggctgcaggcatccatgatgccattatggctttccctgaagggtacaggacacaggtgggcgagcggggactgaagctgagcggcggggagaagcagcgcgtcgccattgcccgcaccatcctcaaggctccgggcatcattctgctggatgaggcaacgtcagcgctggatacatctaatgagagggccatccaggcttctctggccaaagtctgtgccaaccgcaccaccatcgtagtggcacacaggctctcaactgtggtcaatgctgaccagatcctcgtcatcaaggatggctgcatcgtggagaggggacgacacgaggctctgttgtcccgaggtggggtgtatgctgacatgtggcagctgcagcagggacaggaagaaacctctgaagacactaagcctcagaccatggaacggtgacaaaagtttggccacttccctctcaaagactaacccagaagggaataagatgtgtctcctttccctggcttatttcatcctggtcttggggtatggtgctagctatggtaagggaaagggacctttccgaaaaacatcttttggggaaataaaaatgtggactgtgaaaaaaaaaaaaaaaaacaaaaaaaaaaaaaaaaaaaaaaaaaaaacaaaaaaaaaaaaaaaaaaacggcgggggccccccacaaaaatatctctctctcctaggaggggccccaacgtcttgtcgagcgccgactccacccgatttgttatttggataaaatgggggcgcccccctattagtggaggctggctatatgttaaaatcactaacggagatcaggtggcggcgctcgatttataacagaaagacgtggagggagggaggaaaaaacggcggcgtcagggggagacaatctcttggggagaaggaggagaacctctattttctgtgtgggtggtaggtgagaaaaatgatggggtgacaaaaaaaacctccaaagcaaagaaatataaacaacgtctaccgggaagtatattat

SEQ ID NO: 35735 - DNA, 2820 bp, Homo sapiens
ggtgcgagtccaacaccgagcattcccgtgggcctgcagttggcagaagggtcccgggcccagagccagcggggccgtgctgagacggcgtacgtgccctgcgtgagtgcgtggcggcggcgcgtgcgctaggggagtgggcggtgaggcctggtccacgtgcgtcccttcccgggacccccgcagcttggcgcccagcggctacgtgagccaaggcacccggatgtccgcgcccctctccgagtgacaagtcccggcctccggtcccgcagtgcccgcagcctcggccggcgtccacgcattgccatggtgactgtgggcaactactgcgaggccgaagggcccgtgggtccggcctggatgcaggatggcctgagtccctgcttcttcttcacgctcgtgccctcgacgcggatggctctagggactctggccttggtgctggctcttccctgcagacgccgggagcggcccgctggtgctgattcgctgtcttggggggccggccctcgcatctctccctacgtgctgcagctgcttctggccacacttcaggcggcgctgcccctggccggcctggctggccgggtgggcactgcccggggggccccactgccaagctatctacttctggcctccgtgctggagagtctggccggcgcctgtggcctgtggctgcttgtcgtggagcggagccaggcacggcagcgtctggcaatgggcatctggatcaagttcaggcacagccctggtctcctgctcctctggactgtggcgtttgcagctgagaacttggccctggtgtcttggaacagcccacagtggtggtgggcaagggcagacttgggccagcaggttcagtttagcctgtgggtgctgcggtatgtggtctctggagggctgtttgtcctgggtctctgggcccctggacttcgtccccagtcctatacattgcaggttcatgaagaggaccaagatgtggaaaggagccagtgaacttgctgactgagaaggcaccttggaactctctggcctggactgttaccagttacgtcttcctcaagttcctccaggggggtggcactggcagtacaggcttcgtgagcaacctgcgcaccttcctgtggatccgggtgcagcagttcacgtctcggcgggtggagctgctcatcttctcccacctgcacgagctctcactgcgctggcacctggggcgccgcacaggggaggtgctgcggatcgcggatcggggcacatccagtgtcacagggctgctcagctacctggtgttcaatgtcatccccacgctggccgacatcatcattggcatcatctacttcagcatgttcttcaacgcctggtttggcctcattgtgttcctgtgcatgagtctttacctcaccctgaccattgtggtcactgagtggagaaccaagtttcgtcgtgctatgaacacacaggagaacgctacccgggcacgagcagtggactctctgctaaacttcgagacggtgaagtattacaacgccgagagttacgaagtggaacgctatcgagaggccatcatcaaatatcagggtttggagtggaagtcgagcgcttcactggttttactaaatcagacccagaacctggtgattgggctcgggctcctcgccggctccctgctttgcgcatactttgtcactgagcagaagctacaggttggggactatgtgctctttggcacctacattatccagctgtacatgcccctcaattggtttggcacctactacaggatgatccagaccaacttcattgacatggagaacatgtttgacttgctgaaagaggagacagaagtgaaggaccttcctggagcagggccccttcgctttcagaagggccgtattgagtttgagaacgtgcacttcagctatgccgatgggcgggagactctgcaggacgtgtctttcactgtgatgcctggacagacacttgccctggtgggcccatctggggcagggaagagcacaattttgcgcctgctgtttcgcttctacgacatcagctctggctgcatccgaatagatgggcaggacatttcacaggtgacccaggcctctctccggtctcacattggagttgtgccccaagacactgtcctctttaatgacaccatcgccgacaatatccgttacggccgtgtcacagctgggaatgatgaggtggaggctgctgctcaggctgcaggcatccatgatgccattatggctttccctgaagggtacaggacacaggtgggcgagcggggactgaagctgagcggcggggagaagcagcgcgtcgccattgcccgcaccatcctcaaggctccgggcatcattctgctggatgaggcaacgtcagcgctggatacatctaatgagagggccatccaggcttctctggccaaagtctgtgccaaccgcaccaccatcgtagtggcacacaggctctcaactgtggtcaatgctgaccagatcctcgtcatcaaggatggctgcatcgtggagaggggacgacacgaggctctgttgtcccgaggtggggtgtatgctgacatgtggcagctgcagcagggacaggaagaaacctctgaagacactaagcctcagaccatggaacggtgacaaaagtttggccacttccctctcaaagactaacccagaagggaataagatgtgtctcctttccctggcttatttcatcctggtcttggggtatggtgctagctatggtaagggaaagggacctttccgaaaaacatcttttggggaaataaaaatgtggactgtg

SEQ ID NO: 35736 - DNA, 3043 bp, Homo sapiens
  misc_feature (1)..(1): n is a, c, g, or t
nacttaggctaggtcgaggctgggtgtgaatcggccgagggttggcagaagggtcccgggcccagagccagcggggccgtgctgagacggcgtacgtgccctgcgtgagtgcgtggcggcggcgcgtgcgctaggggagtgggcggtgaggcctggtccacgtgcgtcccttcccgggacccccgcagcttggcgcccagcggctacgtgagccaaggcacccggatgtccgcgcccctctccgagtgacaagtcccggcctccggtcccgcagtgcccgcagcctcggccggcgtccacgcattgccatggtgactgtgggcaactactgcgaggccgaagggcccgtgggtccggcctggatgcaggatggcctgagtccctgcttcttcttcacgctcgtgccctcgacgcggatggctctagggactctggccttggtgctggctcttccctgcagacgccgggagcggcccgctggtgctgattcgctgtcttggggggccggccctcgcatctctccctacgtgctgcagctgcttctggccacacttcaggcggcgctgcccctggccggcctggctggccgggtgggcactgcccggggggccccactgccaagctatctacttctggcctccgtgctggagagtctggccggcgcctgtggcctgtggctgcttgtcgtggagcggagccaggcacggcagcgtctggcaatgggcatctggatcaagttcaggcacagccctggtctcctgctcctctggactgtggcgtttgcagctgagaacttggccctggtgtcttggaacagcccacagtggtggtgggcaagggcagacttgggccagcaggttcagtttagcctgtgggtgctgcggtatgtggtctctggagggctgtttgtcctgggtctctgggcccctggacttcgtccccagtcctatacattgcaggttcatgaagaggaccaagatgtggaaaggagccaggttcggtcagcagcccaacagtctacctggcgagattttggcaggaagctccgcctcctgagtggctacctgtggcctcgagggagtccagctctgcagctggtggtgctcatctgcctggggctcatgggtttggaacgggcactcaatgtgttggtgcctatattctataggaacattgtgaacttgctgactgagaaggcaccttggaactctctggcctggactgttaccagttacgtcttcctcaagttcctccaggggggtggcactggcagtacaggcttcgtgagcaacctgcgcaccttcctgtggatccgggtgcagcagttcacgtctcggcgggtggagctgctcatcttctcccacctgcacgagctctcactgcgctggcacctggggcgccgcacaggggaggtgctgcggatcgcggatcggggcacatccagtgtcacagggctgctcagctacctggtgttcaatgtcatccccacgctggccgacatcatcattggcatcatctacttcagcatgttcttcaacgcctggtttggcctcattgtgttcctgtgcatgagtctttacctcaccctgaccattgtggtcactgagtggagaaccaagtttcgtcgtgctatgaacacacaggagaacgctacccgggcacgagcagtggactctctgctaaacttcgagacggtgaagtattacaacgccgagagttacgaagtggaacgctatcgagaggccatcatcaaatatcagggtttggagtggaagtcgagcgcttcactggttttactaaatcagacccagaacctggtgattgggctcgggctcctcgccggctccctgctttgcgcatactttgtcactgagcagaagctacaggttggggactatgtgctctttggcacctacattatccagctgtacatgcccctcaattggtttggcacctactacaggatgatccagaccaacttcattgacatggagaacatgtttgacttgctgaaagaggagacagaagtgaaggaccttcctggagcagggccccttcgctttcagaagggccgtattgagtttgagaacgtgcacttcagctatgccgatgggcgggagactctgcaggacgtgtctttcactgtgatgcctggacagacacttgccctggtgggcccatctggggcagggaagagcacaattttgcgcctgctgtttcgcttctacgacatcagctctggctgcatccgaatagatgggcaggacatttcacaggtgacccaggcctctctccggtctcacattggagttgtgccccaagacactgtcctctttaatgacaccatcgccgacaatatccgttacggccgtgtcacagctgggaatgatgaggtggaggctgctgctcaggctgcaggcatccatgatgccattatggctttccctgaagggtacaggacacaggtgggcgagcggggactgaagctgagcggcggggagaagcagcgcgtcgccattgcccgcaccatcctcaaggctccgggcatcattctgctggatgaggcaacgtcagcgctggatacatctaatgagagggccatccaggcttctctggccaaagtctgtgccaaccgcaccaccatcgtagtggcacacaggctctcaactgtggtcaatgctgaccagatcctcgtcatcaaggatggctgcatcgtggagaggggacgacacgaggctctgttgtcccgaggtggggtgtatgctgacatgtggcagctgcagcagggacaggaagaaacctctgaagacactaagcctcagaccatggaacggtgacaaaagtttggccacttccctctcaaagactaacccagaagggaataagatgtgtctcctttccctggcttatttcatcctggtcttggggtatggtgctagctatggtaagggaaagggacctttccgaaaaacatcttttggggaaataaaaatgtggactgtgaaaaaaaaaagtcgacgcggccgcgaatttagtagtagta

SEQ ID NO: 35737 - DNA, 3028 bp, Homo sapiens
ggtgcgagtccaacaccgagcattcccgtgggcctgcagttggcagaagggtcccgggcccagagccagcggggccgtgctgagacggcgtacgtgccctgcgtgagtgcgtggcggcggcgcgtgcgctaggggagtgggcggtgaggcctggtccacgtgcgtcccttcccgggacccccgcagcttggcgcccagcggctacgtgagccaaggcacccggatgtccgcgcccctctccgagtgacaagtcccggcctccggtcccgcagtgcccgcagcctcggccggcgtccacgcattgccatggtgactgtgggcaactactgcgaggccgaagggcccgtgggtccggcctggatgcaggatggcctgagtccctgcttcttcttcacgctcgtgccctcgacgcggatggctctagggactctggccttggtgctggctcttccctgcagacgccgggagcggcccgctggtgctgattcgctgtcttggggggccggccctcgcatctctccctacgtgctgcagctgcttctggccacacttcaggcggcgctgcccctggccggcctggctggccgggtgggcactgcccggggggccccactgccaagctatctacttctggcctccgtgctggagagtctggccggcgcctgtggcctgtggctgcttgtcgtggagcggagccaggcacggcagcgtctggcaatgggcatctggatcaagttcaggcacagccctggtctcctgctcctctggactgtggcgtttgcagctgagaacttggccctggtgtcttggaacagcccacagtggtggtgggcaagggcagacttgggccagcaggttcagtttagcctgtgggtgctgcggtatgtggtctctggagggctgtttgtcctgggtctctgggcccctggacttcgtccccagtcctatacattgcaggttcatgaagaggaccaagatgtggaaaggagccaggttcggtcagcagcccaacagtctacctggcgagattttggcaggaagctccgcctcctgagtggctacctgtggcctcgagggagtccagctctgcagctggtggtgctcatctgcctggggctcatgggtttggaacgggcactcaatgtgttggtgcctatattctataggaacattgtgaacttgctgactgagaaggcaccttggaactctctggcctggactgttaccagttacgtcttcctcaagttcctccaggggggtggcactggcagtacaggcttcgtgagcaacctgcgcaccttcctgtggatccgggtgcagcagttcacgtctcggcgggtggagctgctcatcttctcccacctgcacgagctctcactgcgctggcacctggggcgccgcacaggggaggtgctgcggatcgcggatcggggcacatccagtgtcacagggctgctcagctacctggtgttcaatgtcatccccacgctggccgacatcatcattggcatcatctacttcagcatgttcttcaacgcctggtttggcctcattgtgttcctgtgcatgagtctttacctcaccctgaccattgtggtcactgagtggagaaccaagtttcgtcgtgctatgaacacacaggagaacgctacccgggcacgagcagtggactctctgctaaacttcgagacggtgaagtattacaacgccgagagttacgaagtggaacgctatcgagaggccatcatcaaatatcagggtttggagtggaagtcgagcgcttcactggttttactaaatcagacccagaacctggtgattgggctcgggctcctcgccggctccctgctttgcgcatactttgtcactgagcagaagctacaggttggggactatgtgctctttggcacctacattatccagctgtacatgcccctcaattggtttggcacctactacaggatgatccagaccaacttcattgacatggagaacatgtttgacttgctgaaagaggagacagaagtgaaggaccttcctggagcagggccccttcgctttcagaagggccgtattgagtttgagaacgtgcacttcagctatgccgatgggcgggagactctgcaggacgtgtctttcactgtgatgcctggacagacacttgccctggtgggcccatctggggcagggaagagcacaattttgcgcctgctgtttcgcttctacgacatcagctctggctgcatccgaatagatgggcaggacatttcacaggtgacccaggcctctctccggtctcacattggagttgtgccccaagacactgtcctctttaatgacaccatcgccgacaatatccgttacggccgtgtcacagctgggaatgatgaggtggaggctgctgctcaggctgcaggcatccatgatgccattatggctttccctgaaggaaacgtgtggtgggtaatatccacagggtacaggacacaggtgggcgagcggggactgaagctgagcggcggggagaagcagcgcgtcgccattgcccgcaccatcctcaaggctccgggcatcattctgctggatgaggcaacgtcagcgctggatacatctaatgagagggccatccaggcttctctggccaaagtctgtgccaaccgcaccaccatcgtagtggcacacaggctctcaactgtggtcaatgctgaccagatcctcgtcatcaaggatggctgcatcgtggagaggggacgacacgaggctctgttgtcccgaggtggggtgtatgctgacatgtggcagctgcagcagggacaggaagaaacctctgaagacactaagcctcagaccatggaacggtgacaaaagtttggccacttccctctcaaagactaacccagaagggaataagatgtgtctcctttccctggcttatttcatcctggtcttggggtatggtgctagctatggtaagggaaagggacctttccgaaaaacatcttttggggaaataaaaatgtggactgtg

SEQ ID NO: 35738 - DNA, 2825 bp, Homo sapiens
ggtgcgagtccaacaccgagcattcccgtgggcctgcagttggcagaagggtcccgggcccagagccagcggggccgtgctgagacggcgtacgtgccctgcgtgagtgcgtggcggcggcgcgtgcgctaggggagtgggcggtgaggcctggtccacgtgcgtcccttcccgggacccccgcagcttggcgcccagcggctacgtgagccaaggcacccggatgtccgcgcccctctccgagtgacaagtcccggcctccggtcccgcagtgcccgcagcctcggccggcgtccacgcattgccatggtgactgtgggcaactactgcgaggccgaagggcccgtgggtccggcctggatgcaggatggcctgagtccctgcttcttcttcacgctcgtgccctcgacgcggatggctctagggactctggccttggtgctggctcttccctgcagacgccgggagcggcccgctggtgctgattcgctgtcttggggggccggccctcgcatctctccctacgtgctgcagctgcttctggccacacttcaggcggcgctgcccctggccggcctggctggccgggtgggcactgcccggggggccccactgccaagctatctacttctggcctccgtgctggagagtctggccggcgcctgtggcctgtggctgcttgtcgtggagcggagccaggcacggcagcgtctggcaatgggcatctggatcaagttcaggcacagccctggtctcctgctcctctggactgtggcgtttgcagctgagaacttggccctggtgtcttggaacagcccacagtggtggtgggcaagggcagacttgggccagcaggttcagtttagcctgtgggtgctgcggtatgtggtctctggagggctgtttgtcctgggtctctgggcccctggacttcgtccccagtcctatacattgcaggttcatgaagaggaccaagatgtggaaaggagccaggttcggtcagcagcccaacagtctacctggcgagattttggcaggaagctccgcctcctgagtggctacctgtggcctcgagggagtccagctctgcagctggtggtgctcatctgcctggggctcatgggtttggaacgggcactcaatgtgttggtgcctatattctataggaacattgtgaacttgctgactgagaaggcaccttggaactctctggcctggactgttaccagttacgtcttcctcaagttcctccaggggggtggcactggcagtacaggcttcgtgagcaacctgcgcaccttcctgtggatccgggtgcagcagttcacgtctcggcgggtggagctgctcatcttctcccacctgcacgagctctcactgcgctggcacctggggcgccgcacaggggaggtgctgcggatcgcggatcggggcacatccagtgtcacagggctgctcagctacctggtgttcaatgtcatccccacgctggccgacatcatcattggcatcatctacttcagcatgttcttcaacgcctggtttggcctcattgtgttcctgtgcatgagtctttacctcaccctgaccattgtggtcactgagtggagaaccaagtttcgtcgtgctatgaacacacaggagaacgctacccgggcacgagcagtggactctctgctaaacttcgagacggtgaagtattacaacgccgagagttacgaagtggaacgctatcgagaggccatcatcaaatatcagggtttggagtggaagtcgagcgcttcactggttttactaaatcagacccagaacctggtgattgggctcgggctcctcgccggctccctgctttgcgcatactttgtcactgagcagaagctacaggttggggactatgtgctctttggcacctacattatccagctgtacatgcccctcaattggtttggcacctactacaggatgatccagaccaacttcattgacatggagaacatgtttgacttgctgaaagaggagacagaagtgaaggaccttcctggagcagggccccttcgctttcagaagggccgtattgagtttgagaacgtgcacttcagctatgccgatgggcgggagactctgcaggacgtgtctttcactgtgatgcctggacagacacttgccctggtgggcccatctggggcagggaagagcacaattttgcgcctgctgtttcgcttctacgacatcagctctggctgcatccgaatagatgggcaggacatttcacaggtacaggacacaggtgggcgagcggggactgaagctgagcggcggggagaagcagcgcgtcgccattgcccgcaccatcctcaaggctccgggcatcattctgctggatgaggcaacgtcagcgctggatacatctaatgagagggccatccaggcttctctggccaaagtctgtgccaaccgcaccaccatcgtagtggcacacaggctctcaactgtggtcaatgctgaccagatcctcgtcatcaaggatggctgcatcgtggagaggggacgacacgaggctctgttgtcccgaggtggggtgtatgctgacatgtggcagctgcagcagggacaggaagaaacctctgaagacactaagcctcagaccatggaacggtgacaaaagtttggccacttccctctcaaagactaacccagaagggaataagatgtgtctcctttccctggcttatttcatcctggtcttggggtatggtgctagctatggtaagggaaagggacctttccgaaaaacatcttttggggaaataaaaatgtggactgtg

SEQ ID NO: 35739 - DNA, 3431 bp, Homo sapiens
ggtgcgagtccaacaccgagcattcccgtgggcctgcagttggcagaagggtcccgggcccagagccagcggggccgtgctgagacggcgtacgtgccctgcgtgagtgcgtggcggcggcgcgtgcgctaggggagtgggcggtgaggcctggtccacgtgcgtcccttcccgggacccccgcagcttggcgcccagcggctacgtgagccaaggcacccggatgtccgcgcccctctccgagtgacaagtcccggcctccggtcccgcagtgcccgcagcctcggccggcgtccacgcattgccatggtgactgtgggcaactactgcgaggccgaagggcccgtgggtccggcctggatgcaggatggcctgagtccctgcttcttcttcacgctcgtgccctcgacgcggatggctctagggactctggccttggtgctggctcttccctgcagacgccgggagcggcccgctggtgctgattcgctgtcttggggggccggccctcgcatctctccctacgtgctgcagctgcttctggccacacttcaggcggcgctgcccctggccggcctggctggccgggtgggcactgcccggggggccccactgccaagctatctacttctggcctccgtgctggagagtctggccggcgcctgtggcctgtggctgcttgtcgtggagcggagccaggcacggcagcgtctggcaatgggcatctggatcaagttcaggcacagccctggtctcctgctcctctggactgtggcgtttgcagctgagaacttggccctggtgtcttggaacagcccacagtggtggtgggcaagggcagacttgggccagcaggttcagtttagcctgtgggtgctgcggtatgtggtctctggagggctgtttgtcctgggtctctgggcccctggacttcgtccccagtcctatacattgcaggttcatgaagaggaccaagatgtggaaaggagccaggttcggtcagcagcccaacagtctacctggcgagattttggcaggaagctccgcctcctgagtggctacctgtggcctcgagggagtccagctctgcagctggtggtgctcatctgcctggggctcatgggtttggaacgggcactcaatgtgttggtgcctatattctataggaacattgtgaacttgctgactgagaaggcaccttggaactctctggcctggactgttaccagttacgtcttcctcaagttcctccaggggggtggcactggcagtacaggcttcgtgagcaacctgcgcaccttcctgtggatccgggtgcagcagttcacgtctcggcgggtggagctgctcatcttctcccacctgcacgagctctcactgcgctggcacctggggcgccgcacaggggaggtgctgcggatcgcggatcggggcacatccagtgtcacagggctgctcagctacctggtgttcaatgtcatccccacgctggccgacatcatcattggcatcatctacttcagcatgttcttcaacgcctggtttggcctcattgtgttcctgtgcatgagtctttacctcaccctgaccattgtggtcactgagtggagaaccaagtttcgtcgtgctatgaacacacaggagaacgctacccgggcacgagcagtggactctctgctaaacttcgagacggtgaagtattacaacgccgagagttacgaagtggaacgctatcgagaggccatcatcaaatatcagggtttggagtggaagtcgagcgcttcactggttttactaaatcagacccagaacctggtgattgggctcgggctcctcgccggctccctgctttgcgcatactttgtcactgagcagaagctacaggttggggactatgtgctctttggcacctacattatccagctgtacatgcccctcaattggtttggcacctactacaggatgatccagaccaacttcattgacatggagaacatgtttgacttgctgaaagaggagacagaagtgaaggaccttcctggagcagggccccttcgctttcagaagggccgtattgagtttgagaacgtgcacttcagctatgccgatgggtgaggccttccttttgcttcctttgcttttccgttcatttgcacactgccttcctgcttctcagtgctctgaatccctgcttttggaaaagagcctgggcaggggaggggcagggcctactagcagctctggtgatggaaggtgcctgctgagcaaccccacctttccttgcaggcgggagactctgcaggacgtgtctttcactgtgatgcctggacagacacttgccctggtgagaggagacccagccacttggcccagatgcctcaagcttccctcattcagtgcccatggtagcttgtgacccaggctgtggagtcagagagcccagtcacgataggcaaccggattgaatggtgcagcctccatggacactggtgacctcttggagagggaacctcaaaagccagtgggcctcggccggctgcggtggcacatgcctgtaatcccagcactttgggaggcttaggtggccagatcacctaaggtgggcccatctggggcagggaagagcacaattttgcgcctgctgtttcgcttctacgacatcagctctggctgcatccgaatagatgggcaggacatttcacaggtgacccaggcctctctccggtctcacattggagttgtgccccaagacactgtcctctttaatgacaccatcgccgacaatatccgttacggccgtgtcacagctgggaatgatgaggtggaggctgctgctcaggctgcaggcatccatgatgccattatggctttccctgaagggtacaggacacaggtgggcgagcggggactgaagctgagcggcggggagaagcagcgcgtcgccattgcccgcaccatcctcaaggctccgggcatcattctgctggatgaggcaacgtcagcgctggatacatctaatgagagggccatccaggcttctctggccaaagtctgtgccaaccgcaccaccatcgtagtggcacacaggctctcaactgtggtcaatgctgaccagatcctcgtcatcaaggatggctgcatcgtggagaggggacgacacgaggctctgttgtcccgaggtggggtgtatgctgacatgtggcagctgcagcagggacaggaagaaacctctgaagacactaagcctcagaccatggaacggtgacaaaagtttggccacttccctctcaaagactaacccagaagggaataagatgtgtctcctttccctggcttatttcatcctggtcttggggtatggtgctagctatggtaagggaaagggacctttccgaaaaacatcttttggggaaataaaaatgtggactgtg

SEQ ID NO: 35740 - DNA, 1463 bp, Homo sapiens
agtgtaaccaggaccactggggctgacagagagctgggggtgtgatgtttgtgtgtgatgtttgaactcaggaaggaggattgagagttggggggaatgacccgagtgccatgtgctgtgcccatgccaaataaatttggtttgaattcatcaggtgaagtattacaacgccgagagttacgaagtggaacgctatcgagaggccatcatcaaatatcagggtttggagtggaagtcgagcgcttcactggttttactaaatcagacccagaacctggtgattgggctcgggctcctcgccggctccctgctttgcgcatactttgtcactgagcagaagctacaggttggggactatgtgctctttggcacctacattatccagctgtacatgcccctcaattggtttggcacctactacaggatgatccagaccaacttcattgacatggagaacatgtttgacttgctgaaagaggagacagaagtgaaggaccttcctggagcagggccccttcgctttcagaagggccgtattgagtttgagaacgtgcacttcagctatgccgatgggcgggagactctgcaggacgtgtctttcactgtgatgcctggacagacacttgccctggtgggcccatctggggcagggaagagcacaattttgcgcctgctgtttcgcttctacgacatcagctctggctgcatccgaatagatgggcaggacatttcacaggtgacccaggcctctctccggtctcacattggagttgtgccccaagacactgtcctctttaatgacaccatcgccgacaatatccgttacggccgtgtcacagctgggaatgatgaggtggaggctgctgctcaggctgcaggcatccatgatgccattatggctttccctgaagggtacaggacacaggtgggcgagcggggactgaagctgagcggcggggagaagcagcgcgtcgccattgcccgcaccatcctcaaggctccgggcatcattctgctggatgaggcaacgtcagcgctggatacatctaatgagagggccatccaggcttctctggccaaagtctgtgccaaccgcaccaccatcgtagtggcacacaggctctcaactgtggtcaatgctgaccagatcctcgtcatcaaggatggctgcatcgtggagaggggacgacacgaggctctgttgtcccgaggtggggtgtatgctgacatgtggcagctgcagcagggacaggaagaaacctctgaagacactaagcctcagaccatggaacggtgacaaaagtttggccacttccctctcaaagactaacccagaagggaataagatgtgtctcctttccctggcttatttcatcctggtcttggggtatggtgctagctatggtaagggaaagggacctttccgaaaaacatcttttggggaaataaaaatgtggactgtg

SEQ ID NO: 35741 - DNA, 2083 bp, Homo sapiens
ggtgcgagtccaacaccgagcattcccgtgggcctgcagttggcagaagggtcccgggcccagagccagcggggccgtgctgagacggcgtacgtgccctgcgtgagtgcgtggcggcggcgcgtgcgctaggggagtgggcggtgaggcctggtccacgtgcgtcccttcccgggacccccgcagcttggcgcccagcggctacgtgagccaaggcacccggatgtccgcgcccctctccgagtgacaagtcccggcctccggtcccgcagtgcccgcagcctcggccggcgtccacgcattgccatggtgactgtgggcaactactgcgaggccgaagggcccgtgggtccggcctggatgcaggatggcctgagtccctgcttcttcttcacgctcgtgccctcgacgcggatggctctagggactctggccttggtgctggctcttccctgcagacgccgggagcggcccgctggtgctgattcgctgtcttggggggccggccctcgcatctctccctacgtgctgcagctgcttctggccacacttcaggcggcgctgcccctggccggcctggctggccgggtgggcactgcccggggggccccactgccaagctatctacttctggcctccgtgctggagagtctggccggcgcctgtggcctgtggctgcttgtcgtggagcggagccaggcacggcagcgtctggcaatgggcatctggatcaagttcaggcacagccctggtctcctgctcctctggactgtggcgtttgcagctgagaacttggccctggtgtcttggaacagcccacagtggtggtgggcaagggcagacttgggccagcaggttcagtttagcctgtgggtgctgcggtatgtggtctctggagggctgtttgtcctgggtctctgggcccctggacttcgtccccagtcctatacattgcaggttcatgaagaggaccaagatgtggaaaggagccaggttcggtcagcagcccaacagtctacctggcgagattttggcaggaagctccgcctcctgagtggctacctgtggcctcgagggagtccagctctgcagctggtggtgctcatctgcctggggctcatgggtttggaacgggcactcaatgtgttggtgcctatattctataggaacattgtgaacttgctgactgagaaggcaccttggaactctctggcctggactgttaccagttacgtcttcctcaagttcctccaggggggtggcactggcagtacaggcttcgtgagcaacctgcgcaccttcctgtggatccgggtgcagcagttcacgtctcggcgggtggagctgctcatcttctcccacctgcacgagctctcactgcgctggcacctggggcgccgcacaggggaggtgctgcggatcgcggatcggggcacatccagtgtcacagggctgctcagctacctggtgttcaatgtcatccccacgctggccgacatcatcattggcatcatctacttcagcatgttcttcaacgcctggtttggcctcattgtgttcctgtgcatgagtctttacctcaccctgaccattgtggtcactgagtggagaaccaagtttcgtcgtgctatgaacacacaggagaacgctacccgggcacgagcagtggactctctgctaaacttcgagacggtgaagtattacaacgccgagagttacgaagtggaacgctatcgagaggccatcatcaaatatcagggtttggagtggaagtcgagcgcttcactggttttactaaatcagacccagaacctggtgattgggctcgggctcctcgccggctccctgctttgcgcatactttgtcactgagcagaagctacaggttggggactatgtgctctttggcacctacattatccagctgtacatgcccctcaattggtttggcacctactacaggatgatcagaccacttcttgacatgagactgtttgattgctgaagaagagacgaattaaggactccaaacaggccctccttcaaggctttatttaaactcctcactgccatgcggaaccccg

SEQ ID NO: 35742 - DNA, 1694 bp, Homo sapiens
ggtgcgagtccaacaccgagcattcccgtgggcctgcagttggcagaagggtcccgggcccagagccagcggggccgtgctgagacggcgtacgtgccctgcgtgagtgcgtggcggcggcgcgtgcgctaggggagtgggcggtgaggcctggtccacgtgcgtcccttcccgggacccccgcagcttggcgcccagcggctacgtgagccaaggcacccggatgtccgcgcccctctccgagtgacaagtcccggcctccggtcccgcagtgcccgcagcctcggccggcgtccacgcattgccatggtgactgtgggcaactactgcgaggccgaagggcccgtgggtccggcctggatgcaggatggcctgagtccctgcttcttcttcacgctcgtgccctcgacgcggatggctctagggactctggccttggtgctggctcttccctgcagacgccgggagcggcccgctggtgctgattcgctgtcttggggggccggccctcgcatctctccctacgtgctgcagctgcttctggccacacttcaggcggcgctgcccctggccggcctggctggccgggtgggcactgcccggggggccccactgccaagctatctacttctggcctccgtgctggagagtctggccggcgcctgtggcctgtggctgcttgtcgtggagcggagccaggcacggcagcgtctggcaatgggcatctggatcaagttcaggcacagccctggtctcctgctcctctggactgtggcgtttgcagctgagaacttggccctggtgtcttggaacagcccacagtggtggtgggcaagggcagacttgggccagcaggttcagtttagcctgtgggtgctgcggtatgtggtctctggagggctgtttgtcctgggtctctgggcccctggacttcgtccccagtcctatacattgcaggttcatgaagaggaccaagatgtggaaaggagccaggttcggtcagcagcccaacagtctacctggcgagattttggcaggaagctccgcctcctgagtggctacctgtggcctcgagggagtccagctctgcagctggtggtgctcatctgcctggggctcatgggtttggaacgggcactcaatgtgttggtgcctatattctataggaacattgtgaacttgctgactgagaaggcaccttggaactctctggcctggactgttaccagttacgtcttcctcaagttcctccaggggggtggcactggcagtacaggcttcgtgagcaacctgcgcaccttcctgtggatccgggtgcagcagttcacgtctcggcgggtggagctgctcatcttctcccacctgcacgagctctcactgcgctggcacctggggcgccgcacaggggaggtgctgcggatcgcggatcggggcacatccagtgtcacagggctgctcagctacctggtgttcaatgtcatccccacgctggccgacatcatcattggcatcatctacttcagcatgttcttcaacgcctggtttggcctcattgtgttcctgtgcatgagtctttacctcaccctgaccattgtggtcactgagtggagaaccaagtttcgtcgtgctatgaacacacaggagaacgctacccgggcacgagcagtggactctctgctaaacttcgagacggt

SEQ ID NO: 35743 - DNA, 1258 bp, Homo sapiens
cgaagggagaggagtagggtttggggagggaggagctgtgtggtgtttctcgtgcttggaaaacacaaagctgagaacctcagcacacatgggtggtgcccttccaggtgaaggaccttcctggagcagggccccttcgctttcagaagggccgtattgagtttgagaacgtgcacttcagctatgccgatgggtgaggccttccttttgcttcctttgcttttccgttcatttgcacactgccttcctgcttctcagtgctctgaatccctgcttttggaaaagagcctgggcaggggaggggcagggcctactagcagctctggtgatggaaggtgcctgctgagcaaccccacctttccttgcaggcgggagactctgcaggacgtgtctttcactgtgatgcctggacagacacttgccctggtgggcccatctggggcagggaagagcacaattttgcgcctgctgtttcgcttctacgacatcagctctggctgcatccgaatagatgggcaggacatttcacaggtgacccaggcctctctccggtctcacattggagttgtgccccaagacactgtcctctttaatgacaccatcgccgacaatatccgttacggccgtgtcacagctgggaatgatgaggtggaggctgctgctcaggctgcaggcatccatgatgccattatggctttccctgaagggtacaggacacaggtgggcgagcggggactgaagctgagcggcggggagaagcagcgcgtcgccattgcccgcaccatcctcaaggctccgggcatcattctgctggatgaggcaacgtcagcgctggatacatctaatgagagggccatccaggcttctctggccaaagtctgtgccaaccgcaccaccatcgtagtggcacacaggctctcaactgtggtcaatgctgaccagatcctcgtcatcaaggatggctgcatcgtggagaggggacgacacgaggctctgttgtcccgaggtggggtgtatgctgacatgtggcagctgcagcagggacaggaagaaacctctgaagacactaagcctcagaccatggaacggtgacaaaagtttggccacttccctctcaaagactaacccagaagggaataagatgtgtctcctttccctggcttatttcatcctggtcttggggtatggtgctagctatggtaagggaaagggacctttccgaaaaacatcttttggggaaataaaaatgtggactgtg

SEQ ID NO: 35744 - DNA, 835 bp, Homo sapiens
accttggtgttttttaaagtataggattattgtatacatgctctcctaataacttaggtaatgcgggcagagggcaaatctctttcgagctgcacttactttttcagagcttcccactctgtttagtatgttgggttctgctctttttttgagacagggtcacgctctgtcacccaggctggagtacagtggcataatctctgcggcactgcaacgctctgctcccgggttcaagcaattctcctgcctcagcctcctgagtagctgggattacagatgtgcaccagcatgcctggctaattattagattttttgtagaaacagggtttcaccatgttggccaggctggcctggaactcctagcatcatgtgatctgcccacctagcattccaaagtgctgggattacagttgtgagccattgtgcccagctgggttctgcttttttgcatttttacatacatattatatatgcagactcacagaactaatatggcattgtggaggtttttcctaaaacaaatggtattgtgacatagccatcattctcagagttgcttattaacagaacattatggagatatatttttcttccatgcctgaaggtctccctcattcattgtaattgatacagagaattctgtagtttgagcatggttgatttagccacccacctcttgagggtagaattaattaagactggttccagtctgttgcttgaaaataaaacactaccctgaaatgcctagaggcagggttgctgggtctaagcccccagacctttcttattcacttgacctgccctcctagctacctggtgttcaatgtcatcccca

SEQ ID NO: 35745 - DNA, 404 bp, Homo sapiens
ctgaccattgtggtcactgagtggagaaccaagtttcgtcgtgctatgaacacacaggagaacgctacccgggcacgagcagtggactctctgctaaacttcgagacggtaacagagggcccggtggcagtggtgtgaggcgtggagatgtggaggagtgtaaccaggaccactggggctgacagagagctgggggtgtgatgtttgtgtgtgatgtttgaactcaggaaggaggattgagagttggggggaatgacccgagtgccatgtgctgtgcccatgccaaataaatttggtttgaattcatcaggtgaagtattacaacgccgagagttacgaagtggaacgctatcgagaggccatcatcaaatatcaggtgaggatgctagtttgaggcctccgga

SEQ ID NO: 35746 - DNA, 678 bp, Homo sapiens
gaggagaagtgttggtttgaacgatccaagcaaactctcccagaatcaaattacctgggtagttgttcaacttttcactctgcttagcctgtatagacaaaccccatatatttgtagaggcttggccttggaattctggaataccattggcttttcagtaggctgatgaacacattttgaaaattctattatcttcagaattttgccccattgttaagtgcttaaccgtcactcttgaatgtgcaatgtgctgtggattccattttcatcagttctgaaagaactgcaatgtgtaaattatcagtgaaatgcatgcatataagggctctatcattatcaaattgtaaggacaattgtacccttctatatctttgggcatgctagacacccccatgccttcattgagatcccattttccccctctcaagtggaaaataatcacatccagcaagctctctcattattgagaaataccatttggaaattgccactttttattcctaagcagcacctttcactgttcatgatgctaatgttccacaaaagcatgtccattggcccactgaaggatagagggacccttttcaatctatatcagctgggctctgggactgaatctctcacctattcttgcagaaagacatactaattaaaccttgtcaaagtagtaagtcaaat

SEQ ID NO: 35747 - DNA, 943 bp, Homo sapiens
gtaggacgaaaaagaaagattttaagtaatctgctacatttcttcccccacttcctcctttttaaacagtccttatgttttactaaaatcttcaggattgaggggaacatctgttgtggaagtatgtagagaaaataacactgattttttttaaaagcctgcttttgtgaagctgtattgtattttgtggtccccacacactgcatacttaaacagttaaaagcctcaggaaagggaatcctcggaagaagtaattaatagttccaatcagagatggcagaagtaatagtttcaatcagagacggcagaagtaatagtgtcagtcagagacgtccagtggttgaggtagggcctgcataggtcgttggtgtgagatcatcctatgtgtccagttggcattctctttctctggcttgtgatctgagctcctgtatcttttatgtatttgttctctggcaagggaacatcatctttcttctgatttttctttattttactaactttgctgttgaagattttatggatgtagacgaaaactattttcacccgagaattcccctaacctagagcactttaaggactatgttaacaaggtcagaaactacactttctgttcacttgaaagatgctgccgtgatgagtgtctttccgtttagggcggtggcactcgctcttgagtctgaaggtctcagtggacggggctgtgggtgtaaccccctgcttgccaccttggcatttttagggcccaggtgttgtgagctctgtccttggagactgtgggacggtggagctgggcggcagtacgttaaattaaatatgttggcccacaggacaatgagaacgttttgtaagctgtactttgtatgctgtattactcgaatttcaaaaatgaagagggtgtaattattaaatatgtttggaaattgccaagtcattgaatacc

SEQ ID NO: 35748 - DNA, 407 bp, Homo sapiens
ttcagtccccatccttctctccttccggaaacaacctcaccactagaatgcaaatccatataatattagatccttatgaaaataacagctagaattcatcatgtgccaggcagtatgctaggtattctacctataataccttttttaatctttacagaatttattcattcattgaacaaatatttatttcctgtttcttatgtgtcatggggcagtcaagatgctgtgctggaaaagacacagcccctgcctgcagcatgctttcattctcagcaggagacgaacaccaaagcaaattagcaaaataaagtaagtaagcattggcaacaggtgagagtggctgtgaggataattaaaatggtgtaaaataattaaaatagaggagagttgggatagaaggctcagat

SEQ ID NO: 35749 - DNA, 635 bp, Homo sapiens
accatatggagctataatacatttttctgagagataatggcccatcagccatactgttttagatgggagggtaagaaagatttgtatgtgaatggcatttcataagtgctagtcaaattactgaagagaagtctctgagtctttcaaacgccagcatcttctgacacactgggcattagctgcatgcagaaaactagttaattcaggcactaggagtaaagcacatgatgaaattaaaagacctgacgcctatctgtgaggagctcccctgttagcaggggcagttgaaaacacgtatgtgcaaaatgattccaaatctgagcagcaaagaaacagtggcataaccttttttttttttttggacaattgaaactggaatttaggtggtaaaaacagcactagtggagcagggcacaatgacacacgcctgtgatcccagcactttgggagaccaaggcagtggattgttcaggagttcaccatcctgggtgacatggtgagacattgtctctacaaaaaaatataaaaattagccgggcgtggtggcgtgagcctgtggtcccaactactctctggagcctgaggtgagaagatcacttaagcctggtaggtcaaggctgctctctatcctgggt

SEQ ID NO: 35750 - DNA, 758 bp, Homo sapiens
gacggggatccggaaggcgttgtcggtgacatcacggagagggcgatttctatgtagatgaggcagcgcaggggctgctgctttgccacgaaagagttcccgtgccgtgggagcaagtctgggaccgctggtcggaccggagagtcgcagctgtgtgttagggctaggatggctccgggatgcgcgtgacgcaagtgaccttgcgtgtaaagggatacatgatcccttaattcaggctcaggctgaagaactgacccacttacgacagaagacacaggaagggagaggtgtctgctacctttttacccagcatgtgaagaacacagtcaagtcttttgagggccttctcaggaacactgacattgcctactaccagagacagagattctgtgagcaaatggtacaaggaagccagctgacagagatccttgtcagaaaacttgccacagaatcttgctctcttacccaagctggagtgcagtgacacggtcttggctgactgcaatctgtgcctcctgggctcaagcaatcttcccacctcagcctcccaagtagctgggactacaggtgtgtgccaccacacctggctaatgtttgtattttttgtagagatagggtttctccatgttgtccaggcttgtcttgaactactgagctgaagtaatccacctgctttggactcccaaagtgctgggattacagatatgagccactgtgcctggcctgagagttcttagtttcaatcagtaagagaggta

SEQ ID NO: 35751 - DNA, 763 bp, Homo sapiens
  misc_feature (762)..(762): n is a, c, g, or t
gacggggatccggaaggcgttgtcggtgacatcacggagagggcgatttctatgtagatgaggcagcgcaggggctgctgctttgccacgaaagagttcccgtgccgtgggagcaagtctgggaccgctggtcggaccggagagtcgcagctgtgtgttagggctaggatggctccgggatgcgcgtgacgcaagtgaccttgcgtgtaaagggatacatgatcccttaattcaggctcaggctgaagaactgacccacttacgacagaagacacaggaagggagaggtgtctgctacctttttacccagcatgtgaagaacacagtcaagtcttttgagggccttctcaggaacactgacattgcctactaccagagacagagattctgtgagcaaatggtacaaggaagccagctgacagagatccttgtcagaaaacttgccacagaagatgagatccagagacagcggtagcacctgaaggaaacccttttcatcaacaactgcctgtgagaaaagctggaatgtcatctcagcagctttgatgaagaaaatggtgggagaggcccaagtcagtgcttctggcaatatgtatttttctaaagcatgcacctctaaactctacaggcacatcatagattccatcgtccagctgtataatgaaaacagagttctcagagaacaccggagactcccccgacttgcctgaatcaagtttctagaggtaacaactgatgttggaactatggagaacaactaana

SEQ ID NO: 35752 - DNA, 446 bp, Homo sapiens
tttcagggttatttatttatttatttattttcaggtcccaatagactgtccaaatcttttggggttagttcaggctctgtatatagtagaagctggtgttagaaaagttgatttataccggaatatttttcatagaatcacccccaattctcaccaacaaactgagaagaaaaaaaaaagaattacccccaagaacatctgaggaagcacaacagggacagacttgaaggtacctgggcagtcctctggttttggagtagaggtaggacagggctatttgtcctctcagagactggagcaggttctgtgtgtgagtagctatgggacaaacagtcatggtctggcaaacagcctgtggcaggaaggaaggttacaactggagaagtccaaagggcagccaggcaagtattctttgagctggggaacaaaagacattttaaactttt

SEQ ID NO: 35753 - DNA, 648 bp, Homo sapiens
ccacagacagtaccttagagtctaagcttaggtacctttgtcttgtttttgtggctaaggattctcagagttgcgggatgctgatgaaatttatcccaaaagatacatgatcccttaattcaggctcaggctgaagaactgacccacttacgacagaagacacaggaagggagaggtgtctgctacctttttacccagcatgtgaagaacacagtcaagtcttttgagggccttctcaggaacactgacattgcctactaccagagacagagattctgtgagcaaatggtacaaggaagccagctgacagagatccttgtcagaaaacttgccacagaatcacccccaattctcaccaacaaactgagaagaaaaaaaaaagaattacccccaagaacatctgaggaagcacaacagggacagacttgaaggtacctgggcagtcctctggttttggagtagaggtaggacagggctatttgtcctctcagagactggagcaggttctgtgtgtgagtagctatgggacaaacagtcatggtctggcaaacagcctgtggcaggaaggaaggttacaactggagaagtccaaagggcagccaggcaagtattctttgagctggggaacaaaagacattttaaactttt

SEQ ID NO: 35754 - DNA, 232 bp, Homo sapiens
cactgggtcttacctctggcattcctatcagagcctgaaccacagacagtaccttagagtctaagcttaggtacctttgtcttgtttttgtggctaaggattctcagagttgcgggatgctgatgaaatttatcccaaaagtaagttatgaatcagatctgctttcttttgactcatttaaatcctttgtttaatgtaaagaaactttattgaggtataatttacaaactat

SEQ ID NO: 35755 - DNA, 365 bp, Homo sapiens
tagatttgccttttctggacatttcatataagtagaatcatccgggatgtcatttttgactggctgctttaacttggtgtgctgttttccacactcatccattttgtggtatgtattactacagttggttctctgcattggtgcattctacatctggtgttcaaccacagattaagaatacttaaaaaactgcatctgtactgaacatatgcacacttatttttgtcattattccctaaccaatgcagtataacaactacttatatagcatttatactttattaggtattataagtaatctagcgatgacttaatatatgagagggtgtgcatagcttatatgcaaatactatgctgttttatat

SEQ ID NO: 35756 - DNA, 3085 bp, Homo sapiens
ccgcggcggcagcagcagcagcagcagcgagaggcagaggcggcggcggcggggaggacagcacggccgaggctgcccagaggcgcctcctccacaccccccgccgcagcagcaccggcgacagattttttaaaaaatggatttggccaaccatggacttattctactgcaacagttaaacgctcagcgagagtttggtttcctgtgtgactgcacggttgcaatcggcgatgtatacttcaaggcacacaaatcagttcttgcttcattctccaattactttaagatgttgtttgtccatcagaccagtgagtgtgtccgcttgaaaccaactgacatacagcccgacatcttcagctatctcttacacttgatgtacactgggaagatggcgcctcagctcatcgacccggttcgattagaacagggcatcaagtttctgcacgcctacccgctcattcaggaagccagcctcgccagccagggagccttttctcaccctgaccaagttttcccactggcttcttcattgtatggcattcagattgcagatcatcagttgagacaagccaccaagattgcttcagcacctgaaaaactcgggcgagatccacggccacagacctccaggataagccaggagcaggtccctgaggcctcacagctctcccagctgacttcaaatctggcccaggtgaatcggacaaatatgactccctcagaccccctgcagacctcgctgtctccagaacttgtttccactcctgttcctccccctcctcccggggaggagaccaatctggaagcatcttcctccgatgagcagcctgcgtccctcacaatagcccacgtcaagccaagcatcatgaagaggaatgggagctttccaaagtactatgcctgccacctgtgtggacggcgcttcactctccggagcagcttacgtgaacacctccagatccacacaggagtacctttcacatctagccaacagggagaaagtcgcgtccccctgactctctgtagcaatgcagctgacctcgggaaagatgccatggaagtgcctgaagccgggatgataagtgacagtgagctgcagcacatctctgattctcccatcatcgatgggcagcagcagtcggaaaccccacccccctcagacattgctgacattgacaacctggagcaggccgaccaggagagggaggtgaagaggcggaagtacgagtgcacaatatgtggacgcaaatttatccagaaaagccactggagggaacacatgtacatacacaccgggaagcctttcaagtgcagcacttgtgacaaaagcttttgcagggccaaccaggctgcccgccacgtgtgcctcaaccagagcatcgacacttacaccatggtggacaaacagactctggaactctgcacatttgaggaagggagtcagatggacaacatgctggtgcaaacaaacaaaccctacaaatgcaacttgtgtgacaaaacattctccactcccaatgaggttgttaaacattcatgccaaaaccagaactcggatgtttttgccctagacgaagggcgatccattctcctgggcagtggggactcggaagtaacggagcctgaccacccagtgttagcttccatcaaaaaggaacaagaaaccgtcttactagactgaatgtcacttatctttttaaaaaactctcatttttacaaagactatcttccctcccttccctgaattcagaactgtagttctccatggcatgatacaaacaggtccttgttctcttctcctcttccccttttccacatcccagccccacctctgtaaaggctttgtgcattataaacctggaatgtatcgactttctttcaggggatattggaaagataatggtcattatacttataaactcaaattttgagaggttttagattattcagaagcatacttggaactaatgaagggtatataataaaacaactggaatccaatttggtaagctaaaattatgactttccctgggtaaaaagtcttctcagaaaaacaatgtcagaaaataacagcgtgctgcttagaaatacggctgggctctgtactatgcaaaatctagaaagtgtggggaaactttaaacccaagaaaacgttcttagtattcatcctccaggtgtcttacttcagaatgcatcctttgagattatgtccacttaagagaaatcatcagttaagaaatctactttaacaaaacaaaaaggagaaaaagtaataatgtgatggcaatcttaatttttgggtacaacatgacaagctgtgagtttgtgtgtttgtaagagaaaaatgtgtgggtacttgctaataaacaggtgaattaatgcacatccttatctcattgctggcttctttccaagttgagcaacaacaaaatgctgtatttgagtttctgacaaatttgttttaaaaatcaaatttgaatgtactattctataaattgcctttctgaatagaacatgacatgccattttctagcagctgccagtgataatttgttttacactaacttttaaatcagtgtgtgtactgcagggaaaaggatataggaatactcatcttacaggggaatttgtgaccagaagatgtagtaacttcaatgactgaaagtcaatgctgatagtttactggcaacattaattgaagcatcaaaaataaatggcaaagagaaatcaggacaaaaaatctaattgctgtttgggaaaaaacttgattttgatgtttattctccaggtttttggttgtttttttttctttcttctttcttaatgcctgaaattttctccattggcccgaaagcagtaaaaattgttcattaatcttccgttaggccaataaaagaagggcctcacaagacaaaacaggagccagaagtaaggactgaaggagaaggggagaatagctaatagctatagtatatgtatatgttaaaaactgaatatcccatcatcctatttcatgtatagttgagttctcaaatttgtaagtttttatacatcctttcattgaataaacgtttaattaaatgag

SEQ ID NO: 35757 - DNA, 3164 bp, Homo sapiens
ccgcggcggcagcagcagcagcagcagcgagaggcagaggcggcggcggcggggaggacagcacggccgaggctgcccagaggcgcctcctccacaccccccgccgcagcagcaccggcgacagattttttaaaaaatggatttggccaaccatggacttattctactgcaacagttaaacgctcagcgagagtttggtttcctgtgtgactgcacggttgcaatcggcgatgtatacttcaaggcacacaaatcagttcttgcttcattctccaattactttaagatgttgtttgtccatcagaccagtgagtgtgtccgcttgaaaccaactgacatacagcccgacatcttcagctatctcttacacttgatgtacactgggaagatggcgcctcagctcatcgacccggttcgattagaacagggcatcaagtttctgcacgcctacccgctcattcaggaagccagcctcgccagccagggagccttttctcaccctgaccaagttttcccactggcttcttcattgtatggcattcagattgcagatcatcagttgagacaagccaccaagattgcttcagcacctgaaaaactcgggcgagatccacggccacagacctccaggataagccaggagcaggtccctgaggcctcacagctctcccagctgacttcaaatctggcccaggtgaatcggacaaatatgactccctcagaccccctgcagacctcgctgtctccagaacttgtttccactcctgttcctccccctcctcccggggaggagaccaatctggaagcatcttcctccgatgagcagcctgcgtccctcacaatagcccacgtcaagccaagcatcatgaagaggaatgggagctttccaaagtactatgcctgccacctgtgtggacggcgcttcactctccggagcagcttacgtgaacacctccagatccacacaggagtacctttcacatctagccaacagggagaaagtcgcgtccccctgactctctgtagcaatgcagctgacctcgggaaagatgccatggaagtgcctgaagccgggatgataagtgacagtgagctgcagcacatctctgattctcccatcatcgatgggcagcagcagtcggaaaccccacccccctcagacattgctgacattgacaacctggagcaggccgaccaggagagggaggtgaagaggcggaagtacgagtgcacaatatgtggacgcaaatttatccagaaaagccactggagggaacacatgtacatacacaccgggaagcctttcaagtgcagcacttgtgacaaaagcttttgcagggccaaccaggctgcccgccacgtgtgcctcaaccagagcatcgacacttacaccatggtggacaaacagactctggaactctgcacatttgaggaagggagtcagatggacaacatgctggtgcaaacaaacaaaccctacaaatgcaacttgtgtgacaaaacattctccactcccaatgaggttgttaaacattcatgccaaaaccagaactcggatgtttttgccctagacgaagggcgatccattctcctgggcagtggggactcggaagtaacggagcctgaccacccagtgttagcttccatcaaaaaggaacaagaaaccgtcttactagactgaatgtcacttatctttttaaaaaactctcatttttacaaagactatcttccctcccttccctgaattcagaactgtagttctccatggcatgatacaaacaggtccttgttctcttctcctcttccccttttccacatcccagccccacctctgtaaaggctttgtgcattataaacctggaatgtatcgactttctttcaggggatattggaaagataatggtcattatacttataaactcaaattttgagaggttttagattattcagaagcatacttggaactaatgaagggtatataataaaacaactggaatccaatttggtaagctaaaattatgactttccctgggtaaaaagtcttctcagaaaaacaatgtcagaaaataacagcgtgctgcttagaaatacggctgggctctgtactatgcaaaatctagaaagtgtggggaaactttaaacccaagaaaacgttcttagtattcatcctccaggtgtcttacttcagaatgcatcctttgagattatgtccacttaagagaaatcatcagttaagaaatctactttaacaaaacaaaaaggagaaaaagtaataatgtgatggcaatcttaatttttgggtacaacatgacaagctgtgagtttgtgtgtttgtaagagaaaaatgtgtgggtacttgctaataaacaggtgaattaatgcacatccttatctcattgctggcttctttccaagttgagcaacaacaaaatgctgtatttgagtttctgacaaatttgttttaaaaatcaaatttgaatgtactattctataaattgcctttctgaatagaacatgacatgccattttctagcagctgccagtgataatttgttttacactaacttttaaatcagtgtgtgtactgcagggaaaaggatataggaatactcatcttacaggggaatttgtgaccagaagatgtagtaacttcaatgactgaaagtcaatgctgatagtttactggcaacattaattgaagcatcaaaaataaatggcaaagagaaatcaggacaaaaaatctaattgctgtttgggaaaaaacttgattttgatgtttattctccaggtttttggttgtttttttttctttcttctttcttaatgcctgaaattttctccattggcccgaaagcagtaaaaattgttcattaatcttccgttaggccaataaaagaagggcctcacaagacaaaacaggagccagaagtaaggactgaaggagaaggggagaatagctaatagctatagtatatgtatatgttaaaaactgaatatcccatcatcctatttcatgtatagttgagttctcaaatttgtaagtttttatacatcctttcattgaataaacgtttaattaaatgagtatatgatgtcatgtcatctctgcgtctttgtctacccaaagagatacaggaaggggatgtgtagtggagcagtgcttg

SEQ ID NO: 35758 - DNA, 1439 bp, Homo sapiens
ccacccatcaacctctacggctgcccctcatttgaacacacaaaatatagttgtgcggcttggtggagccatctaaattccgttaggccatttgccaatgctgctattaggggcgaaatgtcatgcgcttgatctaaatgtacttaggagaattctcaggacctgatgaattattattcggaattttatggcctcacaggttgcaggcttcataccaactgcagctaatgagctatgggccccgagaaacactgaggacacacggcgttctgcacacagagtgggctgtttctgtctgttctccccctgcacccttctcagatgcaatctcaagtcataggagaacttgtgcaaatgtttctcctggatggtttcctttagagcatgtgtcctataacttgaaatggttgtctgagcagaatgtttttagaagttagatttttttaggggggaaacaggaaccaaagcaaagccaatagagatcttgaaaaaaaaaaaaaaaagaaaaaaccaccgtggtattctaggaagaaaaaagcatttttcgaatgaaaactttttattatatttgatatattctgcttcccttccctagtatgtattaatgagatgaaatcacttcttaattttcaggttaatattaaagttgaagcccatccctctaccctgaggactctgccagcctctggcagtattcctttccaacttccacttgccccaaataggtagaagttagcctttatttttggtgtcatgtcttctttccctcctcctatcagtttttcagaaactccagaaatttaacctagtacacaggggccccccacccctgtttccagatgccttctagaaagaggactgggagtgtgaatgaggccatgtgggctttgtttgaccctgtggttgtcatgacaatttctcaaagcttagctgggacaggaagaaggaaggggaggatagcggtgtgttcagtgtgtgagctcctaaaagctcttgggtcactgttcccaggggatgatgaccctctatggcagatcagttgcatgtgcatatgagctttccctcctcccgtgggttagcatgttccacactcaccttctcaaagcaaagtctcccttaggggacccttggtatcctgttcatctggcaaatctcagcaccaatagaaacaccaagaacatggattcatcaaaggaaaaatgttgaagtttccatttttatgcttcctggtaatccttcagcccttgatggaaatttccagacctaaaccagtgaattaagagtatggggaagaggagccctcatacagttctgttaaatggtcctttaatattcttcttcagagtgacgggtaccccttgcctatacattttcaaaactacactgaaatttcaaaacatttctatcagaacacagtcttattctcagctgatctgcaa

SEQ ID NO: 35759 - DNA, 1093 bp, Homo sapiens
cctgaggaatcttgtgatctatgaccttacccccaacctgtgctccctgaaatatgtgctgtgtccactcagggttaaatggattaagggcggtgcaagatgtgctttgttaaacagatgcttgaaggcagcaggctccttaagagtcatcaccactccctaatctcaagtacccagggacactaacactctgactaggaaaaccagagatttttattatatttgatatattctgcttcccttccctagtatgtattaatgagatgaaatcacttcttaattttcaggttaatattaaagttgaagcccatccctctaccctgaggactctgccagcctctggcagtattcctttccaacttccacttgccccaaataggtagaagttagcctttatttttggtgtcatgtcttctttccctcctcctatcagtttttcagaaactccagaaatttaacctagtacacaggggccccccacccctgtttccagatgccttctagaaagaggactgggagtgtgaatgaggccatgtgggctttgtttgaccctgtggttgtcatgacaatttctcaaagcttagctgggacaggaagaaggaaggggaggatagcggtgtgttcagtgtgtgagctcctaaaagctcttgggtcactgttcccaggggatgatgaccctctatggcagatcagttgcatgtgcatatgagctttccctcctcccgtgggttagcatgttccacactcaccttctcaaagcaaagtctcccttaggggacccttggtatcctgttcatctggcaaatctcagcaccaatagaaacaccaagaacatggattcatcaaaggaaaaatgttgaagtttccatttttatgcttcctggtaatccttcagcccttgatggaaatttccagacctaaaccagtgaattaagagtatggggaagaggagccctcatacagttctgttaaatggtcctttaatattcttcttcagagtgacgggtaccccttgcctatacattttcaaaactacactgaaatttcaaaacatttctatcagaacacagtcttattctcagctgatctgcaa

SEQ ID NO: 35760 - DNA, 350 bp, Homo sapiens
acatggtaaaggatactttgccattaagaatacaaactttgagatgaggacgttatcctagaatagctgagtgggccagtctaattaaaggagctcttaaacgtgcatatcattttctggctgaggtcagaaagttgcaacatgaaaagtagtccaccccctgttgctggctttgaagatggaaaaaggaagccatgtaccaggaaccctatagtttctggaagctgtgaatgagccttgatttctacagcttgcaaaactgtaaataaggccgatagagacctcagtcctaaaatcaccagaaactaaatttggctaataaccccaataaaccagcaaccaattctccc

SEQ ID NO: 35761 - DNA, 1199 bp, Homo sapiens
gcaaatttaaatgtggtacattctccaaccatcagatagacaaaaacttaaatctaacaatgtaatgggaactctgcctctgcaagtgggattgaaaatggatataacctgctttggagaacgttaatgtctaatgaagtttgaggtgtacataaccctatgatcatgcaattccacttttaagatatatatatactttagagcaggggtctgcaaattacagtccatgggctaaatcctaccctctggctgtttgtgtaagtttttattgaaaccgtgcccacttatttatatagctgctttcacactacagtagcagagctgaatagttgcaacagggaccatagggcctgcaaagcctaaaatatatactatatactctctgactctttacagaaaaagtttgctaacctctacctttgagtaattcttacatgtacaaggagacatgtacaaggatttttttgatgcacacttgcttatcatagaaaataattggtctgtaaacctgtccatgaacagaaaattgatagatatattcaaacaacagaatgctatattgcagttaaaagtggattaagtaaaattacatatactcataaggattaatattaaaaacaataggccaagcgcggtggctcacgcctgtaatcccagcactttgggaggccagggtgggtggatcacctgcctggccaacatggtgaaaccccatctctgcaaaaaatacaaaaattagctgggcatggtggtgtgcgcctgtaatcccagctcctcgggggcctgagaatagcttgaacccaggaggcggagattatagtgagccaagattgcaccactgcactccagcctggacaacagagcaagactctgtctcaaaaaaaaagaaaaactgatgaacaaaaaacattgcagacagataaatgtacagtatgtaatatctatataaagatttaaaatatttacattttaggagtacttgaaaagttttgttctgtaatgtcttgatttttttttttttttaatctagagcaactataagggtcaggtggagtggctcacgcctgtcatcccagggctttgggtggctgaggtgggagaatcacttgagaccaggagtttgagatcagcctggacaacatagtcagaccccatctctacaaaaaaaatttttttaattagccaggtgtggccaggag

SEQ ID NO: 35762 - DNA, 1381 bp, Homo sapiens
gtatagtctgagtattaagaatatctgagatctgtattaaaaacagatgtaggccgggcacagtggctcacgcctgtaatcccagcactttgggaggccaaggcgggaggatcacctgaggtcaggagttcgagagcagcctggccaacatggtgaaaccccatttgtactaaaaataccaaaaaattagccgggtggggtggtggcgcacctataatcccagatactcggtgggctgaggctggagaattcctgaacccaggaggcagaggttgcagtgagcagagattgcgccattgtactccagcctgggcgatgagcgaaactctgtctcaaaaaaaaaaaaaaaaaaaaaaagatgtaaaaaaaaaaaaagaatatctgagatatagcaaagtttttctcatggatgaataaaaatactgaactgggcctttaaaaaagtacagaaaattgcctgtcatagaaatgcagcagtagggtcaaatgagctaaatctaaatctcatttaatgaaaaaggcactttccttttatttttgaaggatggtctaacctagtttttggaattcatttgttctgcaattaaaagagatttttaggtggttcatttaattatagctgttttggaaatgggaaggaaaataatgtgagagagagattaactgcatttgcttctgtggaaagtcagtagtcaaaaggagagtctggattatttatttatttatctaaaaatatggaacacttggtgaattttaaccttatctttgctcagaggatgtactaatctctgtgttctaattttttagtatatgtgctgctgaagcaaacacacagattatttttttctgttcttaagttttttggaggaaagctatttactataggtcttaattaaaaactatattctgtatatattgaaatgtgcagaaccctgctgctgctgtttttcgttacccagaatgtgcttacatctctctactatcatcttctctccctttgttttagcccttggggtttatgtttttttattcctttatttcatttttttctgaggttttggaagggaatggagaatggggtgtgttcattctgcctggctggttgattttatatagaaattgatgttttcatctctaagggacaaagaaaattaggaaaatatcctagttttatttttattgtggtaaaatacacattacatacagtttaccattttaaatattgttaagtcttcagttcagtgacattaagtacatttaccttgttatgtgaccattaccactatcggtctctagaactttttcatcatccagaactgaaacttgtacctattaaacaataattatccatttcacctcctccctgctctggtaactacta

SEQ ID NO: 35763 - DNA, 477 bp, Homo sapiens
  misc_feature (410)..(410): n is a, c, g, or t
taattcattgcttgctaattgggtctaaatattctgagaatgctcaagtgtagggcaaaaaacaaacacaccatgaataatggataatagttcagcaaacattattagatatgaaacagagaacataagataaaagacagaagtgccaagtttaatagaatcaaatgcccttcataattcattgagttacttctttagttttgatgctagaatgcttagaactaagtattttgcacaaatctccttaatgacatcgtgggttttaatctcttaatgggtcagttatagtatttgttttattgtaagctgcctcaatgcctttctaggatcaagtaaggaataaatatgcaagtgtaaaaaatgaatgtcaggctgggattacaggcgtgagccaccgcgcttggcctctntctttctttccgttttttttttcccctggggagaggggagcacctaggaggaaatgtgtgagactga

SEQ ID NO: 35764 - DNA, 700 bp, Homo sapiens
gtatagtctgagtattaagaatatctgagatctgtattaaaaacagatgtaggccgggcacagtggctcacgcctgtaatcccagcactttgggaggccaaggcgggaggatcacctgaggtcaggagttcgagagcagcctggccaacatggtgaaaccccatttgtactaaaaataccaaaaaattagccgggtggggtggtggcgcacctataatcccagatactcggtgggctgaggctggagaattcctgaacccaggaggcagaggttgcagtgagcagagattgcgccattgtactccagcctgggcgatgagcgaaactctgtctcaaaaaaaaaaaaaaaaaaaaaaagatgtaaaaaaaaaaaaagaatatctgagatatagcaaagtttttctcatggatgaataaaaatactgaactgggcctttaaaaaagtacagaaaattgcctgtcatagaaatgcagcagtagggtcaaatgagctaaatctaaatctcatttaatgaaaaaggcactttccttttatttttgaaggatggtctaacctagtttttggaattcatttgttctgcaattaaaagagatttttaggtggttcatttaattatagcttgtaaaaaatgaatgtcaggctgggcgtggtggctctcacctgtaatcccagcactttgggaggccgaggtgggcggat

SEQ ID NO: 35765 - DNA, 199 bp, Homo sapiens
cagtcaaaggtagaaaactgggattttagtcatgatgtctgcacagagtgggagctgcatatgtggagttggcttttagtagctggtagtggggccagccctaaagcatgaatctgggaataaaggtcccattttgctacaacttggggaagactttaaccctaatgtcttctagaaattcactgcatcagaatttatg

SEQ ID NO: 35766 - DNA, 392 bp, Homo sapiens
aaacattcctgcatttaatttgttggtggcagtgtccttatatgacaaaaccagtctcacaattcattataaacaataacctcagccgggcacagtggctcatgcctgtaatcccagcactctaggaggctgaggcaggtggattacctgaggtcaggagtttgagaccagcctggctaacatggtgaaaccccttctctactaaaaaaatacaaaaattagccgggcggcagtggcgcgtgcctgtaatcccagctacgtgggagactgaggcaggagaattgtttgaacctggggaggcagaggttgcagtgagctgagatcgcaccactgcactgcaacctgggcgacagagcgagactgtctcacaaacaaacaaacaacaacaacaa

SEQ ID NO: 35767 - DNA, 296 bp, Homo sapiens
taaaaattagccaggtgtggtggtgcacctgtagtcccaatggctcaggaggctgaggtgggaagattgcttgagcccaggaggttgaggctgtagtgaaccatgattgtgccagtgcgttctagcctggatgagagagtgagaccctgtcttaaaaataaagaatattttttcttggctgggagcagtggctcatgcctataatccaaggactttgggaggctaaggcaggaggaatacttgaggccaggagttcaagccagcctgggcaacatagcaagaacccatctctaccc

SEQ ID NO: 35768 - DNA, 445 bp, Homo sapiens
atattattcaagtattgactcagtctttctgaggtaggtacaattagtatccattagagataagaaaacagacacaagaaaattaaatcacttgctcagggtcacgtagctaataaatggtggagctagatttagaaaccaggcagtctgggctgggcgtggtgtcacgcctgttttccgagccctgtgggaggcccaggccggccgattcacgaggtcagggatctaagaccatcctggcttacacggtgaaaccccgtctctcaaaaaaaaaaaaaaaaaattagccaggcgtagtggcgggcgccctgtaatcccagctactcgggaggctgaggcaggagaatggcatgaacccgggaggcagagcttgcagtgagccgagattgcaccactgcactcctgcctgggcgacagagcaagactcagcctcaaaaaaaaaaaa

SEQ ID NO: 35769 - DNA, 336 bp, Homo sapiens
ggatagggttgcctcattgcacaatttcagggggtaccactgacattatgatctatgtgaatgatacccctggaattgtgtagttacatctataagactaattggcagctttgggattgaaccagttttaggaagtctgttacaacttgataaaataactatttaaaaaattctgagcaaaagtttactattatagctatttatgtaactatttacattttacattgtttaaattttacatttatttttatattttacatggtttacaattttagtttttctcttttaatcccaccacaatcctgtaatataggtaggttaagatgtgtagtagtt

SEQ ID NO: 35770 - DNA, 560 bp, Homo sapiens
tatgccagggatcacagcaggcatgaagatacaaagtgaaatgagaccagtccctgcccatgaacaggcagcatgacaacatgatggacagagcacggattttctgagggatacagccaggtcccacccctaattagcttcttgagctcagctaagttcttaaaacttctctgagccttgattttctcatctgcatgatggattattttataggttgaccactcgtcctggtttgcctgagactgaagggcatcctgggacacagaacttccagtgctaaaacccagaaaatcccaggcatatcaagatgagttggtcacttagaggacagatgaattgaaatgacatatagaaatggactcacactgtgccctgcatctaatagctgctctataaatgtagtcacacaaaaacgtgctcctcacatggtaaaagaaaaataaaatgaaacaaataggtgagtgcaaaataattgcagtttttgaattgttggaatttgctgtataatactggaatacattcttaaataaatgtggttatgttatacatcaaaaaaaaaa

SEQ ID NO: 35771 - DNA, 401 bp, Homo sapiens
gcgatggagttttgctcttgtcttgcaggctagagtgcagtcgtgcgatctcagctcactgcaacctccacctcccgggttcacacgattatccttcctcagcctcctgagtagcacaggcatgcaccaccacgcccggctaatttttgtatttgtagtagagatggggtttcggcatgttggctaggctggtctcgaactcctgacttcaggtgatccacccgccttggcctcccaaagtgctaggattacaggtgtgagccacagtacccagcccaaatgacttatttctaagagctactaggaaatgtcaccctaagaagttggaggagaaggctaaaatgagttttgtggagtcatgtgcaagtaagttatttatgagtgttcttatcaccaggtac

SEQ ID NO: 35772 - DNA, 342 bp, Homo sapiens
ttgagtccttcatgtctattgttccggcccaaattgccatgcaaaatcagagttagaggaattggagtggctgatgcctccagcagattgacttgaaattcaacaaaaattcctgtcccctcattaaaaaaaaatcttaattcctttcatgtaccattgtagattctttagattattttattcattataatcttataaagccagaatctatatggtccagtctctcagtgcagggtcaaatagacaggtcaatatccaaatgttcattaaaaataattttgtttgtcaggagatcgagaccatcctggtgaacacggtgaaacccagtctctactaaaaata

SEQ ID NO: 35773 - DNA, 931 bp, Homo sapiens
tggggttataaagatcataacatttatagccccagactgacttgtaagcagctgcatttaaagtacttactcagacactcaggcctgagagatagacccctttctttccagcactagctgaaataatcaagtatatagtttgttcaggattggcactaaatgtgatttaatcttttaataaaagggtccttttgtacccacttaggcttcttcgtaattaccagaaaggtgataagcctgcatgtgtctggacaccaaagattgagaagctgccagtggctgcaagagagcctactgtaaccctcatggccaccccctgatgagtgttacctggggaaagggctagcaagaggtgaagcctcctggtcatatgatgctgggggtgcctaattccttaaaggccaaggtcttctgaaataataatggtgaaggacagaaaagtctttatgagaaatcacataggatatattaagataatgataaagatacctcagcaagaacatacctaatatatacacttcttttaatctgatgacttaatgatttctgttatcaagaagtatttatgacttgagataagtcaggattaactgttatcacctctcctgtacacctccctcctttttctcctttgtacccacatgtgcagattttttcagaggtgacaatttagcatttaatgtttttttttctgcttcaagttcttaggtccctttggaggatattgatgggggtggaggtggggatagaacatctttcacactgtttggtacagagatgctcaaagcttttcccagggaaaggaactctctaaaatagtaatctgatttgatgaaagataaaattttaatatagcttcagttaaccttcaggatactttaaatgctacattgtatataaaagtaataaagtacaaatgaacacgaagact

SEQ ID NO: 35774 - DNA, 392 bp, Homo sapiens
cattattgaaagaaaataagagtataatgatgaggtaatatggcaaagggcatgctggtgttcagtgtcactcagctgcttcttgaatttccacagagcagatgattcaaatccaggtatgttttctgaaatatatacagatagaattaataatcactaatccagtataaaacatctgctaaatgccttttgagccatattccaggaagtacagattcggactttttccatatatagtccactcatttcacctctatagtaaagctggatattggtatctgtacactctggcaaaactctcagattttagttgtgagcaagagttatagagtggcattagaaagcatggttagtgctaatcatgctatgtagtaatttggcaagtagtcttc

SEQ ID NO: 35775 - DNA, 654 bp, Homo sapiens
cattctgaggtgtactgtgggttaagacctcaatatatgaattggggcgtgggtgggacataattaagtccataacagtgattctttgtgggtagtctttcttacaaatacaaaagtgtgggtattttctccgcgttgctgctttccaggagcacaggctcaaataaagttcaacgtcatgaggacagatgttatcatttctcttgtgtatattcctagaactggaattactgggttacgtttaacattttaagaagccatttgccaacatatctgcaccgttttaacttcccaccaataatattaaaggattccagtttctccactcccttacgctcatgaatgctttcttttttatttcagccattctggtaaaagtaaatggatatttcattgtggttttaatttatatttctctagtgattaatgatgttgaacacctttttcatgtacttgttaaccatttgtatatcttctttagtgaaatatctcttcaaatccattgcccatttaggagttttaaaaatatattctaggctgggtatgatggctcacacctgtaattctagcattttgggaggctgaggtgggcagatagcttgagcccaggagtttgagaccagcatgggcaacataagcaaaactccatctcta

SEQ ID NO: 35776 - DNA, 459 bp, Homo sapiens
agaagctgggcagaagctatttgtcttctgtccactcctaggttccttagcccctctcctttgtactcacagaagcatttcccctgaagatgtagcctggcccatgccaatcaaaccaggacagagagaagctgaggagtccttgccctgtccgactcttcccgccccagcctcagcaggtgaagctcggaattagtcttgcaggtctaaatgagagatgcagaaatctaggactaatctctaggctgtattgtgctgcactggccccttctgtacgactgtgtttatgccttggacttccattgaacacatcagttcctgaagtcttcctttttcttatggactgaattgcggccctccccaccaccaaattcatttgttgaagccctaacccacagtgcgactgtatttggagatagggcctttaaagaggtcggtattaaggctgggtgcagtggc

SEQ ID NO: 35777 - DNA, 373 bp, Homo sapiens
gcgtcgaccaaaaccaacaacaacaaaaatgccagggtgtgtgagggagtgaattcccaccctgagttgtgggtcccaccaatgcattgtcccaggccctttagcctcctgtctcccactttctagacactgtttgactgtacaagccactgtgtgctgctgccttggactggagagaatccgcccagcaggcggccagctggcatagtggcagccgtccctctgttactgtagctgatgtgcagctgttagtgctggccccagattctgctgagcatctgagccccctgcagaagggatgatgttgtcagaaggtggtgcctgccaaacagccaccttgctgccctcccagtcttcccgctgtcctcttcct

SEQ ID NO: 35778 - DNA, 251 bp, Homo sapiens
ttctttttaagaatatagaagtgaaaatacagagccccagatatcaagaacagacattaattcaaagaatttattatagggtagggctgataatcaactatcctataaaaatcatattattgcataaaaactaaattatttttctttctacacatcctgaattcaatttacagataatcagcatgtatttctctctcttaaaactgctctgttatctctagagaaataatttaagaatgtattcctataat

SEQ ID NO: 35779 - DNA, 243 bp, Homo sapiens
gagcttgaaaatacatgccttagtacttcattaacttcctcagagatcatcaggaaggtaaatcttaggatcaaagtgggtttcaagatcatctaatccaagactctcaattcacaagtgatgaaaccgaggcccgggagactcaaacattttacaaccaaaatgtctgccatctgtacctatcccaaggtcccttgttagcagcagataaatgaggcttgtccaacccagttctcctgactg

SEQ ID NO: 35780 - DNA, 398 bp, Homo sapiens
gtttctactgacttgtaaagagagcaaaatctgctgaaatattttgttaaacttttaatgccaaccttgaaaaggaacatattaaccagttaccctgtgataagaggatgacttgccatttttcttagaatctagtaggcagtcttgtggccctgaaacatgtgggggtggctttttgctaaattgactgtacctctttcaatgggaaggagctatggaaaggaccatgtagcttataaacgcattaggaccttaaattaagttgttgaaccacgagcatgacagtctttaacaaactaagcagtgatcttgtaaatcttctcatactgcctcataccctctcatctaggtcactagaaaaatacttttaaatgtatccttaacacaataaaaacaaa

SEQ ID NO: 35781 - DNA, 391 bp, Homo sapiens
gagcattacttgtgtacaagcctgtatgggtccagcattttccgatgaaaacaagatccacccagcgggagcttctgctgggccagaccaactccaggtagctccctgctgggcagtggctggtgccaaaacagggcacacggctggagcaggtctccctgtatggggttatctgccagagcacagagctgcagaaccggccagcagcaggccaaggcctcggtgacaagctgcccccagcagctcctgcctccagcctccaggcccggcggagtcagctgccgcacctggtacttcatttacagatggaagctggcatctctcagaggtcttcagcctctggaaacaggcccaggggactgaccgaccctcagcatttgatgttggcaac

SEQ ID NO: 35782 - DNA, 621 bp, Homo sapiens
tcatttttaaaaaaattgtttaatgaaaaaaaaattaacttacatttttcttaaaagtaacaatttaatgatatgtattttctgtgaacattcaagaaatagaaatcaccaagaaaaaaataaataaaataatttgttattctgccattcagatctaaacaatgttattttggtgcttaaatcttcagaggttttttcgtatattcacttcaaatattatttaccaacaatggaagtttatttatttatttatgtttgtttgttttttttgagacatagtctcactctgtggcccaggctggagtgcaatggcgtgatctctgctcactgcaacctctgcctcccaggttcaagcaattttcctgccttagtctctcgagtagctgggattacaggtgcctaccatcatgcccagctaatttttatatttttagtagagacagggtttcgccgtgttggccaggctggtctcgaactcctggccgcaagcaatctgcctgcctcggcctcccaaactgctgggattacagacgtgagccactgtgcccagcctgtatttgtatatatgcagttttgtaacttacttcttccacttacaaaatgataaattttccatgtcat

SEQ ID NO: 35783 - DNA, 554 bp, Homo sapiens
actcagaggttgaaagagggagcaaaggcgaatgggggccacaagtgtggagtttaagtgaccaccatcctgagcacatatcagctgtgctcctccaccatggaagtcagttcctggctacacccctcatgggaaggtgggtctccaggcctccctcaagtgcaaggtgagttgaaacatctgtagctgcttaccttttggtgccactaggatctgagtagcaaatattctttttaaaaatgtgggggaggatctacaaagtcaaagtcagctgtattaataatcctgtagccagcaggtctcaaagaaatatttctggaaaggatagggaagctgatgtcagggcggggcagtcctcagagcagtgagtctaagtggatattgcttggctgaggctataggttaaggggcagccttatcacctgggaacatctgcagatgaactaaagccaggaggatgcctaaacccaggggctaggagcagagaagagatgaggaaacaggagaggaggcaaagggaatttttcagttaaatcagtcagggaatcatagtg

SEQ ID NO: 35784 - DNA, 846 bp, Homo sapiens
tactgacttgtaatgccacttattgtcatgtattagtgatccattataaacaaatgtcctgagttttctattctgttccatcggtatatatgtttatatgtctatactatactatcttgagtattaaattgaaagtaaatttttatatccagtagggaaagatccctgttgttcttcaaaattgtttttgctattcttgatattttgctctttaatatggactttaaatcagcctaactccaaccaaaaccagacagaggtaaagagaccagagctcccttatttccaccgtgtaaggatacaaggataagatagctgttgtaaaccaggaagagaacctttaccaagaaccaatcatgctggcaccctgatcttggacttccaggcctcagaactgtgagaaataaatgtttgttgtttaagccacccagcctctgggattgttatagcagaaggttctttgatagctatgcatcacccttttatcagattgaaagttctcttttttttctcgagttttctgactttacttggtttgacaggattagataaggagttggataagagagagaaggtgaagaagaggggaattttaaatgaccaccaagtttctggactagtgagtagatgaatggagatgtcattcaccaaaattttgaatggaataagaaaaacagatttatgagggaggactggttaaatttgaggtattggtgggacattcaaataaagatatcctataaaatcgtgctgtccaatatagtaccctcctcacatgtggctattcagcatttgaaatgtggctagtccgactgggcagggtggcttatgcctgtaatcccagca

SEQ ID NO: 35785 - DNA, 430 bp, Homo sapiens
aaacaaaactgatcaaaggttaataattcattgaaaattatttggaagcatctatatgtgggtgatctttttcttactggggactgttgattggagtttcaataggtcactctcatgagtttcaatacagccactccttaccttataaattgataggctggattgagctgaaacattctagcactttgagaggctgaggtgggcagattgcttgagccgggatattgtgaccagcctgggcaacatggtgaaacctcgtctcataataatacaaatattagcagggcatggtggcatgtacctacctgtagtcccagctgcttgggaagctgaggtaggaaaatcatctgagccccataggtagaggctgaagtgagctgagatcatgccactgcactccagcggggcactggagtgagatcctatctca

SEQ ID NO: 35786 - DNA, 598 bp, Homo sapiens
atggacttggatgagccaaggaggaaatcctgcagatggcccaataagtggattatgtttgacttcagataagtaggacaagctagggagccagaaggttttattagttttgtttcactttccacaaaaccaccaaggtcccatctccaacagaacaggatgtgtgactgttccttgagtaaaaaaacaggaaactggacaaatcttgagagatcatcattaattagtacttctttagttgatttcttaatatggaggagcatgtagattattaataatgcttttgttcttgagttaagtgaaggagtcttaggtatttgttgactcattaaataaatcaccaacatgtagtagactcaaataagaaacataaaagtgatatacatttagataaatgattatagtgctttatgcttgtagtgcttcatgaatcgatagtatgattaatccaattgtgctcgtagtgttctttacaacaataactaagtttaaaatagaggaaacaatctcaactctcattaggatgattgagggataggggaaatgcctgtcacgttcatgtcaagtaggatttatcccctcacccctgttgctataa

SEQ ID NO: 35787 - DNA, 2263 bp, Homo sapiens
aagggcgcgagggcaggccgggctaacgtctgctcctgcgccgccgtcccacgggcatcccccccgtgtgtgcccagttgttcccgaagctttaggatccaagacgctgggggcaaccattttccttgcccgccgccccctcacgcttccctgcctctcctcctagcctggtcacgggctgtcccctcctccagcaatgcaaccctataataaacaagtctttccttgatcctcccctgccgcgagcgccctcggggaccttggcagctgcagccgccgcggatcctttccagaaagggggcgtggcggtgggtcggggttcgactgcgagctttctggggctcaatggaggcggggcccggccgctgtcaccgggcaggagagaacgttgcttacgtgcgcccggagtccattggccaaggcgggccacactcccgggtctggattgggtcgtggcgcagagaaggcgtggcctcgccgcgctagtccttataggctgctccgcgctggtgctagggggcagcaggccaagggggaggtgcgagcgtggacctgggacgggtctgggcggctctcggtggttggcacgggttcgcacacccattcaagcggcaggacgcacttgtcttagcagttctcgctgaccgcgctagctgcggcttctacgctccggcactctgagttcatcagcaaacgccctggcgtctgtcctcaccatgcctagcctttgggaccgcttctcgtcgtcgtccacctcctcttcgccctcgtccttgccccgaactcccaccccagatcggccgccgcgctcagcctgggggtcggcgacccgggaggaggggtttgaccgctccacgagcctggagagctcggactgcgagtccctggacagcagcaacagtggcttcgggccggaggaagacacggcttacctggatggggtgtcgttgcccgacttcgagctgctcagtgaccctgaggatgaacacttgtgtgccaacctgatgcagctgctgcaggagagcctggcccaggcgcggctgggctctcgacgccctgcgcgcctgctgatgcctagccagttggtaagccaggtgggcaaagaactactgcgcctggcctacagcgagccgtgcggcctgcggggggcgctgctggacgtctgcgtggagcagggcaagagctgccacagcgtgggccagctggcactcgaccccagcctggtgcccaccttccagctgaccctcgtgctgcgcctggactcacgactctggcccaagatccaggggctgtttagctccgccaactctcccttcctccctggcttcagccagtccctgacgctgagcactggcttccgagtcatcaagaagaagctgtacagctcggaacagctgctcattgaggagtgttgaacttcaacctgagggggccgacagtgccctccaagacagagacgactgaacttttggggtggagactagaggcaggagctgagggactgattcctgtggttggaaaactgaggcagccacctaaggtggaggtgggggaatagtgtttcccaggaagctcattgagttgtgtgcgggtggctgtgcattggggacacatacccctcagtactgtagcatgaaacaaaggcttaggggccaacaaggcttccagctggatgtgtgtgtagcatgtaccttattatttttgttactgacagttaacagtggtgtgacatccagagagcagctgggctgctcccgccccagcccggcccagggtgaaggaagaggcacgtgctcctcagagcagccggagggaggggggaggtcggaggtcgtggaggtggtttgtgtatcttactggtctgaagggaccaagtgtgtttgttgtttgttttgtatcttgtttttctgatcggagcatcactactgacctgttgtaggcagctatcttacagacgcatgaatgtaagagtaggaaggggtgggtgtcagggatcacttgggatctttgacacttgaaaaattacacctggcagctgcgtttaagccttcccccatcgtgtactgcagagttgagctggcaggggaggggctgagagggtgggggctggaacccctccccgggaggagtgccatctgggtcttccatctagaactgtttacatgaagataagatactcactgttcatgaatacacttgatgttcaagtattaagacctatgcaatattttttacttttctaataaacatgtttgttaaaaca

SEQ ID NO: 35788 - DNA, 1165 bp, Homo sapiens
  misc_feature (1141)..(1141): n is a, c, g, or t
aagggcgcgagggcaggccgggctaacgtctgctcctgcgccgccgtcccacgggcatcccccccgtgtgtgcccagttgttcccgaagctttaggatccaagacgctgggggcaaccattttccttgcccgccgccccctcacgcttccctgcctctcctcctagcctggtcacgggctgtcccctcctccagcaatgcaaccctataataaacaagtctttccttgatcctcccctgccgcgagcgccctcggggaccttggcagctgcagccgccgcggatcctttccagaaagggggcgtggcggtgggtcggggttcgactgcgagctttctggggctcaatggaggcggggcccggccgctgtcaccgggcaggagagaacgttgcttacgtgcgcccggagtccattggccaaggcgggccacactcccgggtctggattgggtcgtggcgcagagaaggcgtggcctcgccgcgctagtccttataggctgctccgcgctggtgctagggggcagcaggccaagggggaggtgcgagcgtggacctgggacgggtctgggcggctctcggtggttggcacgggttcgcacacccattcaagcggcaggacgcacttgtcttagcagttctcgctgaccgcgctagctgcggcttctacgctccggcactctgagttcatcagcaaacgccctggcgtctgtcctcaccatgcctagcctttgggaccgcttctcgtcgtcgtccacctcctcttcgccctcgtccttgccccgaactcccaccccagatcggccgccgcgctcagcctgggggtcggcgacccgggaggaggggtttgaccgctccacgagcctggagagctcggactgcgagtccctggacagcagcaacagtggcttcgggccggaggaagacacggcttacctggatggggtgtcgttgcccgacttcgagctgctcagtgaccctgaggatgaacacttgtgtgccaacctgatgcagctgctgcaggagagcctggcccaggcgcggctgggctctcgacgccctgcgcgcctgctgatgcctagccagagtggcaaaaatatggctggctaaacgagcgtcgctcgggggtgtgagttcgtgacagnaaagtcaactggcactgatcacca

SEQ ID NO: 35789 - DNA, 884 bp, Homo sapiens
aagggcgcgagggcaggccgggctaacgtctgctcctgcgccgccgtcccacgggcatcccccccgtgtgtgcccagttgttcccgaagctttaggatccaagacgctgggggcaaccattttccttgcccgccgccccctcacgcttccctgcctctcctcctagcctggtcacgggctgtcccctcctccagcaatgcaaccctataataaacaagtctttccttgatcctcccctgccgcgagcgccctcggggaccttggcagctgcagccgccgcggatcctttccagaaagggggcgtggcggtgggtcggggttcgactgcgagctttctggggctcaatggaggcggggcccggccgctgtcaccgggcaggagagaacgttgcttacgtgcgcccggagtccattggccaaggcgggccacactcccgggtctggattgggtcgtggcgcagagaaggcgtggcctcgccgcgctagtccttataggctgctccgcgctggtgctagggggcagcaggccaagggggaggtgcgagcgtggacctgggacgggtctgggcggctctcggtggttggcacgggttcgcacacccattcaagcggcaggacgcacttgtcttagcagttctcgctgaccgcgctagctgggtgagtgtcccttctgtgtgtgggtcctagagctcgcggtctggtctggtctggtccccagactgacgcctggtcggtccccctcttgtcttacacggcttctacgctccggcactctgagttcatcagcaaacgccctggcgtctgtcctcaccatgcctagcctttgggaccgcttctcgtcgtcgtccacctcctggcctgagatgggatcctctagacaccat

SEQ ID NO: 35790 - DNA, 244 bp, Homo sapiens
gcggtccgactcttcacgccggactactgacctgttgtaggcagctatcttacagacgcatgaatgtaagagtaggaaggggtgggtgtcagggatcacttgggatctttgacacttgaaaaattacacctggcagctgcgttggatgcagtcactaggcggctttggatgcagtcactaggcggctttggatgcagtcactaggcggcgtttgatgcagtcactaggcggcgttggatgcagt

SEQ ID NO: 35791 - DNA, 2355 bp, Homo sapiens
aagggcgcgagggcaggccgggctaacgtctgctcctgcgccgccgtcccacgggcatcccccccgtgtgtgcccagttgttcccgaagctttaggatccaagacgctgggggcaaccattttccttgcccgccgccccctcacgcttccctgcctctcctcctagcctggtcacgggctgtcccctcctccagcaatgcaaccctataataaacaagtctttccttgatcctcccctgccgcgagcgccctcggggaccttggcagctgcagccgccgcggatcctttccagaaagggggcgtggcggtgggtcggggttcgactgcgagctttctggggctcaatggaggcggggcccggccgctgtcaccgggcaggagagaacgttgcttacgtgcgcccggagtccattggccaaggcgggccacactcccgggtctggattgggtcgtggcgcagagaaggcgtggcctcgccgcgctagtccttataggctgctccgcgctggtgctagggggcagcaggccaagggggaggtgcgagcgtggacctgggacgggtctgggcggctctcggtggttggcacgggttcgcacacccattcaagcggcaggacgcacttgtcttagcagttctcgctgaccgcgctagctgcggcttctacgctccggcactctgagttcatcagcaaacgccctggcgtctgtcctcaccatgcctagcctttgggaccgcttctcgtcgtcgtccacctcctcttcgccctcgtccttgccccgaactcccaccccagatcggccgccgcgctcagcctgggggtcggcgacccgggaggaggggtttgaccgctccacgagcctggagagctcggactgcgagtccctggacagcagcaacagtggcttcgggccggaggaagacacggcttacctggatggggtgtcgttgcccgacttcgagctgctcagtgaccctgaggatgaacacttgtgtgccaacctgatgcagctgctgcaggagagcctggcccaggcgcggctgggctctcgacgccctgcgcgcctgctgatgcctagccagttggtaagccaggtgggcaaagaactactgcgcctggcctacagcgagccgtgcggcctgcggggggcgctgctggacgtctgcgtggagcagggcaagagctgccacagcgtgggccagctggcactcgaccccagcctggtgcccaccttccagctgaccctcgtgctgcgcctggactcacgactctggcccaagatccaggggctgtttagctccgccaactctcccttcctccctggcttcagccagtccctgacgctgagcactggcttccgagtcatcaagaagaagctgtacagctcggaacagctgctcattgaggagtgttgaacttcaacctgagggggccgacagtgccctccaagacagagacgactgaacttttggggtggagactagaggcaggagctgagggactgattcctgtggttggaaaactgaggcagccacctaaggtggaggtgggggaatagtgtttcccaggaagctcattgagttgtgtgcgggtggctgtgcattggggacacatacccctcagtactgtagcatgaaacaaaggcttaggggccaacaaggcttccagctggatgtgtgtgtagcatgtaccttattatttttgttactgacagttaacagtggtgtgacatccagagagcagctgggctgctcccgccccagcccggcccagggtgaaggaagaggcacgtgctcctcagagcagccggagggaggggggaggtcggaggtcgtggaggtggtttgtgtatcttactggtctgaagggaccaagtgtgtttgttgtttgttttgtatcttgtttttctgatcggagcatcactactgacctgttgtaggcagctatcttacagacgcatgaatgtaagagtaggaaggggtgggtgtcagggatcacttgggatctttgacacttgaaaaattacacctggcagctgcgtttaagccttcccccatcgtgtactgcagagttgagctggcaggggaggggctgagagggtgggggctggaacccctccccgggaggagtgccatctgggtcttccatctagaactgtttacatgaagataagatactcactgttcatgaatacacttgatgttcaagtattaagacctatgcaatattttttacttttctaataaacatgtttgttaaaacaaaaaaacaaaacaaacaaaacaacacaaacacacaaacacacaaaacaacaaaaaacaccaaacaacaaaaaaacacacaaacaaaaaagaa

SEQ ID NO: 35792 - DNA, 2229 bp, Homo sapiens
aagggcgcgagggcaggccgggctaacgtctgctcctgcgccgccgtcccacgggcatcccccccgtgtgtgcccagttgttcccgaagctttaggatccaagacgctgggggcaaccattttccttgcccgccgccccctcacgcttccctgcctctcctcctagcctggtcacgggctgtcccctcctccagcaatgcaaccctataataaacaagtctttccttgatcctcccctgccgcgagcgccctcggggaccttggcagctgcagccgccgcggatcctttccagaaagggggcgtggcggtgggtcggggttcgactgcgagctttctggggctcaatggaggcggggcccggccgctgtcaccgggcaggagagaacgttgcttacgtgcgcccggagtccattggccaaggcgggccacactcccgggtctggattgggtcgtggcgcagagaaggcgtggcctcgccgcgctagtccttataggctgctccgcgctggtgctagggggcagcaggccaagggggaggtgcgagcgtggacctgggacgggtctgggcggctctcggtggttggcacgggttcgcacacccattcaagcggcaggacgcacttgtcttagcagttctcgctgaccgcgctagctgcggcttctacgctccggcactctgagttcatcagcaaacgccctggcgtctgtcctcaccatgcctagcctttgggaccgcttctcgtcgtcgtccacctcctcttcgccctcgtccttgccccgaactcccaccccagatcggccgccgcgctcagcctgggggtcggcgacccgggaggaggggtttgaccgctccacgagcctggagagctcggactgcgagtccctggacagcagcaacagtggcttcgggccggaggaagacacggcttacctggatggggtgtcgttgcccgacttcgagctgctcagtgaccctgaggatgaacacttgtgtgccaacctgatgcagctgctgcaggagagcctggcccaggcgcggctgggctctcgacgccctgcgcgcctgctgatgcctagccagttggtaagccaggtgggcaaagaactactgcgcctggcctacagcgagccgtgcggcctgcggggggcgctgctggacgtctgcgtggagcagggcaagagctgccacagcgtgggccagctggcactcgaccccagcctggtgcccaccttccagctgaccctcgtgctgcgcctggactcacgactctggcccaagatccaggggctgtttagctccgccaactctcccttcctccctggcttcagccagtccctgacgctgagcactggcttccgagtcatcaagaagaagctgtacagctcggaacagctgctcattgaggagtgttgaacttcaacctgagggggccgacagtgccctccaagacagagacgactgaacttttggggtggagactagaggcaggagctgagggactgattcctgtggttggaaaactgaggcagccacctaaggtggaggtgggggaatagtgtttcccaggaagctcattgagttgtgtgcgggtggctgtgcattggggacacatacccctcagtactgtagcatgaaacaaaggcttaggggccaacaaggcttccagctggatgtgtgtgtagcatgtaccttattatttttgttactgacagttaacagtggtgtgacatccagagagcagctgggctgctcccgccccagcccggcccagggtgaaggaagaggcacgtgctcctcagagcagccggagggaggggggaggtcggaggtcgtggaggtggtttgtgtatcttactggtctgaagggaccaagtgtgtttgttgtttgttttgtatcttgtttttctgatcggagcatcactactgacctgttgtaggcagctatcttacagacgcatgaatgtaagagtaggaaggggtgggtgtcagggatcacttgggatctttgacacttgaaaaattacacctggcagctgcgtttaagccttcccccatcgtgtactgcagagttgagctggcaggggaggggctgagagggtgggggctggaacccctccccgggaggagtgccatctgggtcttccatctagaactgtttacatgaagataagatactcactgttcatgaacacgccgcgggtggatcctcaagagtcagctatgagcg

SEQ ID NO: 35793 - DNA, 2046 bp, Homo sapiens
aagggcgcgagggcaggccgggctaacgtctgctcctgcgccgccgtcccacgggcatcccccccgtgtgtgcccagttgttcccgaagctttaggatccaagacgctgggggcaaccattttccttgcccgccgccccctcacgcttccctgcctctcctcctagcctggtcacgggctgtcccctcctccagcaatgcaaccctataataaacaagtctttccttgatcctcccctgccgcgagcgccctcggggaccttggcagctgcagccgccgcggatcctttccagaaagggggcgtggcggtgggtcggggttcgactgcgagctttctggggctcaatggaggcggggcccggccgctgtcaccgggcaggagagaacgttgcttacgtgcgcccggagtccattggccaaggcgggccacactcccgggtctggattgggtcgtggcgcagagaaggcgtggcctcgccgcgctagtccttataggctgctccgcgctggtgctagggggcagcaggccaagggggaggtgcgagcgtggacctgggacgggtctgggcggctctcggtggttggcacgggttcgcacacccattcaagcggcaggacgcacttgtcttagcagttctcgctgaccgcgctagctgcggcttctacgctccggcactctgagttcatcagcaaacgccctggcgtctgtcctcaccatgcctagcctttgggaccgcttctcgtcgtcgtccacctcctcttcgccctcgtccttgccccgaactcccaccccagatcggccgccgcgctcagcctgggggtcggcgacccgggaggaggggtttgaccgctccacgagcctggagagctcggactgcgagtccctggacagcagcaacagtggcttcgggccggaggaagacacggcttacctggatggggtgtcgttgcccgacttcgagctgctcagtgaccctgaggatgaacacttgtgtgccaacctgatgcagctgctgcaggagagcctggcccaggcgcggctgggctctcgacgccctgcgcgcctgctgatgcctagccagttggtaagccaggtgggcaaagaactactgcgcctggcctacagcgagccgtgcggcctgcggggggcgctgctggacgtctgcgtggagcagggcaagagctgccacagcgtgggccagctggcactcgaccccagcctggtgcccaccttccagctgaccctcgtgctgcgcctggactcacgactctggcccaagatccaggggctgtttagctccgccaactctcccttcctccctggcttcagccagtccctgacgctgagcactggcttccgagtcatcaagaagaagctgtacagctcggaacagctgctcattgaggagtgttgaacttcaacctgagggggccgacagtgccctccaagacagagacgactgaacttttggggtggagactagaggcaggagctgagggactgattcctgtggttggaaaactgaggcagccacctaaggtggaggtgggggaatagtgtttcccaggaagctcattgagttgtgtgcgggtggctgtgcattggggacacatacccctcagtactgtagcatgaaacaaaggcttaggggccaacaaggcttccagctggatgtgtgtgtagcatgtaccttattatttttgttactgacactgttgtaggcagctatcttacagacgcatgaatgtaagagtaggaaggggtgggtgtcagggatcacttgggatctttgacacttgaaaaattacacctggcagctgcgtttaagccttcccccatcgtgtactgcagagttgagctggcaggggaggggctgagagggtgggggctggaacccctccccgggaggagtgccatctgggtcttccatctagaactgtttacatgaagataagatactcactgttcatgaatacacttgatgttcaagtattaagacctatgcaatattttttacttttctaataaacatgtttgttaaaaca

SEQ ID NO: 35794 - DNA, 2359 bp, Homo sapiens
aagggcgcgagggcaggccgggctaacgtctgctcctgcgccgccgtcccacgggcatcccccccgtgtgtgcccagttgttcccgaagctttaggatccaagacgctgggggcaaccattttccttgcccgccgccccctcacgcttccctgcctctcctcctagcctggtcacgggctgtcccctcctccagcaatgcaaccctataataaacaagtctttccttgatcctcccctgccgcgagcgccctcggggaccttggcagctgcagccgccgcggatcctttccagaaagggggcgtggcggtgggtcggggttcgactgcgagctttctggggctcaatggaggcggggcccggccgctgtcaccgggcaggagagaacgttgcttacgtgcgcccggagtccattggccaaggcgggccacactcccgggtctggattgggtcgtggcgcagagaaggcgtggcctcgccgcgctagtccttataggctgctccgcgctggtgctagggggcagcaggccaagggggaggtgcgagcgtggacctgggacgggtctgggcggctctcggtggttggcacgggttcgcacacccattcaagcggcaggacgcacttgtcttagcagttctcgctgaccgcgctagctgggtgagtgtcccttctgtgtgtgggtcctagagctcgcggtctggtctggtctggtccccagactgacgcctggtcggtccccctcttgtcttacacggcttctacgctccggcactctgagttcatcagcaaacgccctggcgtctgtcctcaccatgcctagcctttgggaccgcttctcgtcgtcgtccacctcctcttcgccctcgtccttgccccgaactcccaccccagatcggccgccgcgctcagcctgggggtcggcgacccgggaggaggggtttgaccgctccacgagcctggagagctcggactgcgagtccctggacagcagcaacagtggcttcgggccggaggaagacacggcttacctggatggggtgtcgttgcccgacttcgagctgctcagtgaccctgaggatgaacacttgtgtgccaacctgatgcagctgctgcaggagagcctggcccaggcgcggctgggctctcgacgccctgcgcgcctgctgatgcctagccagttggtaagccaggtgggcaaagaactactgcgcctggcctacagcgagccgtgcggcctgcggggggcgctgctggacgtctgcgtggagcagggcaagagctgccacagcgtgggccagctggcactcgaccccagcctggtgcccaccttccagctgaccctcgtgctgcgcctggactcacgactctggcccaagatccaggggctgtttagctccgccaactctcccttcctccctggcttcagccagtccctgacgctgagcactggcttccgagtcatcaagaagaagctgtacagctcggaacagctgctcattgaggagtgttgaacttcaacctgagggggccgacagtgccctccaagacagagacgactgaacttttggggtggagactagaggcaggagctgagggactgattcctgtggttggaaaactgaggcagccacctaaggtggaggtgggggaatagtgtttcccaggaagctcattgagttgtgtgcgggtggctgtgcattggggacacatacccctcagtactgtagcatgaaacaaaggcttaggggccaacaaggcttccagctggatgtgtgtgtagcatgtaccttattatttttgttactgacagttaacagtggtgtgacatccagagagcagctgggctgctcccgccccagcccggcccagggtgaaggaagaggcacgtgctcctcagagcagccggagggaggggggaggtcggaggtcgtggaggtggtttgtgtatcttactggtctgaagggaccaagtgtgtttgttgtttgttttgtatcttgtttttctgatcggagcatcactactgacctgttgtaggcagctatcttacagacgcatgaatgtaagagtaggaaggggtgggtgtcagggatcacttgggatctttgacacttgaaaaattacacctggcagctgcgtttaagccttcccccatcgtgtactgcagagttgagctggcaggggaggggctgagagggtgggggctggaacccctccccgggaggagtgccatctgggtcttccatctagaactgtttacatgaagataagatactcactgttcatgaatacacttgatgttcaagtattaagacctatgcaatattttttacttttctaataaacatgtttgttaaaaca

SEQ ID NO: 35795 - DNA, 1655 bp, Homo sapiens
ctccggcacccttggtttctttaagcgtttcgctgaccgcgctagctgcggcttctacgctccggcactctgagttcatcagcaaacgccctggcgtctgtcctcaccatgcctagcctttgggaccgcttctcgtcgtcgtccacctcctcttcgccctcgtccttgccccgaactcccaccccagatcggccgccgcgctcagcctgggggtcggcgacccgggaggaggggtttgaccgctccacgagcctggagagctcggactgcgagtccctggacagcagcaacagtggcttcgggccggaggaagacacggcttacctggatggggtgtcgttgcccgacttcgagctgctcagtgaccctgaggatgaacacttgtgtgccaacctgatgcagctgctgcaggagagcctggcccaggcgcggctgggctctcgacgccctgcgcgcctgctgatgcctagccagttggtaagccaggtgggcaaagaactactgcgcctggcctacagcgagccgtgcggcctgcggggggcgctgctggacgtctgcgtggagcagggcaagagctgccacagcgtgggccagctggcactcgaccccagcctggtgcccaccttccagctgaccctcgtgctgcgcctggactcacgactctggcccaagatccaggggctgtttagctccgccaactctcccttcctccctggcttcagccagtccctgacgctgagcactggcttccgagtcatcaagaagaagctgtacagctcggaacagctgctcattgaggagtgttgaacttcaacctgagggggccgacagtgccctccaagacagagacgactgaacttttggggtggagactagaggcaggagctgagggactgattcctgtggttggaaaactgaggcagccacctaaggtggaggtgggggaatagtgtttcccaggaagctcattgagttgtgtgcgggtggctgtgcattggggacacatacccctcagtactgtagcatgaaacaaaggcttaggggccaacaaggcttccagctggatgtgtgtgtagcatgtaccttattatttttgttactgacagttaacagtggtgtgacatccagagagcagctgggctgctcccgccccagcccggcccagggtgaaggaagaggcacgtgctcctcagagcagccggagggaggggggaggtcggaggtcgtggaggtggtttgtgtatcttactggtctgaagggaccaagtgtgtttgttgtttgttttgtatcttgtttttctgatcggagcatcactactgacctgttgtaggcagctatcttacagacgcatgaatgtaagagtaggaaggggtgggtgtcagggatcacttgggatctttgacacttgaaaaattacacctggcagctgcgtttaagccttcccccatcgtgtactgcagagttgagctggcaggggaggggctgagagggtgggggctggaacccctccccgggaggagtgccatctgggtcttccatctagaactgtttacatgaagataagatactcactgttcatgaatacacttgatgttcaagtattaagacctatgcaatattttttacttttctaataaacatgtttgttaaaaca

SEQ ID NO: 35796 - DNA, 1696 bp, Homo sapiens
ctcggtcctgatgcaaccgtctggatcttttacacaaagcgctaggcgagcgctgggtgctaggacccggggggcgcccgggcagggagcggcttctacgctccggcactctgagttcatcagcaaacgccctggcgtctgtcctcaccatgcctagcctttgggaccgcttctcgtcgtcgtccacctcctcttcgccctcgtccttgccccgaactcccaccccagatcggccgccgcgctcagcctgggggtcggcgacccgggaggaggggtttgaccgctccacgagcctggagagctcggactgcgagtccctggacagcagcaacagtggcttcgggccggaggaagacacggcttacctggatggggtgtcgttgcccgacttcgagctgctcagtgaccctgaggatgaacacttgtgtgccaacctgatgcagctgctgcaggagagcctggcccaggcgcggctgggctctcgacgccctgcgcgcctgctgatgcctagccagttggtaagccaggtgggcaaagaactactgcgcctggcctacagcgagccgtgcggcctgcggggggcgctgctggacgtctgcgtggagcagggcaagagctgccacagcgtgggccagctggcactcgaccccagcctggtgcccaccttccagctgaccctcgtgctgcgcctggactcacgactctggcccaagatccaggggctgtttagctccgccaactctcccttcctccctggcttcagccagtccctgacgctgagcactggcttccgagtcatcaagaagaagctgtacagctcggaacagctgctcattgaggagtgttgaacttcaacctgagggggccgacagtgccctccaagacagagacgactgaacttttggggtggagactagaggcaggagctgagggactgattcctgtggttggaaaactgaggcagccacctaaggtggaggtgggggaatagtgtttcccaggaagctcattgagttgtgtgcgggtggctgtgcattggggacacatacccctcagtactgtagcatgaaacaaaggcttaggggccaacaaggcttccagctggatgtgtgtgtagcatgtaccttattatttttgttactgacagttaacagtggtgtgacatccagagagcagctgggctgctcccgccccagcccggcccagggtgaaggaagaggcacgtgctcctcagagcagccggagggaggggggaggtcggaggtcgtggaggtggtttgtgtatcttactggtctgaagggaccaagtgtgtttgttgtttgttttgtatcttgtttttctgatcggagcatcactactgacctgttgtaggcagctatcttacagacgcatgaatgtaagagtaggaaggggtgggtgtcagggatcacttgggatctttgacacttgaaaaattacacctggcagctgcgtttaagccttcccccatcgtgtactgcagagttgagctggcaggggaggggctgagagggtgggggctggaacccctccccgggaggagtgccatctgggtcttccatctagaactgtttacatgaagataagatactcactgttcatgaatacacttgatgttcaagtattaagacctatgcaatattttttacttttctaataaacatgtttgttaaaaca

SEQ ID NO: 35797 - DNA, 1805 bp, Homo sapiens
gatctaaggatcccctgggctcagtgattcttcgccctcgtccttgccccgaactcccaccccagatcggccgccgcgctcagcctgggggtcggcgacccgggaggaggggtttgaccgctccacgagcctggagagctcggactgcgagtccctggacagcagcaacagtggcttcgggccggaggaggtgagcggtgggcgggtgccgacgcgactcgaggggccgggaaggtggggaagccccggtgctggaaggggtcagagccgccttggcttcctatcccatcgggacccagattgcttgggggcagggggaattggagtataaggtgagtgaggcggaaactgaggcacggagtgggaaggagcgttggtttcttaaggaaacagcacctcccccgcctgtgcgtttcgttttgaagccgctctaataccccttcctgtgtgctctcctttccagacacggcttacctggatggggtgtcgttgcccgacttcgagctgctcagtgaccctgaggatgaacacttgtgtgccaacctgatgcagctgctgcaggagagcctggcccaggcgcggctgggctctcgacgccctgcgcgcctgctgatgcctagccagttggtaagccaggtgggcaaagaactactgcgcctggcctacagcgagccgtgcggcctgcggggggcgctgctggacgtctgcgtggagcagggcaagagctgccacagcgtgggccagctggcactcgaccccagcctggtgcccaccttccagctgaccctcgtgctgcgcctggactcacgactctggcccaagatccaggggctgtttagctccgccaactctcccttcctccctggcttcagccagtccctgacgctgagcactggcttccgagtcatcaagaagaagctgtacagctcggaacagctgctcattgaggagtgttgaacttcaacctgagggggccgacagtgccctccaagacagagacgactgaacttttggggtggagactagaggcaggagctgagggactgattcctgtggttggaaaactgaggcagccacctaaggtggaggtgggggaatagtgtttcccaggaagctcattgagttgtgtgcgggtggctgtgcattggggacacatacccctcagtactgtagcatgaaacaaaggcttaggggccaacaaggcttccagctggatgtgtgtgtagcatgtaccttattatttttgttactgacagttaacagtggtgtgacatccagagagcagctgggctgctcccgccccagcccggcccagggtgaaggaagaggcacgtgctcctcagagcagccggagggaggggggaggtcggaggtcgtggaggtggtttgtgtatcttactggtctgaagggaccaagtgtgtttgttgtttgttttgtatcttgtttttctgatcggagcatcactactgacctgttgtaggcagctatcttacagacgcatgaatgtaagagtaggaaggggtgggtgtcagggatcacttgggatctttgacacttgaaaaattacacctggcagctgcgtttaagccttcccccatcgtgtactgcagagttgagctggcaggggaggggctgagagggtgggggctggaacccctccccgggaggagtgccatctgggtcttccatctagaactgtttacatgaagataagatactcactgttcatgaatacacttgatgttcaagtattaagacctatgcaatattttttacttttctaataaacatgtttgttaaaaca

SEQ ID NO: 35798 - DNA, 1982 bp, Homo sapiens
aagggcgcgagggcaggccgggctaacgtctgctcctgcgccgccgtcccacgggcatcccccccgtgtgtgcccagttgttcccgaagctttaggatccaagacgctgggggcaaccattttccttgcccgccgccccctcacgcttccctgcctctcctcctagcctggtcacgggctgtcccctcctccagcaatgcaaccctataataaacaagtctttccttgatcctcccctgccgcgagcgccctcggggaccttggcagctgcagccgccgcggatcctttccagaaagggggcgtggcggtgggtcggggttcgactgcgagctttctggggctcaatggaggcggggcccggccgctgtcaccgggcaggagagaacgttgcttacgtgcgcccggagtccattggccaaggcgggccacactcccgggtctggattgggtcgtggcgcagagaaggcgtggcctcgccgcgctagtccttataggctgctccgcgctggtgctagggggcagcaggccaagggggaggtgcgagcgtggacctgggacgggtctgggcggctctcggtggttggcacgggttcgcacacccattcaagcggcaggacgcacttgtcttagcagttctcgctgaccgcgctagctgcggcttctacgctccggcactctgagttcatcagcaaacgccctggcgtctgtcctcaccatgcctagcctttgggaccgcttctcgtcgtcgtccacctcctcttcgccctcgtccttgccccgaactcccaccccagatcggccgccgcgctcagcctgggggtcggcgacccgggaggaggggtttgaccgctccacgagcctggagagctcggactgcgagtccctggacagcagcaacagtggcttcgggccggaggaagacacggcttacctggatggggtgtcgttgcccgacttcgagctgctcagtgaccctgaggtcacgactctggcccaagatccaggggctgtttagctccgccaactctcccttcctccctggcttcagccagtccctgacgctgagcactggcttccgagtcatcaagaagaagctgtacagctcggaacagctgctcattgaggagtgttgaacttcaacctgagggggccgacagtgccctccaagacagagacgactgaacttttggggtggagactagaggcaggagctgagggactgattcctgtggttggaaaactgaggcagccacctaaggtggaggtgggggaatagtgtttcccaggaagctcattgagttgtgtgcgggtggctgtgcattggggacacatacccctcagtactgtagcatgaaacaaaggcttaggggccaacaaggcttccagctggatgtgtgtgtagcatgtaccttattatttttgttactgacagttaacagtggtgtgacatccagagagcagctgggctgctcccgccccagcccggcccagggtgaaggaagaggcacgtgctcctcagagcagccggagggaggggggaggtcggaggtcgtggaggtggtttgtgtatcttactggtctgaagggaccaagtgtgtttgttgtttgttttgtatcttgtttttctgatcggagcatcactactgacctgttgtaggcagctatcttacagacgcatgaatgtaagagtaggaaggggtgggtgtcagggatcacttgggatctttgacacttgaaaaattacacctggcagctgcgtttaagccttcccccatcgtgtactgcagagttgagctggcaggggaggggctgagagggtgggggctggaacccctccccgggaggagtgccatctgggtcttccatctagaactgtttacatgaagataagatactcactgttcatgaatacacttgatgttcaagtattaagacctatgcaatattttttacttttctaataaacatgtttgttaaaaca

SEQ ID NO: 35799 - DNA, 1924 bp, Homo sapiens
aagggcgcgagggcaggccgggctaacgtctgctcctgcgccgccgtcccacgggcatcccccccgtgtgtgcccagttgttcccgaagctttaggatccaagacgctgggggcaaccattttccttgcccgccgccccctcacgcttccctgcctctcctcctagcctggtcacgggctgtcccctcctccagcaatgcaaccctataataaacaagtctttccttgatcctcccctgccgcgagcgccctcggggaccttggcagctgcagccgccgcggatcctttccagaaagggggcgtggcggtgggtcggggttcgactgcgagctttctggggctcaatggaggcggggcccggccgctgtcaccgggcaggagagaacgttgcttacgtgcgcccggagtccattggccaaggcgggccacactcccgggtctggattgggtcgtggcgcagagaaggcgtggcctcgccgcgctagtccttataggctgctccgcgctggtgctagggggcagcaggccaagggggaggtgcgagcgtggacctgggacgggtctgggcggctctcggtggttggcacgggttcgcacacccattcaagcggcaggacgcacttgtcttagcagttctcgctgaccgcgctagctgcggcttctacgctccggcactctgagttcatcagcaaacgccctggcgtctgtcctcaccatgcctagcctttgggaccgcttctcgtcgtcgtccacctcctcttcgccctcgtccttgccccgaactcccaccccagatcggccgccgcgctcagcctgggggtcggcgacccgggaggaggggtttgaccgctccacgagcctggagagctcggactgcgagtccctggacagcagcaacagtggcttcgggccggaggaagacacggcttacctggatggggtgtcgttgcccgacttcgagctgctcagtgaccctgaggctggcttcagccagtccctgacgctgagcactggcttccgagtcatcaagaagaagctgtacagctcggaacagctgctcattgaggagtgttgaacttcaacctgagggggccgacagtgccctccaagacagagacgactgaacttttggggtggagactagaggcaggagctgagggactgattcctgtggttggaaaactgaggcagccacctaaggtggaggtgggggaatagtgtttcccaggaagctcattgagttgtgtgcgggtggctgtgcattggggacacatacccctcagtactgtagcatgaaacaaaggcttaggggccaacaaggcttccagctggatgtgtgtgtagcatgtaccttattatttttgttactgacagttaacagtggtgtgacatccagagagcagctgggctgctcccgccccagcccggcccagggtgaaggaagaggcacgtgctcctcagagcagccggagggaggggggaggtcggaggtcgtggaggtggtttgtgtatcttactggtctgaagggaccaagtgtgtttgttgtttgttttgtatcttgtttttctgatcggagcatcactactgacctgttgtaggcagctatcttacagacgcatgaatgtaagagtaggaaggggtgggtgtcagggatcacttgggatctttgacacttgaaaaattacacctggcagctgcgtttaagccttcccccatcgtgtactgcagagttgagctggcaggggaggggctgagagggtgggggctggaacccctccccgggaggagtgccatctgggtcttccatctagaactgtttacatgaagataagatactcactgttcatgaatacacttgatgttcaagtattaagacctatgcaatattttttacttttctaataaacatgtttgttaaaaca

SEQ ID NO: 35800 - DNA, 1663 bp, Homo sapiens
aagggcgcgagggcaggccgggctaacgtctgctcctgcgccgccgtcccacgggcatcccccccgtgtgtgcccagttgttcccgaagctttaggatccaagacgctgggggcaaccattttccttgcccgccgccccctcacgcttccctgcctctcctcctagcctggtcacgggctgtcccctcctccagcaatgcaaccctataataaacaagtctttccttgatcctcccctgccgcgagcgccctcggggaccttggcagctgcagccgccgcggatcctttccagaaagggggcgtggcggtgggtcggggttcgactgcgagctttctggggctcaatggaggcggggcccggccgctgtcaccgggcaggagagaacgttgcttacgtgcgcccggagtccattggccaaggcgggccacactcccgggtctggattgggtcgtggcgcagagaaggcgtggcctcgccgcgctagtccttataggctgctccgcgctggtgctagggggcagcaggccaagggggaggtgcgagcgtggacctgggacgggtctgggcggctctcggtggttggcacgggttcgcacacccattcaagcggcaggacgcacttgtcttagcagttctcgctgaccgcgctagctgcggcttctacgctccggcactctgagttcatcgctgtttagctccgccaactctcccttcctccctggcttcagccagtccctgacgctgagcactggcttccgagtcatcaagaagaagctgtacagctcggaacagctgctcattgaggagtgttgaacttcaacctgagggggccgacagtgccctccaagacagagacgactgaacttttggggtggagactagaggcaggagctgagggactgattcctgtggttggaaaactgaggcagccacctaaggtggaggtgggggaatagtgtttcccaggaagctcattgagttgtgtgcgggtggctgtgcattggggacacatacccctcagtactgtagcatgaaacaaaggcttaggggccaacaaggcttccagctggatgtgtgtgtagcatgtaccttattatttttgttactgacagttaacagtggtgtgacatccagagagcagctgggctgctcccgccccagcccggcccagggtgaaggaagaggcacgtgctcctcagagcagccggagggaggggggaggtcggaggtcgtggaggtggtttgtgtatcttactggtctgaagggaccaagtgtgtttgttgtttgttttgtatcttgtttttctgatcggagcatcactactgacctgttgtaggcagctatcttacagacgcatgaatgtaagagtaggaaggggtgggtgtcagggatcacttgggatctttgacacttgaaaaattacacctggcagctgcgtttaagccttcccccatcgtgtactgcagagttgagctggcaggggaggggctgagagggtgggggctggaacccctccccgggaggagtgccatctgggtcttccatctagaactgtttacatgaagataagatactcactgttcatgaatacacttgatgttcaagtattaagacctatgcaatattttttacttttctaataaacatgtttgttaaaaca

SEQ ID NO: 35801 - DNA, 531 bp, Homo sapiens
tcgtcgagccggtaccgtctatatggaagaccagatggcactcctcccggggaggggtccagcccccaccctctcagcccctccccgggaggtcggaggtcgtggaggtggtttgtgtatcttactggtctgaagggaccaagtgtgtttgttgtttgttttgtatcttgtttttctgatcggagcatcactactgacctgttgtaggcagctatcttacagacgcatgaatgtaagagtaggaaggggtgggtgtcagggatcacttgggatctttgacacttgaaaaattacacctggcagctgcgtttaagccttcccccatcgtgtactgcagagttgagctggcaggggaggggctgagagggtgggggctggaacccctccccgggaggagtgccatctgggtcttccatctagaactgtttacatgaagataagatactcactgttcatgaatacacttgatgttcaagtattaagacctatgcaatattttttacttttctaataaacatgtttgttaaaaca

SEQ ID NO: 35802 - DNA, 332 bp, Homo sapiens
tgggctgacatagaggatcctatgccgaagaatgtaagagtaggaaggggtgggtgtcagggatcacttgggatctttgacacttgaaaaattacacctggcagctgcgtttaagccttcccccatcgtgtactgcagagttgagctggcaggggaggggctgagagggtgggggctggaacccctccccgggaggagtgccatctgggtcttccatctagaactgtttacatgaagataagatactcactgttcatgaatacacttgatgttcaagtattaagacctatgcaatattttttacttttctaataaacatgtttgttaaaaca

SEQ ID NO: 35803 - DNA, 703 bp, Homo sapiens
agagagagagagagagagagagagagagagagagagagagagagagagagagagagccctcagtactgtagcatgaaacaaaggcttaggggccaacaaggcttccagctggatgtgtgtgtagcatgtaccttattatttttgttactgacagttaacagtggtgtgacatccagagagcagctgggctgctcccgccccagcccggcccagggtgaaggaagaggcacgtgctcctcagagcagccggagggaggggggaggtcggaggtcgtggaggtggtttgtgtatcttactggtctgaagggaccaagtgtgtttgttgtttgttttgtatcttgtttttctgatcggagcatcactactgacctgttgtaggcagctatcttacagacgcatgaatgtaagagtaggaaggggtgggtgtcagggatcacttgggatctttgacacttgaaaaattacacctggcagctgcgtttaagccttcccccatcgtgtactgcagagttgagctggcaggggaggggctgagagggtgggggctggaacccctccccgggaggagtgccatctgggtcttccatctagaactgtttacatgaagataagatactcactgttcatgaatacacttgatgttcaagtattaagacctatgcaatattttttacttttctaataaacatgtttgttaaaaca

SEQ ID NO: 35804 - DNA, 1317 bp, Homo sapiens
  misc_feature (1143)..(1143): n is a, c, g, or t
  misc_feature (1146)..(1146): n is a, c, g, or t
  misc_feature (1159)..(1159): n is a, c, g, or t
  misc_feature (1162)..(1162): n is a, c, g, or t
  misc_feature (1165)..(1166): n is a, c, g, or t
  misc_feature (1168)..(1168): n is a, c, g, or t
  misc_feature (1171)..(1171): n is a, c, g, or t
  misc_feature (1178)..(1178): n is a, c, g, or t
  misc_feature (1195)..(1195): n is a, c, g, or t
  misc_feature (1234)..(1234): n is a, c, g, or t
  misc_feature (1291)..(1291): n is a, c, g, or t
aagggcgcgagggcaggccgggctaacgtctgctcctgcgccgccgtcccacgggcatcccccccgtgtgtgcccagttgttcccgaagctttaggatccaagacgctgggggcaaccattttccttgcccgccgccccctcacgcttccctgcctctcctcctagcctggtcacgggctgtcccctcctccagcaatgcaaccctataataaacaagtctttccttgatcctcccctgccgcgagcgccctcggggaccttggcagctgcagccgccgcggatcctttccagaaagggggcgtggcggtgggtcggggttcgactgcgagctttctggggctcaatggaggcggggcccggccgctgtcaccgggcaggagagaacgttgcttacgtgcgcccggagtccattggccaaggcgggccacactcccgggtctggattgggtcgtggcgcagagaaggcgtggcctcgccgcgctagtccttataggctgctccgcgctggtgctagggggcagcaggccaagggggaggtgcgagcgtggacctgggacgggtctgggcggctctcggtggttggcacgggttcgcacacccattcaagcggcaggacgcacttgtcttagcagttctcgctgaccgcgctagctgcggcttctacgctccggcactctgagttcatcagcaaacgccctggcgtctgtcctcaccatgcctagcctttgggaccgcttctcgtcgtcgtccacctcctcttcgccctcgtccttgccccgaactcccaccccagatcggccgccgcgctcagcctgggggtcggcgacccgggaggaggggtttgaccgctccacgagcctggagagctcggactgcgagtccctggacagcagcaacagtggcttcgggccggaggaagacacggcttacctggatggggtgtcgttgcccgacttcgagctgctcagtgaccctgaggatgaacacttgtgtgccaacctgatgcagctgctgcaggagagcctggcccaggcgcggctgggctctcgacgccctgcgcgcctgctgatgcctagccagttggtaagccaggtgggcaaagaactactgcgcctggcctacagcgagccgtgcggccctnctnttttctcttcttnacntcnncnttnatcattncaatatcttccacatcnttttccatctttcactctaccccatcctttttcccaccncccatcttaccctctttcttctcctttactcactactctttcccaatatccattttntttttatctcctccaaccgcccgtcc

SEQ ID NO: 35805 - DNA, 2284 bp, Homo sapiens
aagggcgcgagggcaggccgggctaacgtctgctcctgcgccgccgtcccacgggcatcccccccgtgtgtgcccagttgttcccgaagctttaggatccaagacgctgggggcaaccattttccttgcccgccgccccctcacgcttccctgcctctcctcctagcctggtcacgggctgtcccctcctccagcaatgcaaccctataataaacaagtctttccttgatcctcccctgccgcgagcgccctcggggaccttggcagctgcagccgccgcggatcctttccagaaagggggcgtggcggtgggtcggggttcgactgcgagctttctggggctcaatggaggcggggcccggccgctgtcaccgggcaggagagaacgttgcttacgtgcgcccggagtccattggccaaggcgggccacactcccgggtctggattgggtcgtggcgcagagaaggcgtggcctcgccgcgctagtccttataggctgctccgcgctggtgctagggggcagcaggccaagggggaggtgcgagcgtggacctgggacgggtctgggcggctctcggtggttggcacgggttcgcacacccattcaagcggcaggacgcacttgtcttagcagttctcgctgaccgcgctagctgcggcttctacgctccggcactctgagttcatcagcaaacgccctggcgtctgtcctcaccatgcctagcctttgggaccgcttctcgtcgtcgtccacctcctcttcgccctcgtccttgccccgaactcccaccccagatcggccgccgcgctcagcctgggggtcggcgacccgggaggaggggtttgaccgctccacgagcctggagagctcggactgcgagtccctggacagcagcaacagtggcttcgggccggaggaagacacggcttacctggatggggtgtcgttgcccgacttcgagctgctcagtgaccctgaggatgaacacttgtgtgccaacctgatgcagctgctgcaggagagcctggcccaggcgcggctgggctctcgacgccctgcgcgcctgctgatgcctagccagttggtaagccaggtgggcaaagaactactgcgcctggcctacagcgagccgtgcggcctgcggggggcgctgctggacgtctgcgtggagcagggcaagagctgccacagcgtgggccagctggcactcgaccccagcctggtgcccaccttccagctgaccctcgtgctgcgcctggactcacgactctggcccaagatccaggggctgtttagctccgccaactctcccttcctccctggcttcagccagtccctgacgctgagcactggcttccgagtcatcaagaagaagctgtacagctcggaacagctgctcattgaggagtgttgaacttcaacctgagggggccgacagtgccctccaagacagagacgactgaacttttggggtggagactagaggcaggagctgagggactgattcctgtggttggaaaactgaggcagccacctaaggtggaggtgggggaatagtgtttcccaggaagctcattgagttgtgtgcgggtggctgtgcattggggacacatacccctcagtactgtagcatgaaacaaaggcttaggggccaacaaggcttccagctggatgtgtgtgtagcatgtaccttattatttttgttactgacagttaacagtggtgtgacatccagagagcagctgggctgctcccgccccagcccggcccagggtgaaggaagaggcacgtgctcctcagagcagccggagggaggggggaggtcggaggtcgtggaggtggtttgtgtatcttactggtctgaagggaccaagtgtgtttgttgtttgttttgtatcttgtttttctgatcggagcatcactactgacctgttgtaggcagctatcttacagacgcatgaatgtaagagtaggaaggggtgggtgtcagggatcacttgggatctttgacacttgaaaaattacacctggcagctgcgtttaagccttcccccatcgtgtactgcagagttgagctggcaggggaggggctgagagggtgggggctggaacccctccccgggaggagtgccatctgggtcttccatctagaactgtttacatgaagataagatactcactgttcatgaatacacttgatgttcaagtattaagacctatgcaatattttttacttttctaataaacatgtttgttaaaacaaaaaaaacaataaaacggagg

SEQ ID NO: 35806 - DNA, 2020 bp, Homo sapiens
aagggcgcgagggcaggccgggctaacgtctgctcctgcgccgccgtcccacgggcatcccccccgtgtgtgcccagttgttcccgaagctttaggatccaagacgctgggggcaaccattttccttgcccgccgccccctcacgcttccctgcctctcctcctagcctggtcacgggctgtcccctcctccagcaatgcaaccctataataaacaagtctttccttgatcctcccctgccgcgagcgccctcggggaccttggcagctgcagccgccgcggatcctttccagaaagggggcgtggcggtgggtcggggttcgactgcgagctttctggggctcaatggaggcggggcccggccgctgtcaccgggcaggagagaacgttgcttacgtgcgcccggagtccattggccaaggcgggccacactcccgggtctggattgggtcgtggcgcagagaaggcgtggcctcgccgcgctagtccttataggctgctccgcgctggtgctagggggcagcaggccaagggggaggtgcgagcgtggacctgggacgggtctgggcggctctcggtggttggcacgggttcgcacacccattcaagcggcaggacgcacttgtcttagcagttctcgctgaccgcgctagctgcggcttctacgctccggcactctgagttcatcagcaaacgccctggcgtctgtcctcaccatgcctagcctttgggaccgcttctcgtcgtcgtccacctcctcttcgccctcgtccttgccccgaactcccaccccagatcggccgccgcgctcagcctgggggtcggcgacccgggaggaggggtttgaccgctccacgagcctggagagctcggactgcgagtccctggacagcagcaacagtggcttcgggccggaggaagacacggcttacctggatggggtgtcgttgcccgacttcgagctgctcagtgaccctgaggatgaacacttgtgtgccaacctgatgcagctgctgcaggagagcctggcccaggcgcggctgggctctcgacgccctgcgcgcctgctgatgcctagccagttggtaagccaggtgggcaaagaactactgcgcctggcctacagcgagccgtgcggcctgcggggggcgctgctggacgtctgcgtggagcagggcaagagctgccacagcgtgggccagctggcactcgaccccagcctggtgcccaccttccagctgaccctcgtgctgcgcctggactcacgactctggcccaagatccaggggctgtttagctccgccaactctcccttcctccctggcttcagccagtccctgacgctgagcactggcttccgagtcatcaagaagaagctgtacagctcggaacagctgctcattgaggagtgttgaacttcaacctgagggggccgacagtgccctccaagacagagacgactgaacttttggggtggagactagaggcaggagctgagggactgattcctgtggttggaaaactgaggcagccacctaaggtggaggtgggggaatagtgtttcccaggaagctcattgagttgtgtgcgggtggctgtgcattggggacacatacccctcagtactgtagcatgaaacaaaggcttaggggccaacaaggcttccagctggatgtgtgtgtagcatgtaccttattatttttgttactgacagttaacagtggtgtgacatccagagagcagctgggctgctcccgccccagcccggcccagggtgaaggaagaggcacgtgctcctcagagcagccggagggaggggggaggtcggaggtcgtggaggtggtttgtgtatcttactggtctgaagggaccaagtgtgtttgttgtttgttttgtatcttgtttttctgatcggagcatcactactgacctgttgtaggcagctatcttacagacgcatgtgtacgaggtcagggaggccatgtatggacccaatggtgcaacgggatggggtaccgga

SEQ ID NO: 35807 - DNA, 1960 bp, Homo sapiens
aagggcgcgagggcaggccgggctaacgtctgctcctgcgccgccgtcccacgggcatcccccccgtgtgtgcccagttgttcccgaagctttaggatccaagacgctgggggcaaccattttccttgcccgccgccccctcacgcttccctgcctctcctcctagcctggtcacgggctgtcccctcctccagcaatgcaaccctataataaacaagtctttccttgatcctcccctgccgcgagcgccctcggggaccttggcagctgcagccgccgcggatcctttccagaaagggggcgtggcggtgggtcggggttcgactgcgagctttctggggctcaatggaggcggggcccggccgctgtcaccgggcaggagagaacgttgcttacgtgcgcccggagtccattggccaaggcgggccacactcccgggtctggattgggtcgtggcgcagagaaggcgtggcctcgccgcgctagtccttataggctgctccgcgctggtgctagggggcagcaggccaagggggaggtgcgagcgtggacctgggacgggtctgggcggctctcggtggttggcacgggttcgcacacccattcaagcggcaggacgcacttgtcttagcagttctcgctgaccgcgctagctgcggcttctacgctccggcactctgagttcatcagcaaacgccctggcgtctgtcctcaccatgcctagcctttgggaccgcttctcgtcgtcgtccacctcctcttcgccctcgtccttgccccgaactcccaccccagatcggccgccgcgctcagcctgggggtcggcgacccgggaggaggggtttgaccgctccacgagcctggagagctcggactgcgagtccctggacagcagcaacagtggcttcgggccggaggaagacacggcttacctggatggggtgtcgttgcccgacttcgagctgctcagtgaccctgaggatgaacacttgtgtgccaacctgatgcagctgctgcaggagagcctggcccaggcgcggctgggctctcgacgccctgcgcgcctgctgatgcctagccagttggtaagccaggtgggcaaagaactactgcgcctggcctacagcgagccgtgcggcctgcggggggcgctgctggacgtctgcgtggagcagggcaagagctgccacagcgtgggccagctggcactcgaccccagcctggtgcccaccttccagctgaccctcgtgctgcgcctggactcacgactctggcccaagatccaggggctgtttagctccgccaactctcccttcctccctggcttcagccagtccctgacgctgagcactggcttccgagtcatcaagaagaagctgtacagctcggaacagctgctcattgaggagtgttgaacttcaacctgagggggccgacagtgccctccaagacagagacgactgaacttttggggtggagactagaggcaggagctgagggactgattcctgtggttggaaaactgaggcagccacctaaggtggaggtgggggaatagtgtttcccaggaagctcattgagttgtgtgcgggtggctgtgcattggggacacatacccctcagtactgtagcatgaaacaaaggcttaggggccaacaaggcttccagctggatgtgtgtgtagcatgtaccttattatttttgttactgacagttaacagtggtgtgacatccagagagcagctgggctgctcccgccccagcccggcccagggtgaaggaagaggcacgtgctcctcagagcagccggagggaggggggaggagtgccatctgggtcttccatctagaactgtttacatgaagataagatactcactgttcatgaatacacttgatgttcaagtattaagacctatgcaatattttttacttttctaataaacatgtttgttaaaaca

SEQ ID NO: 35808 - DNA, 1674 bp, Homo sapiens
ggctagtagaggcgggcggtgaatcggccgaggctgtcttagcagttctcgctgaccgcgctagctgcggcttctacgctccggcactctgagttcatcagcaaacgccctggcgtctgtcctcaccatgcctagcctttgggaccgcttctcgtcgtcgtccacctcctcttcgccctcgtccttgccccgaactcccaccccagatcggccgccgcgctcagcctgggggtcggcgacccgggaggaggggtttgaccgctccacgagcctggagagctcggactgcgagtccctggacagcagcaacagtggcttcgggccggaggaagacacggcttacctggatggggtgtcgttgcccgacttcgagctgctcagtgaccctgaggatgaacacttgtgtgccaacctgatgcagctgctgcaggagagcctggcccaggcgcggctgggctctcgacgccctgcgcgcctgctgatgcctagccagttggtaagccaggtgggcaaagaactactgcgcctggcctacagcgagccgtgcggcctgcggggggcgctgctggacgtctgcgtggagcagggcaagagctgccacagcgtgggccagctggcactcgaccccagcctggtgcccaccttccagctgaccctcgtgctgcgcctggactcacgactctggcccaagatccaggggctgtttagctccgccaactctcccttcctccctggcttcagccagtccctgacgctgagcactggcttccgagtcatcaagaagaagctgtacagctcggaacagctgctcattgaggagtgttgaacttcaacctgagggggccgacagtgccctccaagacagagacgactgaacttttggggtggagactagaggcaggagctgagggactgattcctgtggttggaaaactgaggcagccacctaaggtggaggtgggggaatagtgtttcccaggaagctcattgagttgtgtgcgggtggctgtgcattggggacacatacccctcagtactgtagcatgaaacaaaggcttaggggccaacaaggcttccagctggatgtgtgtgtagcatgtaccttattatttttgttactgacagttaacagtggtgtgacatccagagagcagctgggctgctcccgccccagcccggcccagggtgaaggaagaggcacgtgctcctcagagcagccggagggaggggggaggtcggaggtcgtggaggtggtttgtgtatcttactggtctgaagggaccaagtgtgtttgttgtttgttttgtatcttgtttttctgatcggagcatcactactgacctgttgtaggcagctatcttacagacgcatgaatgtaagagtaggaaggggtgggtgtcagggatcacttgggatctttgacacttgaaaaattacacctggcagctgcgtttaagccttcccccatcgtgtactgcagagttgagctggcaggggaggggctgagagggtgggggctggaacccctccccgggaggagtgccatctgggtcttccatctagaactgtttacatgaagataagatactcactgttcatgaatacacttgatgttcaagtattaagacctatgcaatattttttacttttctaataaacatgtttgttaaaaca

SEQ ID NO: 35809 - DNA, 2535 bp, Homo sapiens
aagggcgcgagggcaggccgggctaacgtctgctcctgcgccgccgtcccacgggcatcccccccgtgtgtgcccagttgttcccgaagctttaggatccaagacgctgggggcaaccattttccttgcccgccgccccctcacgcttccctgcctctcctcctagcctggtcacgggctgtcccctcctccagcaatgcaaccctataataaacaagtctttccttgatcctcccctgccgcgagcgccctcggggaccttggcagctgcagccgccgcggatcctttccagaaagggggcgtggcggtgggtcggggttcgactgcgagctttctggggctcaatggaggcggggcccggccgctgtcaccgggcaggagagaacgttgcttacgtgcgcccggagtccattggccaaggcgggccacactcccgggtctggattgggtcgtggcgcagagaaggcgtggcctcgccgcgctagtccttataggctgctccgcgctggtgctagggggcagcaggccaagggggaggtgcgagcgtggacctgggacgggtctgggcggctctcggtggttggcacgggttcgcacacccattcaagcggcaggacgcacttgtcttagcagttctcgctgaccgcgctagctgcggcttctacgctccggcactctgagttcatcagcaaacgccctggcgtctgtcctcaccatgcctagcctttgggaccgcttctcgtcgtcgtccacctcctcttcgccctcgtccttgccccgaactcccaccccagatcggccgccgcgctcagcctgggggtcggcgacccgggaggaggggtttgaccgctccacgagcctggagagctcggactgcgagtccctggacagcagcaacagtggcttcgggccggaggaggtgagcggtgggcgggtgccgacgcgactcgaggggccgggaaggtggggaagccccggtgctggaaggggtcagagccgccttggcttcctatcccatcgggacccagattgcttgggggcagggggaattggagtataaggtgagtgaggcggaaactgaggcacggagtgggaaggagcgttggtttcttaaggaaacagcacctcccccgcctgtgcgtttcgttttgaagccgctctaataccccttcctgtgtgctctcctttccagacacggcttacctggatggggtgtcgttgcccgacttcgagctgctcagtgaccctgaggatgaacacttgtgtgccaacctgatgcagctgctgcaggagagcctggcccaggcgcggctgggctctcgacgccctgcgcgcctgctgatgcctagccagttggtaagccaggtgggcaaagaactactgcgcctggcctacagcgagccgtgcggcctgcggggggcgctgctggacgtctgcgtggagcagggcaagagctgccacagcgtgggccagctggcactcgaccccagcctggtgcccaccttccagctgaccctcgtgctgcgcctggactcacgactctggcccaagatccaggggctgtttagctccgccaactctcccttcctccctggcttcagccagtccctgacgctgagcactggcttccgagtcatcaagaagaagctgtacagctcggaacagctgctcattgaggagtgttgaacttcaacctgagggggccgacagtgccctccaagacagagacgactgaacttttggggtggagactagaggcaggagctgagggactgattcctgtggttggaaaactgaggcagccacctaaggtggaggtgggggaatagtgtttcccaggaagctcattgagttgtgtgcgggtggctgtgcattggggacacatacccctcagtactgtagcatgaaacaaaggcttaggggccaacaaggcttccagctggatgtgtgtgtagcatgtaccttattatttttgttactgacagttaacagtggtgtgacatccagagagcagctgggctgctcccgccccagcccggcccagggtgaaggaagaggcacgtgctcctcagagcagccggagggaggggggaggtcggaggtcgtggaggtggtttgtgtatcttactggtctgaagggaccaagtgtgtttgttgtttgttttgtatcttgtttttctgatcggagcatcactactgacctgttgtaggcagctatcttacagacgcatgaatgtaagagtaggaaggggtgggtgtcagggatcacttgggatctttgacacttgaaaaattacacctggcagctgcgtttaagccttcccccatcgtgtactgcagagttgagctggcaggggaggggctgagagggtgggggctggaacccctccccgggaggagtgccatctgggtcttccatctagaactgtttacatgaagataagatactcactgttcatgaatacacttgatgttcaagtattaagacctatgcaatattttttacttttctaataaacatgtttgttaaaaca

SEQ ID NO: 35810 - DNA, 1815 bp, Homo sapiens
ggaggtgcgacatgtgtgagcatgggaccgcggtgctactgcggccgtgcctctgcggctggctgtgggacggcgttcggccagagcgattcatccggcgaggacggcactcggtgtaatagatcgcgagagatcgctgcaagtctgcgggtttctatgcaaccggccatgtcttagtatctccaggagtggcccaggaggtttgtacgcacaggacaagccagtgcgcggaaacgtctattcctccgctacagggcaggtctccaaccgtcacgtacatgtaccagcgcacatctggtcgtgtgcgcacgcggaaatccctggcccgagatcgggcctgcgagcgtcaaacgtgtgaggtggtagggaagatcggggaaggaggggtttggaccaggaccgacagagcctggaagagcacgaacggggagatccctggagaggaggaacagtgggttgcgggccggaggaagacacggcttacctggatggggtgtcgttgcccgacttcgagctgctcagtgaccctgaggatgaacacttgtgtgccaacctgatgcagctgctgcaggagagcctggcccaggcgcggctgggctctcgacgccctgcgcgcctgctgatgcctagccagttggtaagccaggtgggcaaagaactactgcgcctggcctacagcgagccgtgcggcctgcggggggcgctgctggacgtctgcgtggagcagggcaagagctgccacagcgtgggccagctggcactcgaccccagcctggtgcccaccttccagctgaccctcgtgctgcgcctggactcacgactctggcccaagatccaggggctgtttagctccgccaactctcccttcctccctggcttcagccagtccctgacgctgagcactggcttccgagtcatcaagaagaagctgtacagctcggaacagctgctcattgaggagtgttgaacttcaacctgagggggccgacagtgccctccaagacagagacgactgaacttttggggtggagactagaggcaggagctgagggactgattcctgtggttggaaaactgaggcagccacctaaggtggaggtgggggaatagtgtttcccaggaagctcattgagttgtgtgcgggtggctgtgcattggggacacatacccctcagtactgtagcatgaaacaaaggcttaggggccaacaaggcttccagctggatgtgtgtgtagcatgtaccttattatttttgttactgacagttaacagtggtgtgacatccagagagcagctgggctgctcccgccccagcccggcccagggtgaaggaagaggcacgtgctcctcagagcagccggagggaggggggaggtcggaggtcgtggaggtggtttgtgtatcttactggtctgaagggaccaagtgtgtttgttgtttgttttgtatcttgtttttctgatcggagcatcactactgacctgttgtaggcagctatcttacagacgcatgaatgtaagagtaggaaggggtgggtgtcagggatcacttgggatctttgacacttgaaaaattacacctggcagctgcgtttaagccttcccccatcgtgtactgcagagttgagctggcaggggaggggctgagagggtgggggctggaacccctccccgggaggagtgccatctgggtcttccatctagaactgtttacatgaagataagatactcactgttcatgaatacacttgatgttcaagtattaagacctatgcaatattttttacttttctaataaacatgtttgttaaaaca

SEQ ID NO: 35811 - DNA, 1901 bp, Homo sapiens
aagggcgcgagggcaggccgggctaacgtctgctcctgcgccgccgtcccacgggcatcccccccgtgtgtgcccagttgttcccgaagctttaggatccaagacgctgggggcaaccattttccttgcccgccgccccctcacgcttccctgcctctcctcctagcctggtcacgggctgtcccctcctccagcaatgcaaccctataataaacaagtctttccttgatcctcccctgccgcgagcgccctcggggaccttggcagctgcagccgccgcggatcctttccagaaagggggcgtggcggtgggtcggggttcgactgcgagctttctggggctcaatggaggcggggcccggccgctgtcaccgggcaggagagaacgttgcttacgtgcgcccggagtccattggccaaggcgggccacactcccgggtctggattgggtcgtggcgcagagaaggcgtggcctcgccgcgctagtccttataggctgctccgcgctggtgctagggggcagcaggccaagggggaggtgcgagcgtggacctgggacgggtctgggcggctctcggtggttggcacgggttcgcacacccattcaagcggcaggacgcacttgtcttagcagttctcgctgaccgcgctagctgcggcttctacgctccggcactctgagttcatcagcaaacgccctggcgtctgtcctcaccatgcttggtaagccaggtgggcaaagaactactgcgcctggcctacagcgagccgtgcggcctgcggggggcgctgctggacgtctgcgtggagcagggcaagagctgccacagcgtgggccagctggcactcgaccccagcctggtgcccaccttccagctgaccctcgtgctgcgcctggactcacgactctggcccaagatccaggggctgtttagctccgccaactctcccttcctccctggcttcagccagtccctgacgctgagcactggcttccgagtcatcaagaagaagctgtacagctcggaacagctgctcattgaggagtgttgaacttcaacctgagggggccgacagtgccctccaagacagagacgactgaacttttggggtggagactagaggcaggagctgagggactgattcctgtggttggaaaactgaggcagccacctaaggtggaggtgggggaatagtgtttcccaggaagctcattgagttgtgtgcgggtggctgtgcattggggacacatacccctcagtactgtagcatgaaacaaaggcttaggggccaacaaggcttccagctggatgtgtgtgtagcatgtaccttattatttttgttactgacagttaacagtggtgtgacatccagagagcagctgggctgctcccgccccagcccggcccagggtgaaggaagaggcacgtgctcctcagagcagccggagggaggggggaggtcggaggtcgtggaggtggtttgtgtatcttactggtctgaagggaccaagtgtgtttgttgtttgttttgtatcttgtttttctgatcggagcatcactactgacctgttgtaggcagctatcttacagacgcatgaatgtaagagtaggaaggggtgggtgtcagggatcacttgggatctttgacacttgaaaaattacacctggcagctgcgtttaagccttcccccatcgtgtactgcagagttgagctggcaggggaggggctgagagggtgggggctggaacccctccccgggaggagtgccatctgggtcttccatctagaactgtttacatgaagataagatactcactgttcatgaatacacttgatgttcaagtattaagacctatgcaatattttttacttttctaataaacatgtttgttaaaaca

SEQ ID NO: 35812 - DNA, 1495 bp, Homo sapiens
tagggcagagaaggacccctcccgttattttgaggaccgggctggtgcgactatactactgccggatggcaaatccgggatctcggctccgagaggctcatctggcaaaagggcgcggaaaccacgggggccctgagactgagtggtccctatcccacttctctctggggcggcgctgtagccagcggctgacaggcgcagcgaaaggcagccctctgctaagggtcccagcaccatggaggacccgaaccctgaagagaacatgaagcagcaggattcacccaaggagagaagtccccagagcccaggaggcaacatctgccacctgggggccccgaagtgcacccgctgcctcatcaccttcgcagattccaagttccaggagcgtcacatgaagcgggagcacccagcggacttcgtggcccagaagctgcagggggtcctcttcatctgcttcacctgcgcccgctccttcccctcctccaaagccctaatcacccaccagcgcagccacggtccagccgccaagcccaccctgccggttgcaaccactactgcccagcccaccttcccttgtcctgactgtggcaagacctttgggcaggctgtttctctgaggcggcaccgccagatgcatgaggtccgtgcccctcctggcaccttcgcctgcacagagtgcggtcaggactttgctcaggaagcagggctgcatcaacactacattcggcatgcccggggggagctctgagtgcagcttaagcctctccacggtgacgggtggctctgtggctggtaggactcacccatgatatggggtgcaggaactctgggggccctgaaggatttgcttccctcccctgggaaggcagagggctcttaataaagaggacccagaagattcttatttagagcttcagtctttggagcacacagggccttcgtgagacagtgaaatcagataataatgagatcttttgttaaaaaaaaaaaaaatgggaagggagtgcgggagagaaatggtttgtgtctcccttattcccagttaaatacctagctgcagattgtgccatcacccttcattcttcccagatggatgccatgggctatgggagcaaattgccctggacctttgcctgaatgggggcaggaaaggtgaggtgttgctggcctgtaatgccaccaggtgagttccagatgtggagcaacttgggcttttggggatggggcagcaaagttgggagctggaccccaattgagtgggggtagcaattggagtccttgtgtctcttttccaccccctgccatcctcacttagaggggccatggcactagatggcactagtcccccgataatttatgtctcgttgaaataattttgtatatcattctagtcctgaaatatttttttcatatgtgtaggtgaaatggtatgaataagctaacaggaatagtatctaaaaacagaaaacatccatattaaaatgtctaaacaggg

SEQ ID NO: 35813 - DNA, 897 bp, Homo sapiens
tagggcagagaaggacccctcccgttattttgaggaccgggctggtgcgactatactactgccggatggcaaatccgggatctcggctccgagaggctcatctggcaaaagggcgcggaaaccacgggggccctgagactgagtggtccctatcccacttctctctggggcggcgctgtagccagcggctgacaggcgcagcgaaaggcagccctctgctaagggtcccagcaccatggaggacccgaaccctgaagagaacatgaagcagcaggattcacccaaggagagaagtccccagagcccaggaggcaacatctgccacctgggggccccgaagtgcacccgctgcctcatcaccttcgcagattccaagttccaggagcgtcacatgaagcgggagcacccagcggacttcgtggcccagaagctgcagggggtcctcttcatctgcttcacctgcgcccgctccttcccctcctccaaagccctaatcacccaccagcgcagccacggtccagccgccaagcccaccctgccggttgcaaccactactgcccagcccaccttcccttgtcctgactgtggcaagacctttgggcaggctgtttctctgaggcggcaccgccagatgcatgaggtccgtgcccctcctggcaccttcgcctgcacagagtgcggtcaggactttgctcaggaagcagggctgcatcaacactacattcggcatgcccggggggagctctgagtgcagcttaagcctctccacggtgacgggtggctctgtggctggtaggactcacccatgatatggggtgcaggaactctgggggccctgaaggatttgcttccctcccctgggaaggcagagggctcttaataaagaggacccagaag

SEQ ID NO: 35814 - DNA, 2628 bp, Homo sapiens
actgaggcctgggagcaggaacctgtaggcagcgcttgagggtagcgggatagcagctgcaagcgcgcgtgggaggcgggggctctgggcggaacaaaaatcacaggatgtcagaggatgtttcccgggaagaactgggataaaggaagggtcccagcaccatggaggacccgaaccctgaagagaacatgaagcagcaggattcacccaaggagagaagtccccagagcccaggaggcaacatctgccacctgggggccccgaagtgcacccgctgcctcatcaccttcgcagattccaagttccaggagcgtcacatgaagcgggagcacccagcggacttcgtggcccagaagctgcagggggtcctcttcatctgcttcacctgcgcccgctccttcccctcctccaaagccctaatcacccaccagcgcagccacggtccagccgccaagcccaccctgccggttgcaaccactactgcccagcccaccttcccttgtcctgactgtggcaagacctttgggcaggctgtttctctgaggcggcaccgccagatgcatgaggtccgtgcccctcctggcaccttcgcctgcacagagtgcggtcaggactttgctcaggaagcagggctgcatcaacactacattcggcatgcccggggggagctctgagtgcagcttaagcctctccacggtgacgggtggctctgtggctggtaggactcacccatgatatggggtgcaggaactctgggggccctgaaggatttgcttccctcccctgggaaggcagagggctcttaataaagaggacccagaagattcttatttagagcttcagtctttggagcacacagggccttcgtgagacagtgaaatcagataataatgagatcttttgttaaaaaaaaaaaaaatgggaagggagtgcgggagagaaatggtttgtgtctcccttattcccagttaaatacctagctgcagattgtgccatcacccttcattcttcccagatggatgccatgggctatgggagcaaattgccctggacctttgcctgaatgggggcaggaaaggtgaggtgttgctggcctgtaatgccaccaggtgagttccagatgtggagcaacttgggcttttggggatggggcagcaaagttgggagctggaccccaattgagtgggggtagcaattggagtccttgtgtctcttttccaccccctgccatcctcacttagaggggccatggcactagatggcactagtcccccgataatttatgtctcgttgaaataattttgtatatcattctagtcctgaaatatttttttcatatgtgtaggtgaaatggtatgaataagctaacaggaatagtatctaaaaacagaaaacatccatattaaaatgtctaaacagggagctctggcttttgagtgggaatttccagagaacataagggtgtgggcaggtgggggaactcaggccagagttggcctcgctttgtggggaaactggtttggaatcaaacagagataccttctgtttcgggttttatttggccaacactgggagatttcccattaagatcctattttcagctctcttgaaaggcccaacctaggctgacattgtcagcaggggcaggacagaagttacaacaggctggagggagcagtgggtgtcaccctcaactggagatgagtcccaccaggccagttttacccccttagttacctgccctgcacctgcagacaatggtcgatgccttgcatataatacttatagactctgtttatgttgagggatgtttttaaagcccacaggtgaggtggatgtggtagactgatcactgtctctgtttttagctaggcacacagtagctgaaaagactgcatttcccagattcctttgcagctagatgtggccttgtgactgatttctggctaaattcctgggtagaacagtcaagcttaagaaagggacggctgggcacagtggctcacgcctgtaatcccagcactttgtgaggctgaggccggtggatcacctgaggtcaggagtttgagaccagcctggccaacatggtgaaaccctgtctctaccaaaaatacaaaaattagccgggtgtggtggcatatgcctgtaatcccagctacttgggaggctgaggcaggagaattgcttgaacctgggagacaggttgcagtgagccaagatcgtgccattgcacttcagcctgggtgacagagtgagactgtttaaaaaaaaagaaaagaaagggacataccttttttccaccttcctaactgtaatacggaaatggtatccagccatctcagaccataaggataagagcaacacgtgggaagacagagcaacaagataggagcctgggtctctcgtcaatttcaaggagcacagccaccataccagcccacttccatattgctatctaagaaagaaacttctatcttatttaagccaccattattttgggtctctgtcacatgcaacagaatttacagcctaagacaggggtctgcaaactatggccaactctagcctgctgcctggttttgcaaataaaattttatttgaacagttttatactcattcacttatgta

SEQ ID NO: 35815 - DNA, 823 bp, Homo sapiens
actgaggcctgggagcaggaacctgtaggcagcgcttgagggtagcgggatagcagctgcaagcgcgcgtgggaggcgggggctctgggcggaacaaaaatcacaggatgtcagaggatgtttcccgggaagaactgggataaaggaagggtcccagcaccatggaggacccgaaccctgaagagaacatgaagcagcaggattcacccaaggagagaagtccccagagcccaggaggcaacatctgccacctgggggccccgaagtgcacccgctgcctcatcaccttcgcagattccaagttccaggagcgtcacatgaagcgggagcacccagcggacttcgtggcccagaagctgcagggggtcctcttcatctgcttcacctgcgcccgctccttcccctcctccaaagccctaatcacccaccagcgcagccacggtccagccgccaagcccaccctgccggttgcaaccactactgcccagcccaccttcccttgtcctgactgtggcaagacctttgggcaggctgtttctctgaggcggcaccgccagatgcatgaggtccgtgcccctcctggcaccttcgcctgcacagagtgcggtcaggactttgctcaggaagcagggctgcatcaacactacattcggcatgcccggggggagctctgagtgcagcttaagcctctccacggtgacgggtggctctgtggctggtaggactcacccatgatatggggtgcaggaactctgggggccctgaaggatttgcttccctcccctgggaaggcagagggctcttaataaagaggacccagaag

SEQ ID NO: 35816 - DNA, 1186 bp, Homo sapiens
actgaggcctgggagcaggaacctgtaggcagcgcttgagggtagcgggatagcagctgcaagcgcgcgtgggaggcgggggctctgggcggaacaaaaatcacaggatgtcagaggatgtttcccgggaagaactgggataaaggaagggtcccagcaccatggaggacccgaaccctgaagagaacatgaagcagcaggattcacccaaggagagaagtccccagagcccaggaggcaacatctgccacctgggggccccgaagtgcacccgctgcctcatcaccttcgcagattccaagttccaggagcgtcacatgaagcgggagcacccagcggacttcgtggcccagaagctgcagggggtcctcttcatctgcttcacctgcgcccgctccttcccctcctccaaagccctaatcacccaccagcgcagccacggtccagccgccaagcccaccctgccggttgcaaccactactgcccagcccaccttcccttgtcctgactgtggcaagacctttgggcaggctgtttctctgaggcggcaccgccagatgcatgaggtccgtgcccctcctggcaccttcgcctgcacagagtgcggtcaggactttgctcaggaagcagggctgcatcaacactacattcggcatgcccggggggagctctgagtgcagcttaagcctctccacggtgacgggtggctctgtggctggtaggactcacccatgatatggggtgcaggaactctgggggccctgaaggatttgcttccctcccctgggaaggcagagggctcttaataaagaggacccagaagcaaaaaaaaaaaaaaaaaaaaaaaaaaaaattttggggcggccgggccctgaaaaaatttttaaaaccaactggttgggggcgcgcggcccccagtaggctaacagctgaacagtggcgcattaaggtgggtcccaaaggaaactccggcgcacgaccaacggaggctgggctgtcccccaatataaaaaaccccgggggggaccccgggggttctggacaaactctcaaaggagaggccggggagactaggggatccacaaagggcgtccaagcgggtcgagaataaattcagccaacagggagccacagcagaaatcacacccacccgcagaccagacatatgaaagaaacacgacacgcg

SEQ ID NO: 35817 - DNA, 1457 bp, Homo sapiens
agcttcagtttctcgcatgcgcagtgagtaaacatgagcctctggtagataagagaaaccgcgatcggagtacggcgcgtgcgcagatcagggatcgcgattgcgaatcctccgctgaggtgatttggatatccctagaacgttgagggcacgagtcgggtcctgagaccaggtcctcagccagcagagccacgttccttatgagcaccgtgggtttatttcattttcctacaccactgacccgaatatgcccggcgccatggggactccggctttgggagaagctgacgttgttatccccaggaatagctgtcactccggtccagatggcaggcaagaaggactaccctgcactgctttccttggatgagaatgaactcgaagagcagtttgtgaaaggacacggtccagggggccaggcaaccaacaaaaccagcaactgcgtggtgctgaagcacatcccctcaggcatcgttgtaaagtgccatcagacaagatcagttgatcagaacagaaagctagctcggaaaatcctacaagagaaagtagatgttttctacaatggtgaaaacagtcctgttcacaaagaaaaacgagaagcggcgaagaaaaaacaagaaaggaaaaaaagagcaaaggaaaccctggaaaaaaagaagctacttaaagaactgtgggagtcaagtaaaaaggtccactgagaaaagaattagagattccaactgacagaatctgccagaagctcccagggaataatggtggcgagttccatcaccagcattattatagtgcttcaaaagaaatatttttgatgaacttaaaagacaacaaatttatttaaatggtgcactaaactgtagtgaacagagacatgcacgattcaagaataaaactcggccgggcacggtggacggtgcctcacatctgtaatcccagcactttgggaggccgaggcgggcggatcacttgaggtcaggagtttgagaccagcctggccaacatggtgaaaccccgtctctactaaaaatacaaaaaataaaactaggtcaagtgcaatgacacacgcctataatcccagcaccttgggaggctaagacaggaagatcacctgagcccaggagctcaagattgcagtgagctatgaacaccactgcactccacctgtccacttgttcttgtgtgacagaacaagaccctgtctctaaaaaataagataaaaccataaagaaacacagtcagtactatacaagaataatggctacttctagagggaaggagttgtcattgtgatgaggcacttggaggggttctggggtgcctgacaaagttctgtttcttcacctgggtggtagttagaagggtgtccccgtatttcaaattgtacctttgtgagattgtatgttttgtaataataaaattttttttgtaattaaaaaagtcaatttttatggagaact

SEQ ID NO: 35818 - DNA, 560 bp, Homo sapiens
attttactgttttttgttgttgttgttttttgagacagagtctcgctccttcagtcttcgcccagctgagatcgcgccactgcactcaagcctgggcaacacctgggtgacagagcaagaccccatctcaaaaaaaaaataaaactaggtcaagtgcaatgacacacgcctataatcccagcaccttgggaggctaagacaggaagatcacctgagcccaggagctcaagattgcagtgagctatgaacaccactgcactccacctgtccacttgttcttgtgtgacagaacaagaccctgtctctaaaaaataagataaaaccataaagaaacacagtcagtactatacaagaataatggctacttctagagggaaggagttgtcattgtgatgaggcacttggaggggttctggggtgcctgacaaagttctgtttcttcacctgggtggtagttagaagggtgtccccgtatttcaaattgtacctttgtgagattgtatgttttgtaataataaaattttttttgtaattaaaaaagtcaatttttatggagaact

SEQ ID NO: 35819 - DNA, 649 bp, Homo sapiens
agcttcagtttctcgcatgcgcagtgagtaaacatgagcctctggtagataagagaaaccgcgatcggagtacggcgcgtgcgcagatcagggatcgcgattgcgaatcctccgctgaggtgatttggatatccctagaacgttgagggcacgagtcgggtcctgagaccaggtaagcatctgcggagaagccaggtaaccctacggctgccgacgactgtcaaaggctccggagagaggactgcgagccgggacgcctgggtttttcccgacttgcgaccccgagtggcgcagccagtttacctgaggccgcgctggcggtggggtggggccggccgtgacacccgagctcagttttctcgggacctggtttacgctaggtgctgtgggtcggtcctggggctgttcaggcactcagggcaggggagaggagagactaccgtcctggagataacggttccacggaggcccaaggcgaaacggaaggatcctcatgtacaaaactgagcggaatggagctgtgagcacgcatcaggtgctgtttcaggcctggcacgtagtagaggtcagcactgcccttgctaggcttttgcggagatactcgttttttttttaatagacgtggggtgggggggtctcactgtgttgc

SEQ ID NO: 35820 - DNA, 1627 bp, Homo sapiens
agcttcagtttctcgcatgcgcagtgagtaaacatgagcctctggtagataagagaaaccgcgatcggagtacggcgcgtgcgcagatcagggatcgcgattgcgaatcctccgctgaggtgatttggatatccctagaacgttgagggcacgagtcgggtcctgagaccaggtcctcagccagcagagccacgttccttatgagcaccgtgggtttatttcattttcctacaccactgacccgaatatgcccggcgccatggggactccggctttgggagaagctgacgttgttatccccaggaatagctgtcactccggtccagatggcaggcaagaaggactaccctgcactgctttccttggatgagaatgaactcgaagagcagtttgtgaaaggacacggtccagggggccaggcaaccaacaaaaccagcaactgcgtggtgctgaagcacatcccctcaggcatcgttgtaaagtgccatcagacaagatcagttgatcagaacagaaagctagctcggaaaatcctacaagagaaagtagatgttttctacaatggtgaaaacagtcctgttcacaaagaaaaacgagaagcggcgaagaaaaaacaagaaaggaaaaaaagagcaaaggaaaccctggaaaaaaagaagctacttaaagaactgtgggagtcaagtaaaaaggtccactgagaaaagaattagagattccaactgacagaatctgccagaagctcccagggaataatggtggcgagttccatcaccagcattattatagtgcttcaaaagaaatatttttgatgaacttaaaagacaacaaatttatttaaatggtgcactaaactgtagtgaacagagacatgcacgattcaagaataaaactcggccgggcacggtggacggtgcctcacatctgtaatcccagcactttgggaggccgaggcgggcggatcacttgaggtcaggagtttgagaccagcctggccaacatggtgaaaccccgtctctactaaaaatacaaaaaattagccaggcatggtggcgggcacctgtaatcccagctactcgggaggccgaggcaggagaattgcgtgaacctgggaggcggaggttgcagtgagctgagatcgcgccactgcactcaagcctgggcaacacctgggtgacagagcaagaccccatctcaaaaaaaaaataaaactaggtcaagtgcaatgacacacgcctataatcccagcaccttgggaggctaagacaggaagatcacctgagcccaggagctcaagattgcagtgagctatgaacaccactgcactccacctgtccacttgttcttgtgtgacagaacaagaccctgtctctaaaaaataagataaaaccataaagaaacacagtcagtactatacaagaataatggctacttctagagggaaggagttgtcattgtgatgaggcacttggaggggttctggggtgcctgacaaagttctgtttcttcacctgggtggtagttagaagggtgtccccgtatttcaaattgtacctttgtgagattgtatgttttgtaataataaaattttttttgtaattaaaaaagtcaatttttatggagaact

SEQ ID NO: 35821 - DNA, 2704 bp, Homo sapiens
  misc_feature (855)..(855): n is a, c, g, or t
agcttcagtttctcgcatgcgcagtgagtaaacatgagcctctggtagataagagaaaccgcgatcggagtacggcgcgtgcgcagatcagggatcgcgattgcgaatcctccgctgaggtgatttggatatccctagaacgttgagggcacgagtcgggtcctgagaccaggtcctcagccagcagagccacgttccttatgagcaccgtgggtttatttcattttcctacaccactgacccgaatatgcccggcgccatggggactccggctttgggagaagctgacgttgttatccccaggaatagctgtcactccggtccagatggcaggcaagaaggactaccctgcactgctttccttggatgagaatgaactcgaagagcagtttgtgaaaggacacggtccagggggccaggcaaccaacaaaaccagcaactgcgtggtgctgaagcacatcccctcaggcatcgttgtaaaggtagatcacagaaggccgctgaggggagaggccccgcccaagggttccacagcctccagagatttctcccaagtgtgaatgggatcagccgaagtgcattatttttctggcttgggccaccctctaccagccaggcagtagagagcaccgcagatctcgtcccatccctgagccgttcctccctaaggcagaacctcctacaacagcctgggaagcctgtttccaggatcttttggagccagggtatggctgccatccttgaatttggcagacagcactggtgcttggctgctgccccggaagcaacgtcttgacaaagctaagcagtggctgataaaggcaggcgcccgggcagcatggttctttcaaatcngttcccactgcaggaaggctgccgagatccccagcattgctatgggatccaagtccctgaggaggcggcaagcaggcatgggttgtctgctggcagtcccagcccttaactgtcatggctggttaacattagggtggccacatcctccacgcctctctgtcccctttggtaaatgtcggtgatacctcctcttctggacagagaggactgagggcgagatcatggaggatcatggaggccaggcattttccaacctcagaagaaaaaatgctgtgcacagctgcctataggagtcttcctttttacataaaaaaacaagtctcgggccaggcacagtggctcatgcctgtaatcccagcactttgggaggccgaggtgggtggatcacctgaggtcaggagttcgagaccagtctggtcaacatggcaaaaccccatctctactgaaaatacaaaaattagccgggtgtggtggcgcgtgcctgtaatcccagttactcggaggctaaggcaggagaatcgcttgaaccctggaggcagacattgcagtgagccgagatcatgctactgcataccagcctgggcaacagacaagattccctcttaaaaaaaaaaaaaagaaggttggtcagaggggctcccagtccatctgcctcagggatcacgagagagtcctggaagcagcacagaagagagatagccaagtgccatcagacaagatcagttgatcagaacagaaagctagctcggaaaatcctacaagagaaagtagatgttttctacaatggtgaaaacagtcctgttcacaaagaaaaacgagaagcggcgaagaaaaaacaagaaaggaaaaaaagagcaaaggaaaccctggaaaaaaagaagctacttaaagaactgtgggagtcaagtaaaaaggtccactgagaaaagaattagagattccaactgacagaatctgccagaagctcccagggaataatggtggcgagttccatcaccagcattattatagtgcttcaaaagaaatatttttgatgaacttaaaagacaacaaatttatttaaatggtgcactaaactgtagtgaacagagacatgcacgattcaagaataaaactcggccgggcacggtggacggtgcctcacatctgtaatcccagcactttgggaggccgaggcgggcggatcacttgaggtcaggagtttgagaccagcctggccaacatggtgaaaccccgtctctactaaaaatacaaaaaattagccaggcatggtggcgggcacctgtaatcccagctactcgggaggccgaggcaggagaattgcgtgaacctgggaggcggaggttgcagtgagctgagatcgcgccactgcactcaagcctgggcaacacctgggtgacagagcaagaccccatctcaaaaaaaaaataaaactaggtcaagtgcaatgacacacgcctataatcccagcaccttgggaggctaagacaggaagatcacctgagcccaggagctcaagattgcagtgagctatgaacaccactgcactccacctgtccacttgttcttgtgtgacagaacaagaccctgtctctaaaaaataagataaaaccataaagaaacacagtcagtactatacaagaataatggctacttctagagggaaggagttgtcattgtgatgaggcacttggaggggttctggggtgcctgacaaagttctgtttcttcacctgggtggtagttagaagggtgtccccgtatttcaaattgtacctttgtgagattgtatgttttgtaataataaaattttttttgtaattaaaaaagtcaatttttatggagaact

SEQ ID NO: 35822 - DNA, 1990 bp, Homo sapiens
agcttcagtttctcgcatgcgcagtgagtaaacatgagcctctggtagataagagaaaccgcgatcggagtacggcgcgtgcgcagatcagggatcgcgattgcgaatcctccgctgaggtgatttggatatccctagaacgttgagggcacgagtcgggtcctgagaccaggtaagcatctgcggagaagccaggtaaccctacggctgccgacgactgtcaaaggctccggagagaggactgcgagccgggacgcctgggtttttcccgacttgcgaccccgagtggcgcagccagtttacctgaggccgcgctggcggtggggtggggccggccgtgacacccgagctcagttttctcgggacctggtttacgctaggtgctgtgggtcggtcctggggctgttcaggcactcagggcaggggagaggagagactaccgtcctggagataacggttccacggaggcccaaggcgaaacggaaggatcctcatgtacaaaactgagcggaatggagctgtgagcacgcatcaggtcctcagccagcagagccacgttccttatgagcaccgtgggtttatttcattttcctacaccactgacccgaatatgcccggcgccatggggactccggctttgggagaagctgacgttgttatccccaggaatagctgtcactccggtccagatggcaggcaagaaggactaccctgcactgctttccttggatgagaatgaactcgaagagcagtttgtgaaaggacacggtccagggggccaggcaaccaacaaaaccagcaactgcgtggtgctgaagcacatcccctcaggcatcgttgtaaagtgccatcagacaagatcagttgatcagaacagaaagctagctcggaaaatcctacaagagaaagtagatgttttctacaatggtgaaaacagtcctgttcacaaagaaaaacgagaagcggcgaagaaaaaacaagaaaggaaaaaaagagcaaaggaaaccctggaaaaaaagaagctacttaaagaactgtgggagtcaagtaaaaaggtccactgagaaaagaattagagattccaactgacagaatctgccagaagctcccagggaataatggtggcgagttccatcaccagcattattatagtgcttcaaaagaaatatttttgatgaacttaaaagacaacaaatttatttaaatggtgcactaaactgtagtgaacagagacatgcacgattcaagaataaaactcggccgggcacggtggacggtgcctcacatctgtaatcccagcactttgggaggccgaggcgggcggatcacttgaggtcaggagtttgagaccagcctggccaacatggtgaaaccccgtctctactaaaaatacaaaaaattagccaggcatggtggcgggcacctgtaatcccagctactcgggaggccgaggcaggagaattgcgtgaacctgggaggcggaggttgcagtgagctgagatcgcgccactgcactcaagcctgggcaacacctgggtgacagagcaagaccccatctcaaaaaaaaaataaaactaggtcaagtgcaatgacacacgcctataatcccagcaccttgggaggctaagacaggaagatcacctgagcccaggagctcaagattgcagtgagctatgaacaccactgcactccacctgtccacttgttcttgtgtgacagaacaagaccctgtctctaaaaaataagataaaaccataaagaaacacagtcagtactatacaagaataatggctacttctagagggaaggagttgtcattgtgatgaggcacttggaggggttctggggtgcctgacaaagttctgtttcttcacctgggtggtagttagaagggtgtccccgtatttcaaattgtacctttgtgagattgtatgttttgtaataataaaattttttttgtaattaaaaaagtcaatttttatggagaact

SEQ ID NO: 35823 - DNA, 1870 bp, Homo sapiens
agcttcagtttctcgcatgcgcagtgagtaaacatgagcctctggtagataagagaaaccgcgatcggagtacggcgcgtgcgcagatcagggatcgcgattgcgaatcctccgctgaggtgatttggatatccctagaacgttgagggcacgagtcgggtcctgagaccaggtcctcagccagcagagccacgttccttatgagcaccgtgggtttatttcattttcctacaccactgacccgaatatgcccggcgccatggggactccggctttgggagaagctgacgttgttatccccaggaatagctgtcactccggtccagatggcaggcaagaaggactaccctgcactgctttccttggatgagaatgaactcgaagagcagtttgtgaaaggacacggtccagggggccaggcaaccaacaaaaccagcaactgcgtggtgctgaagcacatcccctcaggcatcgttgtaaaggtagatcacagaaggccgctgaggggagaggccccgcccaagggttccacagcctccagagatttctcccaagtgtgaatgggatcagccgaagtgcattatttttctggcttgggccaccctctaccagccaggcagtagagagcaccgcagatctcgtcccatccctgagccgttcctccctaaggcagaacctcctacaacagcctgggaagcctgtttccaggatcttttggagccaggtgccatcagacaagatcagttgatcagaacagaaagctagctcggaaaatcctacaagagaaagtagatgttttctacaatggtgaaaacagtcctgttcacaaagaaaaacgagaagcggcgaagaaaaaacaagaaaggaaaaaaagagcaaaggaaaccctggaaaaaaagaagctacttaaagaactgtgggagtcaagtaaaaaggtccactgagaaaagaattagagattccaactgacagaatctgccagaagctcccagggaataatggtggcgagttccatcaccagcattattatagtgcttcaaaagaaatatttttgatgaacttaaaagacaacaaatttatttaaatggtgcactaaactgtagtgaacagagacatgcacgattcaagaataaaactcggccgggcacggtggacggtgcctcacatctgtaatcccagcactttgggaggccgaggcgggcggatcacttgaggtcaggagtttgagaccagcctggccaacatggtgaaaccccgtctctactaaaaatacaaaaaattagccaggcatggtggcgggcacctgtaatcccagctactcgggaggccgaggcaggagaattgcgtgaacctgggaggcggaggttgcagtgagctgagatcgcgccactgcactcaagcctgggcaacacctgggtgacagagcaagaccccatctcaaaaaaaaaataaaactaggtcaagtgcaatgacacacgcctataatcccagcaccttgggaggctaagacaggaagatcacctgagcccaggagctcaagattgcagtgagctatgaacaccactgcactccacctgtccacttgttcttgtgtgacagaacaagaccctgtctctaaaaaataagataaaaccataaagaaacacagtcagtactatacaagaataatggctacttctagagggaaggagttgtcattgtgatgaggcacttggaggggttctggggtgcctgacaaagttctgtttcttcacctgggtggtagttagaagggtgtccccgtatttcaaattgtacctttgtgagattgtatgttttgtaataataaaattttttttgtaattaaaaaagtcaatttttatggagaact

SEQ ID NO: 35824 - DNA, 191 bp, Homo sapiens
cttggaagatatttttggtctattgcaagaaaatatgtattagctggcagggcatgtcctggtaacatggcagacagtgcaaggctgaggagaggggcgtcttgctgaataatgtgtctctactcatttcctaaattccctcggtaacagatgggtcatcatttgaattgctttataaaaagctgtctttg

SEQ ID NO: 35825 - DNA, 5692 bp, Homo sapiens
  misc_feature (3448)..(3448): n is a, c, g, or t
tttttttttcttaataggaaaattttttaaactatccaaattagtctgttgaaagggtaccttttttgctgatctctgatgagttgtcttttcatccctatctgtagcttgagtgcagattgacaattcatttcagtgaattactaccgaataaaagtggttccggatccctcctagataaatgtgcacttacagcaactacctaggctctccaaatcactccactcggtatgaaaaccccatcaagatactaatcgtaagagttaatgtggctgcaaaaaataattatcctaagctttcagggataaaaagaaaattacccaggttctctgcactgtgaattttgctgacacagcggaggagcagatgactggttcctacaactgtacagccttccttgaaatcatagcttttggggttaaacacttgtgaatttcttttgcacatggcatttgcttttgaaatgcctttagtcaaatacaccagagcaactcccagctgagaccatttgagcacagttcctagtggggccacattcagagcaagcctctcgccggctcactcagttgagctgttgcttagacaccacaagtttctacaagggacttatggggaacggccctcaggggtcctggttcacatctcagctttattcatgtgctggaagcacaaacagcgagtccagggagggattctgctaatcagatgagtctgctcttgtgtctctttcttaggagacaaatacctgtatgtaattgcttcaagaactccatttggttctgatcattaccaatgaatataactgaaggagcaccaaagatcaggcataacctcgggccagttcattctgaaaatgatgtcgtaaaaagagtatgtgtgagagaaatctccttcccaagtttttaaccagatctcgtcacaatgaggagaatgctataatctatctcatggtacatttttggagcttaattctagcatactcctccaagtacactcacaattgtagctgagtcaagactgctaaatgaacagataggagaacttatattagactaatatccttgacacgaagcagggttcattgtaataaaaacggcaaacagataaatcttctaccaaaaccaaagatggaaagtcactgcaccagtctcctggaacttcataaaatcaatttcactggagcaaccagaagggtcatggagatgtataccactcgcttgggctcgtaggtttttgactggggatgcctctacactttgtaagtcatttctcccttcaaaaattgtattatatctttaatatatgtgtatttttcaatgcgagggaggaattactatgaaccaaagatatcttttggctccttctgaaagtgactcagtttgaattccattcagatttgtacagataaatagatggtcaccatttctgcatcaggttggaagagaccaatgataaaggaacccaacgtaaggaatagcagttctgaaaatagacaaagcctagaggaggtatccatttcactgagagattacacgaggggacttattttttatgttcccaattttttcttctgataatattaatcaatgtacacatgattgatgcatgatattacacttaaaatgcaggagagtacaaaacaaccttgatccaatagtttcctattctggggggtgggggcagaggcggaaaagaaaacacatctttcacttacttattgaacaaacaataagcactcagaactaatttatttatgcaggttgcaaatatgtatgaagcaataggttctggccactgccacaatttgaaatcaataaaataagaaatatatatttatatatgagggaagatgctgtttgatagagcatgtgaaatcaatggaaacatatttattaaaagtaaacctcacctttttcaccaaatagtaactagagaactagtcctagtatcttgcgtaattcttctctgtcttcattgggaaattatgtttgaaaatctttcatcacctataaaatggtgagcctcttgtactttctattcagtgtagaaagagtggactgataaataactttacattgttggtagtagtttctacagatccagtttattgcatgtcgtatctttattgtagatattaaaaacacatgataaaaattgatgtgtgcccctccttgtttggccagtatcacagaaaactttgtaaaaaagcatggggaccctactccctagattatttgagccatttactaaaattggccattagtgatacagtgaaaacaagctaaggaaatgatattctcctaaaaagttatattccagttttgattattataacacagcacaataaatgggcagtatacgtctaatggaactgagatttaaggctttaacaattcgtgttttaaaatattatattgaagactgcacaaagagaaaattatacgtttctccaatcctgtgatcatgtctgtaaataccttgcaatttcaaattacttcatccgtcattaactatatgatctcccaaacacagccttctcaaaatcgataaaaatttgccactgaatatgcattaatagctataacaatgggtgacatgccacacaaatttagcttatgcaatttatggggtgtgtgtttgcagactatgaaatgtatgaagtgcagtctcccatggagagaatagagaggcaggatggcaactagtcatgaacgcaacaatttaggttaaatgataaagaatacaatgaaatgtccagagtaacacttggtctctacctttctaacattctaacccaaggccagtgtcatgggcttggctttcttccctgtcgcctcatactgagtatgcaatttacagaggacatctgttgctttatgtcttaaggccactagaggaagtcactacattcccaacaaagatgtgtctttcggcttagtgaaaaacatttaacaagaaacaatgtgtaaccaagtccccacagtaaaatgtgtcttcagaaacatgagaatcacttttatatagccaacctcatttgaattttatcatgaacataaattatcggtgagactggtgtgcggggctggatctgtgagacaagctcacactctcatgtgtgcattctctattaacatatttggaagattgcccacattttctctgcagacctgccacaaatccttaccttcttactgaagaatgtgactattgtagcattcgtgcaattatgccagcagaggaggcactagacagtttatagactcttatggaagttgggcacatttcccaggcaggtggaatgctagctagatctagaagcacccttaaaggtcatgtagaatcaaggtcccactttatgtttcccttgggagaaaactgaaacccatggatgctgtaatttgtttaacggcaaagaaagagccaagaattgtttctcgtagttccaggntcctgatctaggaatgtttccttggctccatggcatctcccagtttgacatagtgggagctgagaaatgccatatggcctcaaaataaataaacccttgtacatttaagtgttttcccagattttcagatgcctctactcttgctgaactcatcaccagctgtatcagtagagaggtgttatggggcaattcattagatttctggtaggtcatgaatggttggtataagctttatttactcatatattgtcatccagttctttgaaattcaatcttatcctaaagtggtagtcaaagtaaaacacattaagtaggtgtttgtgtttagcagtcctactaattcatcacaatcacatagtaattgtgattataatttttggaatctttatcactttctagcactttacggtgtcattatttatggcatttttaacaactttgttgcataattgataacatcagggctacatttttttcatgtgagcctcaagaagcttccattatcaacaagaattggggaaatgacttttttacattataataccttatatattaggtttttcctgataatcttcagtagacaatgatttaaattaactgaagtttaaataagaaatatgttaaaattactaaataatatgaaaaccacattatacttgtaattttcagacacttttctcctaccttaagattttaacatcttgtaaatattaatatttgaaggggagaggaaaaatacatttgtagtagaaatattccctctaacaattctgtttaactagtaagttttttttaagttatcttccatgcctgcttccctagtctgaactccacattccagttgtcagaagaatgaatggatttaaattttctaatcattattttgggcccatgttagcagttgaaacaattaagttcctcactctttcctgcttttaggatgattttagactgtgagcataaaatcaaccctttctgtcagcacagaattgaacatcgaatggagcaaggtctacactctcagcctgtagctgtgctaatgttaggattgaattgttctattaattccctcaagagacccacagcctcaaaagagttgcttattatcagatgtccgaaattcagaaacccaaagtcaggcaaagaaggaaactgagataatgatttaatttttttaagtcactgcaggatttctctcaaagaaaacatctgaaaatggttgagaaagtagttccagatcattaactattttacagagggactgaaagccagggaaaataaagaacagaatgatagtagtatcttgatattaaatttgcatcagaaatgagcaaaatatgtcaatatgaaataatttgaaatcaaattcagattcacatgtatagtgcatagttcaagaaataatgcttactcttgtaaaaaaaaaaatatatatatatatgtatcagcaggtagagtgtgggagctccaactttgttgtgaaagctgataacagagtatgattctttccagttacaaaatactgtattactttagttatagcaagcagtacataaatgacatcaacaactcaggctgctccctgacataaaagccagttccatctttactgcagatgacaggagactttccaagacctgcagaggccccctccaccccaaccttagtgcatgctcacacacacacacacacacacacacacacacacacatttttggcttttgacccactctgtgtgttccactgaagttatcttttccttaatagattcacacagaattaccccatcctgcaaaatccttatccctatgaatctctaaaatatattaaataatgtgttatatatttgctttttgtaaatctttatttaattaatttatatatactttgtgaagtcttatactgtacatcataaagcgatgtcatctgtagttggttcaatataatgtttatgatcattttgataagaaataactttggacattaggcccttgttaagaaataaaacacccattataaatttgcttctgttggaaaatacatgatttggcatacttcatttttagtaacaatctattctagataaatgataatttggggacatctgtacttaaaaactagctgaactacgttttgggatgagatgcaaagcaacagctgtccctggaactgaaatgtgaatttctagcagaacagaaaatattataataatgaggcaataataaaattaggaaattaaattat

SEQ ID NO: 35826 - DNA, 6175 bp, Homo sapiens
  misc_feature (3448)..(3448): n is a, c, g, or t
tttttttttcttaataggaaaattttttaaactatccaaattagtctgttgaaagggtaccttttttgctgatctctgatgagttgtcttttcatccctatctgtagcttgagtgcagattgacaattcatttcagtgaattactaccgaataaaagtggttccggatccctcctagataaatgtgcacttacagcaactacctaggctctccaaatcactccactcggtatgaaaaccccatcaagatactaatcgtaagagttaatgtggctgcaaaaaataattatcctaagctttcagggataaaaagaaaattacccaggttctctgcactgtgaattttgctgacacagcggaggagcagatgactggttcctacaactgtacagccttccttgaaatcatagcttttggggttaaacacttgtgaatttcttttgcacatggcatttgcttttgaaatgcctttagtcaaatacaccagagcaactcccagctgagaccatttgagcacagttcctagtggggccacattcagagcaagcctctcgccggctcactcagttgagctgttgcttagacaccacaagtttctacaagggacttatggggaacggccctcaggggtcctggttcacatctcagctttattcatgtgctggaagcacaaacagcgagtccagggagggattctgctaatcagatgagtctgctcttgtgtctctttcttaggagacaaatacctgtatgtaattgcttcaagaactccatttggttctgatcattaccaatgaatataactgaaggagcaccaaagatcaggcataacctcgggccagttcattctgaaaatgatgtcgtaaaaagagtatgtgtgagagaaatctccttcccaagtttttaaccagatctcgtcacaatgaggagaatgctataatctatctcatggtacatttttggagcttaattctagcatactcctccaagtacactcacaattgtagctgagtcaagactgctaaatgaacagataggagaacttatattagactaatatccttgacacgaagcagggttcattgtaataaaaacggcaaacagataaatcttctaccaaaaccaaagatggaaagtcactgcaccagtctcctggaacttcataaaatcaatttcactggagcaaccagaagggtcatggagatgtataccactcgcttgggctcgtaggtttttgactggggatgcctctacactttgtaagtcatttctcccttcaaaaattgtattatatctttaatatatgtgtatttttcaatgcgagggaggaattactatgaaccaaagatatcttttggctccttctgaaagtgactcagtttgaattccattcagatttgtacagataaatagatggtcaccatttctgcatcaggttggaagagaccaatgataaaggaacccaacgtaaggaatagcagttctgaaaatagacaaagcctagaggaggtatccatttcactgagagattacacgaggggacttattttttatgttcccaattttttcttctgataatattaatcaatgtacacatgattgatgcatgatattacacttaaaatgcaggagagtacaaaacaaccttgatccaatagtttcctattctggggggtgggggcagaggcggaaaagaaaacacatctttcacttacttattgaacaaacaataagcactcagaactaatttatttatgcaggttgcaaatatgtatgaagcaataggttctggccactgccacaatttgaaatcaataaaataagaaatatatatttatatatgagggaagatgctgtttgatagagcatgtgaaatcaatggaaacatatttattaaaagtaaacctcacctttttcaccaaatagtaactagagaactagtcctagtatcttgcgtaattcttctctgtcttcattgggaaattatgtttgaaaatctttcatcacctataaaatggtgagcctcttgtactttctattcagtgtagaaagagtggactgataaataactttacattgttggtagtagtttctacagatccagtttattgcatgtcgtatctttattgtagatattaaaaacacatgataaaaattgatgtgtgcccctccttgtttggccagtatcacagaaaactttgtaaaaaagcatggggaccctactccctagattatttgagccatttactaaaattggccattagtgatacagtgaaaacaagctaaggaaatgatattctcctaaaaagttatattccagttttgattattataacacagcacaataaatgggcagtatacgtctaatggaactgagatttaaggctttaacaattcgtgttttaaaatattatattgaagactgcacaaagagaaaattatacgtttctccaatcctgtgatcatgtctgtaaataccttgcaatttcaaattacttcatccgtcattaactatatgatctcccaaacacagccttctcaaaatcgataaaaatttgccactgaatatgcattaatagctataacaatgggtgacatgccacacaaatttagcttatgcaatttatggggtgtgtgtttgcagactatgaaatgtatgaagtgcagtctcccatggagagaatagagaggcaggatggcaactagtcatgaacgcaacaatttaggttaaatgataaagaatacaatgaaatgtccagagtaacacttggtctctacctttctaacattctaacccaaggccagtgtcatgggcttggctttcttccctgtcgcctcatactgagtatgcaatttacagaggacatctgttgctttatgtcttaaggccactagaggaagtcactacattcccaacaaagatgtgtctttcggcttagtgaaaaacatttaacaagaaacaatgtgtaaccaagtccccacagtaaaatgtgtcttcagaaacatgagaatcacttttatatagccaacctcatttgaattttatcatgaacataaattatcggtgagactggtgtgcggggctggatctgtgagacaagctcacactctcatgtgtgcattctctattaacatatttggaagattgcccacattttctctgcagacctgccacaaatccttaccttcttactgaagaatgtgactattgtagcattcgtgcaattatgccagcagaggaggcactagacagtttatagactcttatggaagttgggcacatttcccaggcaggtggaatgctagctagatctagaagcacccttaaaggtcatgtagaatcaaggtcccactttatgtttcccttgggagaaaactgaaacccatggatgctgtaatttgtttaacggcaaagaaagagccaagaattgtttctcgtagttccaggntcctgatctaggaatgtttccttggctccatggcatctcccagtttgacatagtgggagctgagaaatgccatatggcctcaaaataaataaacccttgtacatttaagtgttttcccagattttcagatgcctctactcttgctgaactcatcaccagctgtatcagtagagaggtgttatggggcaattcattagatttctggtaggtcatgaatggttggtataagctttatttactcatatattgtcatccagttctttgaaattcaatcttatcctaaagtggtagtcaaagtaaaacacattaagtaggtgtttgtgtttagcagtcctactaattcatcacaatcacatagtaattgtgattataatttttggaatctttatcactttctagcactttacggtgtcattatttatggcatttttaacaactttgttgcataattgataacatcagggctacatttttttcatgtgagcctcaagaagcttccattatcaacaagaattggggaaatgacttttttacattataataccttatatattaggtttttcctgataatcttcagtagacaatgatttaaattaactgaagtttaaataagaaatatgttaaaattactaaataatatgaaaaccacattatacttgtaattttcagacacttttctcctaccttaagattttaacatcttgtaaatattaatatttgaaggggagaggaaaaatacatttgtagtagaaatattccctctaacaattctgtttaactagtaagttttttttaagttatcttccatgcctgcttccctagtctgaactccacattccagttgtcagaagaatgaatggatttaaattttctaatcattattttgggcccatgttagcagttgaaacaattaagttcctcactctttcctgcttttaggatgattttagactgtgagcataaaatcaaccctttctgtcagcacagaattgaacatcgaatggagcaaggtctacactctcagcctgtagctgtgctaatgttaggattgaattgttctattaattccctcaagagacccacagcctcaaaagagttgcttattatcagatgtccgaaattcagaaacccaaagtcaggcaaagaaggaaactgagataatgatttaatttttttaagtcactgcaggatttctctcaaagaaaacatctgaaaatggttgagaaagtagttccagatcattaactattttacagagggactgaaagccagggaaaataaagaacagaatgatagtagtatcttgatattaaatttgcatcagaaatgagcaaaatatgtcaatatgaaataatttgaaatcaaattcagattcacatgtatagtgcatagttcaagaaataatgcttactcttgtaaaaaaaaaaatatatatatatatgtatcagcaggtagagtgtgggagctccaactttgttgtgaaagctgataacagagtatgattctttccagttacaaaatactgtattactttagttatagcaagcagtacataaatgacatcaacaactcaggctgctccctgacataaaagccagttccatctttactgcagatgacaggagactttccaagacctgcagaggccccctccaccccaaccttagtgcatgctcacacacacacacacacacacacacacacacacacatttttggcttttgacccactctgtgtgttccactgaagttatcttttccttaatagattcacacagaattaccccatcctgcaaaatccttatccctatgaatctctaaaatatattaaataatgtgttatatatttgctttttgtaaatctttatttaattaatttatatatactttgtgaagtcttatactgtacatcataaagcgatgtcatctgtagttggttcaatataatgtttatgatcattttgataagaaataactttggacattaggcccttgttaagaaataaaacacccattataaatttgcttctgttggaaaatacatgatttggcatacttcatttttagtaacaatctattctagataaatgataatttggggacatctgtacttaaaaactagctgaactacgttttgggatgagatgcaaagcaacagctgtccctggaactgaaatgtgaatttctagcagaacagaaaatattataataatgaggcaataataaaattaggaaattaaattatttttaaatctgtctgtgtgatttttccccttggtaaaaatacatgaaatacataattgaaaaattaccttcttctgaagtcgtagtttttaatcttaaccatcaataaataaacctattgttaacaatgtcttattcataattctaaaaaatttacaaatgatattgctatgaggttgtgcactattaaagtttgctccatcacttaaaggtaaagcagttcaaaaatactactttacatcacaactttgcatggctgagattttgaacaactaaattgatggttttacccacaagttatttcataaagctaacactgtaatattacttggttttcttatacttttgttatcatgtgatgaaatgtaactatgtaattaaacaaaattctgacaatcatattctgctaatgtttaaaatgttacttattccttcacttattagcttgctattttgaaaataaagtgaaagaaggccctttatt

SEQ ID NO: 35827 - DNA, 425 bp, Homo sapiens
tgagaatcaagaacaaagccagcgaaagaggagggagtgaataacctttcatttcaagctgctttccccactagagacagtcatgatctgtacagcactatttgatgcaaatgcctctcagaaaagagccagtggataatagataaaaagattatctgtgacattatgaaaaatgaaagtttaaaaacggctacaagtcccataaaaaaaaaatcctaaactttattcagtcttgttgaaaggcaacagcgggaactgtgttttgttcagcccctggggtccctgcctcttccgccattgttcttaataccttccaccagctcatctgtttttcaaaaatctttcctgctgcttttctctttgctgggggaacatagggtcccaggaggctattcacagctctgttttcttttccctaacggggc

SEQ ID NO: 35828 - DNA, 208 bp, Homo sapiens
aatttggggagtaaaactgaccttggaactcaagctcacttatggaaccatgtgcactctactgctgtaaacaagacaataagggtttttaaagatgttttttatctataaaataatgattcacaacatgagtgtgcagtgcaataaggttctttcctgaaagactagaacagaagaaccctttggaatgatatgagcagaatctata

SEQ ID NO: 35829 - DNA, 326 bp, Homo sapiens
agacagggttttgccacgttatccaggctggtctcgaactcctgacctcaagtgatcctcctgccttggcccaaagtgctgggattacagggctgagccactgcacccggcctgcttcttacactttaatctgcccatgattcacccagggatcctgataaaattcagactctgatccgggagaagcaatctccaggaagaacaaccttgtgatccagtggcccctgccttcctcaccctccctctccagccacagctgattggacctggggtgggcacctgagtcagggacccatgggctcacccacagtcagtgacaggatgcc

SEQ ID NO: 35830 - DNA, 561 bp, Homo sapiens
agctcactgcaacctctgcctcccaggttcaagcaatcctcctgcctcagcctcccaagtagctgggattacaggcatccaccacgacacccagctaatttgtgtgtgtgtgtgtgtgtgtgtgtgtgtgtgtgtgtgtgtgttttggtagagaaggggtttcaccatgttgcccaggctcttctcgaactcctgacctcagtgatcacacctcagcctcccaaagtgccgggattacaggcgtgagccactgcgcccagcctttccctctctttcgggggttctgaaagtgggggccagacagaatgaggaggtggggtgggcactgagcagccacagggttccccagccagagcctcctcgggctctagagcccgggagcaacttgcactctcggcctgcagggggtgccaacactcgggtgagaacttgatggcagtggctttggccaagatgggcccaggccttcccgcatttggagggaggtgtctgtgtgtgtttgcctgtctgtccatctgtctatccaaccctagctgccttcccctttaagtcacaccaccc

SEQ ID NO: 35831 - DNA, 983 bp, Homo sapiens
gtgtctgtaaggcacattttagtcttattttaaagaataataaaataatgaggatttattctgttatttggataaatccagaagaaacattttctacagaggtatgtattgggttgcttttctgaaaggagtaaatgatatatagagaatatatttttcttacccacttaaaatgaaagggcatcatttcaactttttgccaactgaacttcataagtgctttaaaatgaaccaaatgtcagacattctgtatgttgatgttttttcctcagacttcaatttttacttttacttacctgtgtaaaatgggaacacttccacattagaaggtagttgaagttaaatcacaagttgtggttgattgataggtctggaatgtttatggagtggtagctttcataataatagttgaagaaatatatgaaggtcggacatcaaagctgtccaatattggttccaagacactgaatgtatgggcagctagatggaagtagaattaagagaaaacagtgggattggatagaccaacagtaataaaaacaaacagaggcctcaaaggaaatggtatgaaacaaagaggaaaagtatttttcctatccagaacatgtaggttttctgatagctttagatctcactaaacaaccaaaatatgtaacagagataaagcactaaagaaaattacgcaggaagaagaaattagattttttttgaaaaaaaaaaggaaaagaaaaaatttggttacgtttacaaaagtgctataatagaagttttggcaaatttattactgcaaatgtttttgcactgatttcttggattgagtataatttaaggaaatagttttagataataggatttgaaggtaagtcaaataggcaaataaaaaagcagaagtataaagcgttgaggcccgtgcctgtaatcccagccactcaggaggctgaggcaagagaatcgcctgaacccgggaggcagaggctgcagtg

SEQ ID NO: 35832 - DNA, 668 bp, Homo sapiens
tgtaatcctgtattttacaattgttttcatggaaagagaaaataactaattcttcattctttaattgttgctctttggcaatacattgttttgagatttctcaacgctttatacttccatcaaagctgtccaatattggttccaagacactgaatgtatgggcagctagatggaagtagaattaagagaaaacagtgggattggatagaccaacagtaataaaaacaaacagaggcctcaaaggaaatggtatgaaacaaagaggaaaagtatttttcctatccagaacatgtaggttttctgatagctttagatctcactaaacaaccaaaatatgtaacagagataaagcactaaagaaaattacgcaggaagaagaaattagattttttttgaaaaaaaaaaggaaaagaaaaaatttggttacgtttacaaaagtgctataatagaagttttggcaaatttattactgcaaatgtttttgcactgatttcttggattgagtataatttaaggaaatagttttagataataggatttgaaggtaagtcaaataggcaaataaaaaagcagaagtataaagcgttgaggcccgtgcctgtaatcccagccactcaggaggctgaggcaagagaatcgcctgaacccgggaggcagaggctgcagtg

SEQ ID NO: 35833 - DNA, 417 bp, Homo sapiens
ggtcgtactctagaggtatcccctctcctatccagaacatgtaggttttctgatagctttagatctcactaaacaaccaaaatatgtaacagagataaagcactaaagaaaattacgcaggaagaagaaattagattttttttgaaaaaaaaaaggaaaagaaaaaatttggttacgtttacaaaagtgctataatagaagttttggcaaatttattactgcaaatgtttttgcactgatttcttggattgagtataatttaaggaaatagttttagataataggatttgaaggtaagtcaaataggcaaataaaaaagcagaagtataaagcgttgaggcccgtgcctgtaatcccagccactcaggaggctgaggcaagagaatcgcctgaacccgggaggcagaggctgcagtg

SEQ ID NO: 35834 - DNA, 335 bp, Homo sapiens
aaaaaaaaaaagaagcattcaaagaataatgagacatgtcaatagacaacaggagccagcttaaaggggtttccaatagcgaaatctgggacaatttgatcattagaataaccagggcagtctgcctaccaaactgcggcgggtgccgtgacagcctctgagcaggtccagaagggacccctttagctgaaaggcattgcagagctcagtgtgatcaagcagaagaagaaaaagaaggacaaaggcaaggcaaatttcctgaaagccatggcaatgagcaaaaagaacaagggggagaagcgacacagcctggacaagtggaccccagcccagat

SEQ ID NO: 35835 - DNA, 408 bp, Homo sapiens
tctagaacagttcacccaattgtgtttgtatgtctgcatgtgcgtgtgtgtgtgagagtgactgaggaccttttgcagatccagatcttaatttttttaaaagcatgtcctacaatctggatttgtctaattatttccattgtattagattcagtttaaacatttttagcaaggttactacataggcaatgatgtgcctttcctcttgcatcatgtcagaaggctcttaatatcaaatttccctgtaattgttgatgctgagtttgcttttaaaatggtgtctaggctggacacactggctcatgtttgtaatcccagcactttgggaggttgaggtgggaagatcgcttgagcccaggagtttgagaggagcctgggcaacatagtgagactctgtccctaccaaaa

SEQ ID NO: 35836 - DNA, 349 bp, Homo sapiens
gtgagcagaaaagttgggattttagcagctccggccagaggccatgccctgaatgacagcccctactgcctctcacttagcaaattcacagatctggcaacactgaacttgcagaactgtgtgaggaccaaagagggccacagggcaccttgcactgaattgggctctcaaaaaaaagtgttccctttcctaggccatggggcttcccagagccaagctgggacagaaggacagagatgagtagctgagcaggagttcctggggaataggtgcccagctccaggatggccagcatcggcccttccccatggctgcctctcaagctggagcgcactccaggacctgagca

SEQ ID NO: 35837 - DNA, 315 bp, Homo sapiens
aacagttcattccttttaacgctgagtagtgaagtatttcattgtctggaatgtatcacaatttgttgaactcttcatctgttgaagaatgttttggttgttgggatggttatgaattaagctgctatgagcatttgcctacatgtaattttttgggaacttacattttcaattcacttgagttagatacgtaggagtgggtcagataagtatgtgtgtaatttttatgtaaagatttgtaaatattttgtgaatctgtaacagaatgagtagcactttttccaggtgagcgtgtggattgccaagttgcataga

SEQ ID NO: 35838 - DNA, 248 bp, Homo sapiens
gctataatacctggcaatagaataattaagtgttgcccagggtcagaaaaacaagaatgatttgtattttaatcaataaaagcctgtagacgggagggggagtaacaaggaaacaatgtgatttattttctaagccggtgcctgtccacatatgcacagggtggcaagcagcatccagttatttccaagacttgaactctaaagtcagacagagtagggttcagatcctgggtctgccgtttagatat

SEQ ID NO: 35839 - DNA, 2158 bp, Homo sapiens
gccggacagagcagaagaaccctcttggactggacgatttgggaattcaaaacttgggacaaactgtcagccttgcccctgctgtggaggcagcctcaatgctgaaaatggagcctctgaacagcacgcaccccggcaccgccgcctccagcagccccctggagtcccgtgcggccggtggcggcagcggcaatggcaacgagtacttctacattctggttgtcatgtccttctacggcattttcttgatcggaatcatgctgggctacatgaaatccaagaggcgggagaagaagtccagcctcctgctgctgtacaaagacgaggagcggctctggggggaggccatgaagccgctgcccgtggtgtcgggcctgaggtcggtgcaggtgcccctgatgctgaacatgctgcaggagagcgtggcgcccgcgctgtcctgcaccctctgttccatggaaggggacagcgtgagctccgagtcctcctccccggacgtgcacctcaccattcaggaggagggggcagacgaggagctggaggagacctcggagacgcccctcaacgagagcagcgaagggtcctcggagaacatccatcagaattcctagcacccccgggacccctgcgggtggctccatcagccagcaaccttagagagaggaaagacagttttcaagtgtctggtttcactttcacagtgcggctgccactttgaagagacccttggtaaacccctgattcggggtggggtgggggactaggctcagccggaaccagcacctccaaggagtccgggaggtgcctgtggtttgcacccaccactgaaaaagccgcggagatgcgcagcgcgtacactgactttggggcctgggtgttggggttctgatcagaatttggcgggatgatatgcttgccattttctcactggatgccctgggtagctcctgcagggtctgcctgttcccagggctgccgaatgcttaggacacgctgagagactagttgtgatttgctattttgcctagagctttgtccttctagatctgattggctgtaagtatctctactgtgtacctgtggcattccttcacagtgggttacaagcttcttttggattagagggggatttttgatgggagaaagctggagatctgaacccagcccatttgcacactataagaaaaaaaagtaacttttaaacctgttaacattggccggggttataagagatgatcttctattttgaccttttgtctaacttatgaccttgaactctgacctgtgaccatgcagcatcacatgatggcatgacgttctttggatcagaagagcttccccagaatctaacctgcactcccgatggtggttcaggagactcttcctgatctttctagaaggggtaaagtggggttgaacaaggccaagccgttagctctgctgctgctcagtttcccagcctagttttctgagctgggagaggacataatgtggtatttcgtcacgtagctgagacctagaagggcatactcaggcggagattgcacaaagctgggctccaagttctgtgcttcctgatcccgagccctgacactcatttgctgtgtggtcccgggcatgtcatcaagaagctcgctgtctgcatgaggctcccgacgatctccatccccagggggttgggaggatgtctttagattttaggactctgtgataaatattccacagcctggtgtgaggaagcttggaccaaatgcttcccctttggccggttagtctgaacaaggatctgctgatttaaaggagcagttggagattcagaacacatataactggggaattcagggcaagctaccaacccagccctgctgtagttttcccaggactgaaggaaagaggcagacaccacattctcctctgcaaagttctctggagaatgtgtgatgttaacactcccagctaagggaaagcaaagtctaaaggaaaacacacaggaatgcttccaatgtctccaagtattcctgtggtcaacagtttcgcagatccgttaggcccttaaagacaaggaggaagtaaaaggtcaaatttaaatctatttaaaaaaacttttaaaaaaattatttatttattattattttttatttttaagacagaatctcgc

SEQ ID NO: 35840 - DNA, 909 bp, Homo sapiens
gccggacagagcagaagaaccctcttggactggacgatttgggaattcaaaacttgggacaaactgtcagccttgctccagcgccagagtggttcacattcaaccctcctcccccagtgcagagagctcccacgactgatgactcctgaaggaaaaccctggaggttcagctttagcttgaggtttcagggcttccgaggcaatcgggcagcatcagtcttcagccactaagctgagaagatctgggaaggagtcggtcggagagccttgggccagagttccaggggctctgggagtggctgccaggtaggaggtgggctgatagcacaagcattggagaccagaatcaagagctaccatacagttgggaaaactggctagccatatgcagaaaactgaaactggacctcttccttacatcttatacaaaaattaactcaagatggattaaagacttaaacataagacctaaaaccataaaaaccctagaagaaaacctaggcaacaccattaaggaagtaggcatgggcaaagacttcatgactaaaacaccaaaagcaatggcaacaaaaaccaaaattgacaaatgagatctaattaaactaaagagcttctgcacagcaaaagaaacatcatcagagtgagcaggcaacctacagaatgggagaaaatgtttgcaatctatccatgtgacaaagggctaatatccagaatctacaaagaacttaaacaaatttgcaagaaaaaaaaaaaacccataaaaagcgggcaaagcatatgaacagacacttctcaaaagaagacatttatgtgaccaacaaacatatgaaaaaaagctcatcatcactggtcattagagaaatgcaaataaaaaccacaatgagataccatctcatgccagttagaatg

SEQ ID NO: 35841 - DNA, 2596 bp, Homo sapiens
atggtccgaggggggcggggctgacgtcgcgctgggaatgccctggccgagacactgaggcagggtagagagcgcttgcgggcgccgggcggagctgctgcggatcaggacccgagccgattcccgatcccgacccagatcctaacccgcgcccccgccccgccgccgccgccatgtacgacgcagagcgcggctggagcttgtccttcgcgggctgcggcttcctgggcttctaccacgtcggggcgacccgctgcctgagcgagcacgccccgcacctcctccgcgacgcgcgcatgttgttcggcgcttcggccggggcgttgcactgcgtcggcgtcctctccggtatcccgctggagcagactctgcaggtcctctcagatcttgtgcggaaggccaggagtcggaacattggcatcttccatccatccttcaacttaagcaagttcctccgacagggtctctgcaaatgcctcccggccaatgtccaccagctcatctccggcaaaataggcatctctcttaccagagtgtctgatggggaaaacgttctggtgtctgactttcggtccaaagacgaagtcgtggatgccttggtatgttcctgcttcatgcctttctacagtggccttatccctccttccttcagaggcgtgcgatatgtggatggaggagtgagtgacaacgtacccttcattgatgccaaaacaaccatcaccgtgtcccccttctatggggagtacgacatctgccctaaagtcaagtccacgaactttcttcatgtggacatcaccaagctcagtctacgcctctgcacagggaacctctaccttctctcgagagcttttgtccccccggatctcaaggtgctgggagagatatgccttcgaggatatttggatgcattcaggttcttggaagagaagggcatctgcaacaggccccagccaggcctgaagtcatcctcagaagggatggatcctgaggtcgccatgcccagctgggcaaacatgagtctggattcttccccggagtcggctgccttggctgtgaggctggagggagatgagctgctagaccacctgcgtctcagcatcctgccctgggatgagagcatcctggacaccctctcgcccaggctcgctacagcactgagtgaagaaatgaaagacaaaggtggatacatgagcaagatttgcaacttgctacccattaggataatgtcttatgtaatgctgccctgtaccctgcctgtggaatctgccattgcgattgtccagagactggtgacatggcttccagatatgcccgacgatgtcctgtggttgcagtgggtgacctcacaggtgttcactcgagtgctgatgtgtctgctccccgcctccaggtcccaaatgccagtgagcagccaacaggcctccccatgcacacctgagcaggactggccctgctggactccctgctcccccgagggctgtccagcagagaccaaagcagaggccaccccgcggtccatcctcaggtccagcctgaacttcttcttgggcaataaagtacctgctggtgctgaggggctctccacctttcccagtttttcactagagaagagtctgtgagtcacttgaggaggcgagtctagcagattctttcagaggtgctaaagtttcccatctttgtgcagctacctccgcattgctgtgtagtgacccctgcctgtgacgtggaggatcccagcctctgagctgagttggttttatgaaaagctaggaagcaacctttcgcctgtgcagcggtccagcacttaactctaatacatcagcatgcgttaattcagctggttgggaaatgacaccaggaagcccagtgcagagggtcccttactgactgtttcgtggccctattaatggtcagactgttccagcatgaggttcttagaatgacaggtgtttggatgggtgggggccttgtgatggggggtaggctggcccatgtgtgatcttgtggggtggagggaagagaatagcatgatcccacttccccatgctgtgggaaggggtgcagttcgtccccaagaacgacactgcctgtcaggtggtctgcaaagatgataaccttgactactaaaaacgtctccatggcgggggtaacaagatgataatctacttaattttagaacacctttttcacctaactaaaataatgtttaaagagttttgtataaaaatgtaaggaagcgttgttacctgttgaattttgtattatgtgaatcagtgagatgttagtagaataagccttaaaaaaaaaaaaatcggttgggtgcagtggcacacggctgtaatcccagcactttgggaggccaaggttggcagatcacctgaggtcaggagttcaagaccagtctggccaacatagcaaaaccctgtctctactaaaaatacaaaaattatctgggcatggtggtgcatgcctgtaatcccagctattcggaaggctgaggcaggagaatcacttgaacccaggaggcggaggttgcggtgagctgagattgcaccatttcattccagcctgggcaacatgagtgaaagtctgactc

SEQ ID NO: 35842 - DNA, 1698 bp, Homo sapiens
cctctccatggtgcctctgctgggctcacatgtgaccaagcacagcaaaccatgaggcaggggatggtcttgaccatgagagcccttgcagcagctgccatgggcctcagctcctctccaagctgggaagagccctgaaaagccaaggtgtttttttttccctctttatttcagtgtaagtcccttgagctttcttgaaccagaagtgggctcattttgctttagagatttcaggtgggcttgtccttgtcctagcatcccagatccaccttctgggaagtcatcagattggaggtgatgttggcagcttttgtaaacaaagggtagtgttgtaagctgttgtgtctgcctatgtgtgtgtttgtgtacttggtctcatctctgcagactggtgacatggcttccagatatgcccgacgatgtcctgtggttgcagtgggtgacctcacaggtgttcactcgagtgctgatgtgtctgctccccgcctccaggtcccaaatgccagtgagcagccaacaggcctccccatgcacacctgagcaggactggccctgctggactccctgctcccccgagggctgtccagcagagaccaaagcagaggccaccccgcggtccatcctcaggtccagcctgaacttcttcttgggcaataaagtacctgctggtgctgaggggctctccacctttcccagtttttcactagagaagagtctgtgagtcacttgaggaggcgagtctagcagattctttcagaggtgctaaagtttcccatctttgtgcagctacctccgcattgctgtgtagtgacccctgcctgtgacgtggaggatcccagcctctgagctgagttggttttatgaaaagctaggaagcaacctttcgcctgtgcagcggtccagcacttaactctaatacatcagcatgcgttaattcagctggttgggaaatgacaccaggaagcccagtgcagagggtcccttactgactgtttcgtggccctattaatggtcagactgttccagcatgaggttcttagaatgacaggtgtttggatgggtgggggccttgtgatggggggtaggctggcccatgtgtgatcttgtggggtggagggaagagaatagcatgatcccacttccccatgctgtgggaaggggtgcagttcgtccccaagaacgacactgcctgtcaggtggtctgcaaagatgataaccttgactactaaaaacgtctccatggcgggggtaacaagatgataatctacttaattttagaacacctttttcacctaactaaaataatgtttaaagagttttgtataaaaatgtaaggaagcgttgttacctgttgaattttgtattatgtgaatcagtgagatgttagtagaataagccttaaaaaaaaaaaaatcggttgggtgcagtggcacacggctgtaatcccagcactttgggaggccaaggttggcagatcacctgaggtcaggagttcaagaccagtctggccaacatagcaaaaccctgtctctactaaaaatacaaaaattatctgggcatggtggtgcatgcctgtaatcccagctattcggaaggctgaggcaggagaatcacttgaacccaggaggcggaggttgcggtgagctgagattgcaccatttcattccagcctgggcaacatgagtgaaagtctgactc

SEQ ID NO: 35843 - DNA, 846 bp, Homo sapiens
atgctgaggctccccaaccccacgatcaccgaggatatttggatgcattcaggttcttggaagagaagggtatgtatgggctgggaggatcagccatgcccttttgacaagcatttactagcggtcttggtaaagacttgagatttgccttagttctaacacttagtgcccaacgccttccttgtgttcctcaacctactcatgagcccaggagataggaaatctccgtcccattgtacagatggggaaacagaattttggaaaggagagccaagcagcacacacccctccctgaggggcagagccgagatttgaactgggatgtcatgactccagggccctctccctccccagggtccccttatctgaaggcggtttttctttccagctcgacctcttgtgacccttagtttaacaagggccgaagttaaagagtttctgcgcctggaccccaaatgaagcaatcagatttctcatctccagtcaggtgtgggtccaagcccactagacaagtttgctcttcccagagcacatttctgccttcaagtcatcctggcttgtcagggctgggggagttctgctgtagaaatattagagtggaaggaaaaagatgtgttgggagctatttttctttaatactaaaagttggttgatgaatttgtcgttggccaagaccaaggagactgcatttttaaggacatatgtgtatttatctgctcagaaaatgttcattgctgtgtgctagggatactgcagtgaacacagaggtgtgacccttgccagccttgtgagagaagtgagcagataagtaagcagaagggtgatgctgtgatcgtggggttgtaa

SEQ ID NO: 35844 - DNA, 611 bp, Homo sapiens
gtgcagtggcgtgatctcaactcactgcaagctccacctcccaggttcacgccattctcctgcctcagcctcccgagtagctgggactacaggcgccagccaccaagcccggctaatttggtccccttatctgaaggcggtttttctttccagctcgacctcttgtgacccttagtttaacaagggccgaagttaaagagtttctgcgcctggaccccaaatgaagcaatcagatttctcatctccagtcaggtgtgggtccaagcccactagacaagtttgctcttcccagagcacatttctgccttcaagtcatcctggcttgtcagggctgggggagttctgctgtagaaatattagagtggaaggaaaaagatgtgttgggagctatttttctttaatactaaaagttggttgatgaatttgtcgttggccaagaccaaggagactgcatttttaaggacatatgtgtatttatctgctcagaaaatgttcattgctgtgtgctagggatactgcagtgaacacagaggtgtgacccttgccagccttgtgagagaagtgagcagataagtaagcagaagggtgatgctgtgatcgtggggttgtaa

SEQ ID NO: 35845 - DNA, 1216 bp, Homo sapiens
atggtccgaggggggcggggctgacgtcgcgctgggaatgccctggccgagacactgaggcagggtagagagcgcttgcgggcgccgggcggagctgctgcggatcaggacccgagccgattcccgatcccgacccagatcctaacccgcgcccccgccccgccgccgccgccatgtacgacgcagagcgcggctggagcttgtccttcgcgggctgcggcttcctgggcttctaccacgtcggggcgacccgctgcctgagcgagcacgccccgcacctcctccgcgacgcgcgcatgttgttcggcgcttcggccggggcgttgcactgcgtcggcgtcctctccggtatcccgctggagcagactctgcaggtcctctcagatcttgtgcggaaggccaggagtcggaacattggcatcttccatccatccttcaacttaagcaagttcctccgacagggtctctgcaaatgcctcccggccaatgtccaccagctcatctccggcaaaataggcatctctcttaccagagtgtctgatggggaaaacgttctggtgtctgactttcggtccaaagacgaagtcgtggatgccttggtatgttcctgcttcatgcctttctacagtggccttatccctccttccttcagaggcgtgcgatatgtggatggaggagtgagtgacaacgtacccttcattgatgccaaaacaaccatcaccgtgtcccccttctatggggagtacgacatctgccctaaagtcaagtccacgaactttcttcatgtggacatcaccaagctcagtctacgcctctgcacagggaacctctaccttctctcgagagcttttgtccccccggatctcaaggtgctgggagagatatgccttcgaggatatttggatgcattcaggttcttggaagagaagggcatctgcaacaggccccagccaggcctgaagtcatcctcagaagggatggatcctgaggtcgccatgcccagctgggcaaacatgagtctggattcttccccggagtcggctgccttggctgtgaggctggagggagatgagctgctagaccacctgcgtctcagcatcctgccctgggatgagagcatcctggacaccctctcgcccaggctcgctacagctatgatattggaaatggacatgtcttttcaaggaaaataaaagcaggctttctggaatggcga

SEQ ID NO: 35846 - DNA, 465 bp, Homo sapiens
acactctgtccccgtgcactgagcaccctttagttcatatgacccccttaggcatgttacatgggcactcctataggtgcccatctggccctaggacttggccaacacaacatggactccagtttccatctgcctctttgccaggcacttttgtgcagtgcacacactgtacaacagtagacggcaaccctgagagccagagtagagcctgtcctagcaccggaatgctcggtaaggatttgtcgcaggagtgattccaaagccaatgtcctccctccatatcagcctgtttgtggctctgagaagctctgcccacatgtgaaagcttgttaagcacttaagcactaacccagagcttcagacagtgccagtcctttttccccttctttaaaagcgatatgtggatggaggagtgagtgacaacgtacccttcattgatgccaaaacaaccatcaccgtgtcccc

SEQ ID NO: 35847 - DNA, 505 bp, Homo sapiens
gtcctgctttaaagccccatacccctttctccgggtgacaaacacctgtgctcgttctcttcccttcccctcttccccttgcatttggctaataacaggccagctgcctgcctccctgcagtttggtagatgggtgggtaacgaccaccactcccacgttcgcctgatgggcttgttttccgtgcccttcacaggcatctgcaacaggccccagccaggcctgaagtcatcctcagaagggatggatcctgaggtcgccatgcccagctgggcaaacatgagtctggattcttccccggagtcggctgccttggctgtgaggctggagggagatgagctgctagaccacctgcgtctcagcatcctgccctgggatgagagcatcctggacaccctctcgcccaggctcgctacaggtacccactcctcggggtgagcacgggcagcaccttgttttctttcttgtgcattatggaggaagatggtactgccacatgggagcgat

SEQ ID NO: 35848 - DNA, 304 bp, Homo sapiens
  misc_feature (277)..(277): n is a, c, g, or t
caaaagttttagtaaatagcaagttttctaaatgtagataaatgaagcatgtgtgcccagaaatgatagttgtgctgtcttcaggtctttcttgtatgtttgacaatgtaaaatgtgttgaggccaggcgtggtgctcatgcctgtaatcccatcattttatgaggctgaggcaggagaatcagttgaacccggcaggtcgaggctgcagtgagcagtgactgtgccattgccttccagcttgggtgacacagcaagactttgtctcaaaagtaaangtgatgagaaaaagaaatgtgataaga

SEQ ID NO: 35849 - DNA, 342 bp, Homo sapiens
ctcctattctttcctcaaccgatttcaacgagtcttggacatagactctcttcctggggcttcaattaccatctgtatgctgatgatggccaaatacacatttctagccaatgaataacctctgaattccagatctatacacagtatattcaactatcaatgctaaatatccactctgatgcttcaaaagcttcttaaaggcacatgtccacagactcatgagtcaatccctattaagcacacatataaatcttcctcctcttccattctattctgtctcagcaaatgaggccaccagctgtagaagccagaaacttgagtgtaatcctcaaaaccttcttc

SEQ ID NO: 35850 - DNA, 425 bp, Homo sapiens
tttttttttttggtggggttgaggggacataacagttttttcactcttgttaaattaattttctgttgattccatctatccttaatcttcattatgagcaacataccaggttttcttctgaagatcatatgtggtagtgaggcaataatgcaaagacataggatggcagggggattccggcttctttctttcttcccctcctgtggaaagagggtctataacactccgtagtagataggacaattctaattatgaagggtaattagctaggctctgctacaaccgagagccctgagagattcctcgacgctggctgcttttctcttcctctccaccagaggcgacagcctctttccaaacagaaactgggttggaataggccggtccgggggaacggccagaagaaagatcaaaggttaaaaacc

SEQ ID NO: 35851 - DNA, 473 bp, Homo sapiens
aatactaagctgaaacttctgacaactaattattatgggggacacaataaagattgaaagcctaggttaccaagttggttttagctttctagaatctttgtaaatactcacgttcaaataagatcacacgtgcatatatagaaagcaatatgttctgaaatttcactttagtgccactgtttgtccataatggatttattgccaattttgaatcctcatcttactttgatctggcttttttttcccccccttgccagaatgtttaggagaaagtaaaattattccgttttactttggctttttgccagagatacaaactaagaatagtctgaatatgtgtttttcagatctggttacaagacggattatagattgtgttttagagcaatgttgtgattgaaatataaataatggtataactttttttgtgttagcaaaaacaacattaaaaaggttatgttacataatatgta

SEQ ID NO: 35852 - DNA, 382 bp, Homo sapiens
aacttaacaagaattcatatgcagaaacccataattctcagcagttctttagggtaaatgaaactaaagtttagggagagagaacaaggagaatttgcaaagatatgtatgacagtatttaaaaatgttcttccagcacaaagacattaatcttcctttgtcaaaataattctttctgcatgaaaagttggcatggggctcccaggcttcaggtaagatgggagaaagggagcgtttctttttttttgtaccaaagtactcaatcttctgatcttccttgactttcacgacataggcatatgtctactctgaccagtttgtttcatttattgtggtaagatgtgcttgtcttgtgctttcctggtgcagaaaaggagctgcc

SEQ ID NO: 35853 - DNA, 347 bp, Homo sapiens
ggcagaggctgcagtgagctgagttcacaccactgcacttcagcctaggtgacagagcaagactctgtctccaaaaaataattttaaaaaaagtacaggacaaactatggcaaaatgggaatctgaccagccgaccggacaaaggcttttgttgatagagttgataaaggagacctcatcaccagacatcagcatttcccaaaaacccataagtgaataaatatgaaagtaagagaagttatcacataatgcaaaataaaattcagagcaaatgaaatatacataaacataaatggaagaaaaggtggaaaagaaagacaaatagatactataatatagagaaaaag

SEQ ID NO: 35854 - DNA, 572 bp, Homo sapiens
acatatcttgccagaatctctcttatgatacttagaaagttttcatgtacttggagctaaattagtccccaaaccaaattcattattttcttcttaaaaatgtcttttacttccttgaatctgcttctgtatttcccatgtaaatttacaatgtattttgtccagttactgagataaatacctctacttttgcacctagacatttaggagccattgtttactaaattcatttgatgctgtcttctaaaagaactaaaatctagcatctcctcttcatacctcctgccactgtctttcattttccatacctggagttctgatagtagatttttaacgagcttttcccgtctctgtcttctacctagatccagtatatttctgcagtctggtatgtttttccccctaagaacctcagctgagaaataaagcaggttaacaaagctgtatgaaatgtcactggcagttaaggaaattctagttgaaacaatgggtttgctaatttcactgacgattagaaaaggtaatagaaattagaaaccaacattctcagatacttcaggtgggaatctggt

SEQ ID NO: 35855 - DNA, 374 bp, Homo sapiens
gatgatgcctgtcttgctaggatcacattttgagtagtaaggattaaaatagggagaaaaagagataggctgatcagttatgaagttatttcagtaatatacattactaaaacatatgtatatactactgaaaagtttttctacttatactgtgttactagccatttttaaagtgcattataaaccttaactcatttaatcttcctaatagctatatgaagtaggtgctattactacccccattttgcagatgagaaaactgagagcaactttccaatgatagagttagtaagtggtatatccacattccaaaccaggcaatgtagttggagttctaatttagttctagttctttgctcttaatgactactctg

SEQ ID NO: 35856 - DNA, 387 bp, Homo sapiens
ctaaggatgtccaacttttccagcactgtctgtttaaaaggctattcttcctccattgacgatcagttgactgtacttttgtggatttaattctggcttttctattcaatttcattgatctatctgttccttcactaatatacatcgtctctattgtctgttgctatgaagtaaatcttaatcagatagagtgattcctcccatttaattctttcaggaaattgtttcaattattctaatccattgcctttccacgtaacttttataataatcttgtctaagtcttcaaaaaaaccttgctggagttttgataagaattgtgttaaagtaataagtcaatttcaggagaattgtgttaaactaatggagaattggcatcttcactat

SEQ ID NO: 35857 - DNA, 313 bp, Homo sapiens
aactggatgtctttgggcatgagagccaactctcttaccgtagatggcacacaaattagcatcttcaaaccaacccaccaggtacacttcactagcctccaggtacacttcactagcctcctgcagcaccccaatgactgtgctctgaaacctaaagttggttttgaaatcctgggtgatctctctcaccaacctctagaaaggcagcttccagatgagaagctaggtcaatttctggtaacgagaatctctagaagtgccacagtcccaggcccgtagcgatgaggtttcttcaccagaccggtagagggga

SEQ ID NO: 35858 - DNA, 932 bp, Homo sapiens
ttcttttttttcaagctgtagaatttctctgccatgcaaaacttgttgataataatataacaaacatttccatctctattgccctgcttaggaaataaatcttacggggacactggaagactcttgggtgtcccttcctgatcctgttccccacctctgtcaccaggggtaacccaaacctgaactgcgtgtttatccataaatgataagtggtattgctttgcatggttttaaactttcagtagcggtttctgtcttttattcattcataaactcacaaacatatacatattgagaacctactgtatgtgaggcaccaacctaagccctgggaacatccgtaaacaacagagaggattactgctctcatgggacacacattctggtggggtgagccaaaccataaacaaaagaattgaagaacacaagtatctggcatgaagaaaatatcctacaagtttgcagagaaaaagtggatttcatacaaaggatcatggatccgaatggcactggattctttaacagcgtcagtgggaaccggaacatgatggaggaatatgttcaaaattctgaaagaaagagtttgtagttaaattagtgacgaaaattagtaaaccaagccaatggtaaaaacgagacaattgggccgggtagagtggctcgcacctgtaattccagcactctgggaggctgaggctgtggatcatctgaggtcaggagtttgagaccagtgtggccaacatggcaaaaccccatctctactgaaagtacaaaaattagctgggcttggtggcgcgtgcctgtagtcccagctactcaggaggctgagataggagaatcacttgaacttgggaggtggaggcttcagtgagccaagactgtgccattaaactcccgtctgggggacagagagagattctgtctcaaaaaaa

SEQ ID NO: 35859 - DNA, 355 bp, Homo sapiens
taaacctagaggaaattatgctaaatgaattaagccagtcacagaataaccaatactgaataattcaacttatatgaggtatataaaatagtcaaacttataaaaaacagagttaaatggtggttgccattggctaggggaaggagggaatggagggtaaaacggataaaaagtttcagttatgtaatatgaataaattccagagaactgctgtatgacattgtgcctgtggtctataatactgtcttgtgcacttaaaaatttattaagggggtagatgtcactctgtgttctcatcactaataaatacttattaataatcaattgataattaaatataaattaataaaacatt

SEQ ID NO: 35860 - DNA, 382 bp, Homo sapiens
agaagtctgaaatcaaggggtcagcagggttggtttcttcagcagagtctacggaagaatccctcccacatctccctcctcgctttgggtggcttctggccatccctgctatgccttgacttgtagatgtcactcccgtttctgcttgcatctttgcttggccttcttccctacgtctgtgtgtctcctcttcggtctcttctaaggacatgtgtcgttagatttatggcccaccctagtccagggacaatctcatcttgagatccttaatctaattacatttgcaaagtcccttttcggcaataaggtcacgttcacaggtccagagattagggacttaaacatatcttttctgggggctgggggggacactattcaaccc

SEQ ID NO: 35861 - DNA, 334 bp, Homo sapiens
cttaggaaaatcattgggaatatctctaacttgtgatttagtaggcttggaaaatgtcatataaaaagttgaacttttaagctgggtgtggtggctggtacctggaggcccagttacttgggaggtggaggcaggcagaattgcttgaggccaggagtttgagaccagcctgggtgaacagaacagatctcctcttggctctaaaaagtaaaaattgagaagtaaaggaaattaaaacaaaataaaagttgagcatcatagcatgtgcctgcagtctcaactacttgggaaactgagatgggaggatcactcgagcccacaagttagaggctgc

SEQ ID NO: 35862 - DNA, 426 bp, Homo sapiens
ttttgttaagcccctgttataagcaacgcactgttgggggtggggaaggcagaaggacaaaaagaaaagatctaatttgagctcaggagccagacataaaagcaggaagtgttaacaatgcaaaagataccaaacaaaacaaaaacccaaaaaaaagtacagggaggggggtgagttggcaaataattaatccatctgtagaggaaaccaattattttgtctgctaaatacgcttcccttcttctaagaataaaagaggtttcctctacttctgggtgttgttccttccagcccccgacctcgaatcctgtaatacccacgggaactgcactttctttcatggtcccactcccctgaccataattgattggtaaggaatgagtcctagcagcatgtaagtcctccggtgccagtttcttcctgtaa

SEQ ID NO: 35863 - DNA, 435 bp, Homo sapiens
cgtagccccctgagggctaccagcatcagtctcacttgccagctatgttcagggtcttcctatcagggaatctcatccatagccattggtagtctctgtctgtcttgctgacacttagaacagttctcactggcattacgtgcctgtgagggtgcaaaaggaacatgtctttattcatcctatgtctgcactgctgcagtacccctatgtgtgctcatagacacatagcacacctgcttgctgattccagtgaccttcccaatctggaagggagttcttctgatgggcactgacttgttctactttaatgcacccctcaaatttccataggttgtgtggccaggccattgattactgcctgtgagtcagtaaaaaaacctcaaacacaggggcttccaccactgttcagttctgccattactgtaaaaacaaaac

SEQ ID NO: 35864 - DNA, 265 bp, Homo sapiens
aaattgcgtttccaatagaattgtttttaaattactgcaatatatcttttgagatggagtcttgctctgttgcctagggtggagtgcagtcttatgatctcgtctcactgtaacctctgccttctgggttgaagagagtctcctctctcaccctgaggttacaggcgcacactaccacacttggctaatttttgtatttttggcttctttttgagatggagtcttgctccgtcgctgaggctcaagggcagtggtgcgatcttgg

SEQ ID NO: 35865 - DNA, 372 bp, Homo sapiens
actgagacacaacctgttcttatttaacactttctagggaaagaggccctaggatttgccatagcaaaccattactgcatctaatatcaagcaccctggaagtaagaaaataattatgatcaagctggctattttatttcccagaccacagagtctggaagaaactatttgcatacatattaatggatcagaagtaaattttacttttggaaaaagaactctgttctttatctctctcccattaagcttgggcctgggctatggtgtatgaaatccaatctccaataccaggaaatgattatttatttgaacgctcccctaaaacccattaagtgctctggagtgttagtttgggatgacagatttcgtagc

SEQ ID NO: 35866 - DNA, 348 bp, Homo sapiens
agcaaggagcgtcgacggaggagatagccacgagaaccagaaagtgcagaatgagcctcctccccatcaccaccacccccgccactgctggcagggaacacaccaagatcttaaaaatcatcagtttttagggccgggcacggtggctcacacctgtaatcccagcactttgggaggccgaggcgggtggatcacgaggtcaggagatcgagaccatcctggctaacacggtgaagccccgtctctactaaaaatacaaaaatattagccaggcatggtggcaggtgcctgtggtcccagctactcgggaggtggaggcagtagaatggcacgaacccgggaggcgga

SEQ ID NO: 35867 - DNA, 391 bp, Homo sapiens
gagagattctacaaaacaattgacttgtaatctccaacagtattaaggtcacaaagtcaaggaaacaccgagaaactgctgtgactcaaagatctaaaaagacgtgacaactaaatgcaacaaatgactttgaaatggatccttttgctgtaaagaacattactggtgactcttcatagggatccgagcattagatggtagtaatgtattaatgttacttttgatggttttgtagttatataggaaaatatctgtaggaaatacacactgaagtattcagggatgatgagacatcaagaaggcaaattgctgtcaaatggttcaggaaaaacagtttgtgattgctctagtctttaaaaaaaattagtaagaagaaacaaaagatttgaaa

SEQ ID NO: 35868 - DNA, 417 bp, Homo sapiens
aaaaaaccacacacacatttcaatctactgaatttgctcttgtcaggattaatccctccatttgctaagcccagtgctcatctgaattttgacagcattgaccctgaacctttgctttcgtcacattttatgagggacagtgacccagagaagagaaagatagtcataggtctgaaaagagaagaatgtgttctgttgtgttcttcaaatcagaaactgggccaatgggctaaaactacagggagacaaatgcattcttaatccaaaagtgcatagtcctaaccatgccccagacaacttttttttttctttctttttttttttttttttgagacaggatctcactctgtcacccaggctggaatgcagtagcgtaatcacagctcacttcagccttggcctcccaggctcagggaa

SEQ ID NO: 35869 - DNA, 402 bp, Homo sapiens
tttttttgaaacagagtctcgttctgtcccccaagctggagtgcagtggtgcaacctctgctcactgcaagctccgcctcctgggttcacgccattctgcctcagcctcccaagtagctgggacacttttggtttgtatttgtcacaagcaacgtgcttaatcaagactggaagaagctgactcaaaatgaaaggaagaacattgaatttctctcatctatctctactattttaagttttaaaagatcacctagaactgggatggattattacaaaaggccacaaatggctcttattactgaatcctttaatattctgatcatgacaaaaagcaacgaacacttgttatgggcttaactttcaaacaaactaaaggagaaaagaaaaatgttatttaaatag

SEQ ID NO: 35870 - DNA, 359 bp, Homo sapiens
gtgtgaccccattcgaccttttaacaaatccctaagtaaataaatagcccctaaggtaaactaagtttttctctgctgtttttttgcttgagagagctataactgtaatagacttatatttctgaacattttagtgcttgccaatatttggtaatatttatgtttcctatatttgtaatgaacattcttcttcaggtacattttttgttaaattattgtttcatgcataaaagttcaccttttattgtataaaattgactcagattaatttatacacattgacaatgggtaaatagagtttttcagattattaaaagctgaaggatgcccatgtaagcaaaaaaaaaagagaaaaaacc

SEQ ID NO: 35871 - DNA, 952 bp, Homo sapiens
tttgagccgaggagtgacaggacctaacttatattttgatgggctctctctctgtttcttgcatgtttgccatttgcccccttcccccttattctatctcagaacccctgcttactcatgttctgtgttctctaacatcagtctacatgtggcgttgggtttggtgttgtaacaactggtgacatttcagttcatgtgactactatgacctaatcactcagtctctcagtgtcccaattccagattcttgggtgacataatattagactcacatattattagactaactaatattagcccaccatggtacagcatgctgaggctggagtcagaagtgagcagaatcctgtaatatttccaagagggaatatgggcagacaggcaatggttagcacatcaacttcatcaagtacttcaaatattttggtttctcaataaatatatacatgagttaataaatctagcatatttagtaaacaacttataatcctacctactgttgtaatgctcagtaaccacttcagagtaacagtaataataggtgactttatactaaatgatggctttacactaaaacaggtttctaaaactatctgtggtaagaaccagttttcttatttgtatttccaaatagtctccataggagaatgatgtttttgtaaaatatgcctaaaaatgaattccttgacaaattaaattttaaaaagatatgcaaaattgaaaaaattttttttgttattagattcaacagacagaagattgctacgtcaaattgctctaggtttctaaatgcttagtctcaatttctgtactgatcacacaccagtaacagttccatactttaaatagcactgtactaaaactcacttatctaaatagtaaattttataataatgatggtcaattaatggcatttaatattctgaatgaacattaaagaatgtgaagttgt

SEQ ID NO: 35872 - DNA, 421 bp, Homo sapiens
gcctttactcctatagatggtggctcctctggttacgatttcagaattcaacatgttttacaatcaaaactagcatttgataagaaataaaaatcaataacccagccaaacacaccatccacatactcccaacgtgagagcaggaagaatcttgtgccttaactcccttcctgccatcagctccctccctccctccctccctcctccgtctctagcccagcaatccctctactccagttttgcccagctattgggaatcttggacagcttccttaggcccctgtgcatccaggtagggttggggcagcagaaagcgaagacccactcaagacagaccttgtcagtgcgtgcttgactcctggtcttttctgatgctttgtttgactcaacatacctcctccaacaacctgatttgcattga

SEQ ID NO: 35873 - DNA, 506 bp, Homo sapiens
  misc_feature (146)..(146): n is a, c, g, or t
  misc_feature (180)..(180): n is a, c, g, or t
  misc_feature (217)..(217): n is a, c, g, or t
  misc_feature (229)..(229): n is a, c, g, or t
  misc_feature (272)..(272): n is a, c, g, or t
ttttttttttgagacagtcttgctgtgtcacccaagctggagtgtagtggctcgatcttggctcactgcaagctcctcctcccaggttcaagagattctcctgcctcagcctcccgagtagaagggactacaggttcccgccaccnacgcccggctaattttttgtatttttggtagagnatggggttttgtcatgtaggccaggctggtctcgaanctcctgacctcngggcaatctgcctgcctcagcctcctaaagtgcggggattacnaggcgtgacacaccgcgcccagccgtccttggtttctaacagataatctgtccagtctttggcaagctctggcaacctcatcagctttagtgcctcaggcctaagaaagaagagcaaactagagcagagagctaacctggagcacttggggcggcctctgtgattcacgaactcactgccatccccattcaggcgagtatttctaggtccaggcagggggacacacagagaaac

SEQ ID NO: 35874 - DNA, 573 bp, Homo sapiens
cagtcatgatcaaagtcaactatcaagtctccctgagaaggatttggtcctagctccttaaaaacctgaggaagttttattaaaattctgggcttttgttccccctccaactaaatccctggagaacagctccccaaaccctgttctgagcaaatgagcgtgtatctgctcactgtatagactcagatgacgaaggcgggaagttcttcttgggcacctcagggagccagagatgcagagacgggagtagatcgtgtcaccagggaaatgaggaggcctatgtgcccactccctgctaatctgggactggcatggagaggctcaggactcacctgcttgactgtacagctgcatttctagtgaggaaaagttccacattcaaggattccaggatgaattgcctgtttggaaaatctgaatttttaaataaaggctttgcttaagcaaagacatacctgtctctctggccagggagagcctgtattctccctcattcctcacccccaccctgtgctgggccctcattcccgtctctactccaggtaggaaaaataaataaatttcaaagtcttc

SEQ ID NO: 35875 - DNA, 334 bp, Homo sapiens
tgattataccctgaaaactacaaaccattgctgaaagaaattaaagacgatatcaatatatggaaagacatttcattttcatggattggaagaatcaatattgttagaaagacaacattacccaaaatgagttgcagattcaatgcatcccctaccagaatcacagtaacattttttgcagaattagaaaacactgtcctaaatctcacatgacaggctcttattaatgactgacacaacacaaacactgagaaaaagaggtaaccatgaaaaggtggaaagttctgatgacatagaaaatagcaatcagcctttctcacatcccaaggccttc

SEQ ID NO: 35876 - DNA, 429 bp, Homo sapiens
atttagattgtgtttattcatctaccacttaaagttgaacttactctgataaagtttgtctcaggagaaattaatgagataaaaactttgctttttcttttctgaacgatttcttttgtgacaggtgaagaaggtcattgtatatttaggtagagataaaacaatgcagttgctagaagagctggtgagtgagcttcagctgaccgatcctgtcagttcaggggtcactcacatggataatcccccgtattatcgcatcacttccagctataaaatcccttctgtcacctcaggtgagaaatttgttaaaaccgattgctgtgtgagatgatagacatcttcatctgcttcactatggtaaccattttagggtctctatgtcccataacatgttatgaatctcagatatatacaataaaatttattaaa

SEQ ID NO: 35877 - DNA, 879 bp, Homo sapiens
gcctcagctgcttaaaaaccattgaaaatggcccatggccttgtccatctaacagagtccagtaaaatcctgacaatggaatggggagagagaaagtgagaaccaccaaactcagcacaaaacgactgagtttaaacctctgtgctaagagatgatcagagtctatcatggcttctagtagcatgagaccatgtctcacgaatgaccctaggctcccatgacaatgcctacctaagaaagctcaaggctgccaggggaacttactttagtctagccaatacttgatgatggcagtttcaggatctttctttcttatagcacttactaagaagggaatccttcctccatccctttgatatatgtgtgtatctcctagggacttcaatgtatctttgcccaggatctgaaaggcaatacttttgaggtgtagtcctcaggaaggactgagcctctgtcttccagtctctgtgggaggttagaatcctaacttctaatattgccagctggcagacacagctgtcctgatgaggcagacatttaaaatgaccaatcttttgtaatgtttcacttgtgccctgccccctgccctctcccctgcctctctctcccattagaatgccatcacctctgcacaaatgcgaacagaaccagccccttcctctacggtcagtagttactgaataaaattggttttcatcgatttgactaatgtctgatatatctttgacaaaataagtgtgaatgattgtttttagagacacggcagctgcaaagagaggcacagacatggcaggagagggaggggtcacctgacccttctcatttcataggcatctattcctgcctggtgtttatgagcctgagacttggcagggctgt

SEQ ID NO: 35878 - DNA, 531 bp, Homo sapiens
attaactgttccgggtgtctcctgactttcagtgcacggccacatcatggtacctaacttgtggcaaattgttgctttataagtaaggatccagtccaagttcatgtactacaattggttactttggtctctttgcttctgaaacagtccccaacatttattgtggcattgacttttttgtagagtccagggcattctaattttatagaatgccctgctcttgatctatcagacgaaatgcttcctcttgcatttaacctgcttctccactctctgggtttcctgtacactggactgctggtagaagcctgattagaagcaggtttaatgtggcaaaaatttctcctagcagtgcaaggcccccttccccagaaggcaggcagtgtccatctgctccaggattggtgtgtttttatcaagaatggatgttggattttggcagttcccttttcggcagctcttgagatgatcacgtggtgaatcattttctattactacagtgaattacagtcacttgaattccatcctact

SEQ ID NO: 35879 - DNA, 342 bp, Homo sapiens
atcaaaaggaagaaatgagaaaaagaacttttatctgaagaatgcaagtcctttccaattatcagatccagagaggtattaaaatgagacggcaatcctgtcctacacacacccccttttgaggcatgtactcatctttttatactgcttactattgccacaagtagctgaaaattagcctactggtgctgcaccagacattataacccatatcctatagcttaataatggatagccaatcaacagcttatgttatgttaatgtaaattattggtaaataactcaggaactgcctcttctttccttttaaaaacccacttgtgggccgggcgtggtggctca

SEQ ID NO: 35880 - DNA, 119 bp, Homo sapiens
gtttggtcccataagtcgtccagagcatacctcttctatttgtgtccctgttgtctgtcttggaaaccagtgcccgaataatgaaagattaatgagatcatcttcagccctgctttcgg

SEQ ID NO: 35881 - DNA, 428 bp, Homo sapiens
ttagtttgggaagatgagagggtgtggttgagaatgatttctgaaaactaagtgaacaaacactcaagaagactaagaactattaattggatttggcaacgtgggggtcattggtgaccttggttaaatgtatttttgtggtggtgtggcgataatggcctgattgaaatagattccagaaagcataggaagacagaaattggagatgtgctcttatacagataattcagagttgggctttatacttgtgtgaagaaacttgttattagctggaagaagatatatatcgaaagaattgatttaatgatggcagaagtcatggcatacttgtatattaataagcataattaaatggaagtctggaaattgaggaggcaggacagaaagaagaagactaaatgtagagacgtatttgagagggaatgggt

SEQ ID NO: 35882 - DNA, 1636 bp, Homo sapiens
aagggtcttcctcccccgggattcagagcggcccctcctccaggccaggctcgccgcggggcgctgagcaggcccggacaccgcggccgaggttatcgttaggcatctcccaggcgaccggctccgcagcaagatggcggacgagaaggacagggaagagagattggaacaattatcaggtcattaggatgctgtcctacggaaggagagctgcatgatctgattgcagaggtagaggaagaagaacccactggatacattcgattcgaaaaatttcttccggtgatgacagaaatactactagaaagaaaatacagaccaattccagaagatgtccttcttcgagcttttgaggttttagattcagctaaacgtgggtttcttactaaggacgagctgatcaagtatatgactgaagaaggataacctgagattttcccaaggtaaaatccaaatagagacctgatgtgccactggctcggccgtgcatgctagaatcaccagccagagatgaggatgaaccgcgtgccttcaggacagggcggagacggaggaggaaaggagtgtggtgatcctcggaacatcagcagacaggctgttgatgataggaacacattgcagcggggaaggaggatggctgagatatgaaatacccttcaaggtggacgcatacccaggggcatgtcattcggtggcaggggccagcacggacatgcagcactgaggcgtgtgctagcgcccaatgcgtcgacccaggcacggacttgtttggagcatacaggacagctctgcgttaagacctgtaagccattaaagaagtacagtctggtgaatgaaccctaatctcttgatgatcaagtgatgacatcatattctgtctccgaggagacaccctcttgcacagaaggcagtagaggaagcttgcgtcgagattgcctacctccccagccccaccttcgagggttctttcaaaagttcggactgatgttcaacttcacatcttgtctcaaggcaatcctctctgtttagtctcatagagttggctttgtggaatgtaattcatttttatctttagcacaaatttgtctgtttcttttaaggccaccagaaagcacaacatagactccccacagaaatctcattttatctcctaagttgcagaataaacgtaccttgtttgcaaagggaacattttcctttacactcaaatcacttcaatgtgtattttgcctcttcagctcactgacctcgcccgcagcatctgatgtaagtcaccatatgccatttcccgactaggagagtgcttggcctcttgtgcaggaagtttgcttaccctcatgactcctggcttccgcagagcctgccataccccacagcttggccgggccctgtggaaagccatctctattctcacactgctggggaaggtgcatgactcaggacccgacacacaggcctgagagtctggcgatcttgtgctctgatcccagcttcatgtgtgactcactctggatcaggcgcttcacttcctgtgcacctctgtctgtaaaatagagagcccagctctagtccttctccctcctgagaagcaatgcagagatttagtcccctttgcagtcacccagtgtctaagtac

SEQ ID NO: 35883 - DNA, 1538 bp, Homo sapiens
tggggtcatcctggactctggcctacgtgtctttgtcctactcatggcctagagaggtaggatgaccgtctgtcctgctttgcccgtggtagttccagactatacctgtcccagtgtaattattaataggtctcctttgtactcttagaaatgttccagtttagatgattaatatgtggtcatcccattcaaaaaatagtgagtaaaaacggtggtgaggaatcgtcacttctggaaggcttcctgacagataattccagcagtggtaagaatggaaggcatttcttccttctctagtttcccaagatcatttttttccccaggataacctgagattttcccaaggtaaaatccaaatagagacctgatgtgccactggctcggccgtgcatgctagaatcaccagccagagatgaggatgaaccgcgtgccttcaggacagggcggagacggaggaggaaaggagtgtggtgatcctcggaacatcagcagacaggctgttgatgataggaacacattgcagcggggaaggaggatggctgagatatgaaatacccttcaaggtggacgcatacccaggggcatgtcattcggtggcaggggccagcacggacatgcagcactgaggcgtgtgctagcgcccaatgcgtcgacccaggcacggacttgtttggagcatacaggacagctctgcgttaagacctgtaagccattaaagaagtacagtctggtgaatgaaccctaatctcttgatgatcaagtgatgacatcatattctgtctccgaggagacaccctcttgcacagaaggcagtagaggaagcttgcgtcgagattgcctacctccccagccccaccttcgagggttctttcaaaagttcggactgatgttcaacttcacatcttgtctcaaggcaatcctctctgtttagtctcatagagttggctttgtggaatgtaattcatttttatctttagcacaaatttgtctgtttcttttaaggccaccagaaagcacaacatagactccccacagaaatctcattttatctcctaagttgcagaataaacgtaccttgtttgcaaagggaacattttcctttacactcaaatcacttcaatgtgtattttgcctcttcagctcactgacctcgcccgcagcatctgatgtaagtcaccatatgccatttcccgactaggagagtgcttggcctcttgtgcaggaagtttgcttaccctcatgactcctggcttccgcagagcctgccataccccacagcttggccgggccctgtggaaagccatctctattctcacactgctggggaaggtgcatgactcaggacccgacacacaggcctgagagtctggcgatcttgtgctctgatcccagcttcatgtgtgactcactctggatcaggcgcttcacttcctgtgcacctctgtctgtaaaatagagagcccagctctagtccttctccctcctgagaagcaatgcagagatttagtcccctttgcagtcacccagtgtctaagtac

SEQ ID NO: 35884 - DNA, 1476 bp, Homo sapiens
gagagcagcgaggcaggagtgaggtcgagtgggcaggcgtgagagccgagcacaggggcagaaaggaagactctgcacccagaaagcggaaaggagatggagtttcgctccgtcgcccaggctgaagtgcagtggcgtgatcttggctcgttgcaacctccacctcccgggttcaagagattctcctgcctcagcctcctgagcagctgggatgacaggcacacaccaccacgcctggctaatttctgtatttttagtagagacggggtttcaccatggtctggtgacctcctggtctcgaactcctgacctcaagtgatcctcccgcctcagcctcccaaagttctgggattacaggcatgagccaccgcacccggctgcttccttaactcttgatctcctctctgtatcttgctttgtctagctgttctcttctctccatattcatccaaacatttgcttagaagtacccagaagcatggcgttgaatgtggtacaccttgaacgaagggtgaagaaacgaggcagagtgacttagtagcaagtgacagcacacagtttaaattttaatattagcccatttacaaacaacagcttatataatagtcattcacatacctcaacactcaccatcccctccccactttttttctggagacagggtttcactgtcaccccagctggaatgcaggtggcatgatcacagctcactgtagcatcgacctcctggactcaaggggtcctcgcgcctcagcctcctgagtagctgggaccacaggtgcatgccaccacgcccagctaatgtttttttttattttttgtagagacagggtctggctatgttgcttaggctggtctcaaactcctgggttcaagcgatcctgccacctcagcctcccaaagtgttaggattacagatgtgagccactgtgcccagccaacattcaccccattcaagtgtgcaattcaatggattctagtatcttcacagtgctgtgcaactatcactcctatctacttacaaagcatttccatcatcttaaaaagaatccccatgtccaatagcagttccccttcccccaccgtcatcctcgggcaaccgctaatcttcctgtgtgtctgtggatttgcctcttcagggcatttcacataaacacaatcatacaatatgtggccttctgtgtctggcttctttcatttagtgtaaggcttttgaggttcatccatgttgtaatgtatatccttagttcattcttttttgttaagctcacaaataaaaagcctcactttttatttgaggcaaggagactggctacagggattacagttccagcagtcaaaacgcaactccaagtggcactatttggaccgtaggttttgcttcattttggctggaaaagggtattcaggatgtacttctcccagccggacaagaaaaagggcaaagaaaactggaagagacgtctcgtctacaca

SEQ ID NO: 35885 - DNA, 451 bp, Homo sapiens
tttttgttgctatgagaaccttctattttgtattagacattgcagccttgacgacgcaatgtttgtgctattttgcgcatgttttcctgcagctattcctctcctctagcaatagtcgaatggctctggtttcctcttgcgcccggcccagtttttccgttttagcttcggttgtcataggctgtgctgtcgctttctctgggaaaggacggtgaagactggacgggagaaaccgggagggcaggcgcggccgttctgcagcagccgggccgcttcccagcggggaggcgggctgcgaatgggaagcgggaggaggaggccgggccgcgggctggttctatcacccccttgggagcccagctcttcacctagctctccggcgcttttcaaaatatcctgcgcgggctgcgccggaggcgccggcagggggtgctgataatggcgtcgttgt

SEQ ID NO: 35886 - DNA, 1512 bp, Homo sapiens
tttttgttgctatgagaaccttctattttgtattagacattgcagccttgacgacgcaatgtttgtgctattttgcgcatgttttcctgcagctattcctctcctctagcaatagtcgaatggctctggtttcctcttgcgcccggcccagtttttccgttttagcttcggttgtcataggctgtgctgtcgctttctctgggaaaggacggtgaagactggacgggagaaaccgggagggcaggcgcggccgttctgcagcagccgggccgcttcccagcggggaggcgggctgcgaatgggaagcgggaggaggaggccgggccgcgggctggttctatcacccccttgggagcccagctcttcacctagctctccggcgcttttcaaaatctgcagttaacaacaaaaatcgagcaacgccacgtcgcacaaacaggacaggagggggcgaggggccaggctcgccgcggggcgctgagcaggcccggacaccgcggccgaggttatcgttaggcatctcccaggcgaccggctccgcagcaagatggcggacgagaaggacagggaagagataatagtagcagaatttcacaaaaaaatcaaagaggcatttgaagtctttgaccatgagtcgaataatacagtggatgtgagagagattggaacaattatcaggtcattaggatgctgtcctacggaaggagagctgcatgatctgattgcagaggtagaggaagaagaacccactggatacattcgattcgaaaaatttcttccggtgatgacagaaatactactagaaagaaaatacagaccaattccagaagatgtccttcttcgagcttttgaggttttagattcagctaaacgtgggtttcttactaaggacgagctgatcaagtatatgactgaagaaggtgagcctttttctcaagaggaaatggaagaaatgttgtctgctgcaattgatccagaatcaaattcaattaattacaaggactatataacaatgatggtgatagatgaaaattaaatgttctaaagataatttctgattgaaagaacaattttagaaattgcttgttcttgttaatttcacatcttatcttaggattcctatatgtgatatttaataccttgtgacataactattttaagacactttgtttttaaagatgatcgtaacactttaaaccaaatttagtatgtctagccttacagaatgataaattactatttatttaaaaactattcttaaaacattttaacattagaatggattgttgtttattttctacaataaaactcaggtcaccttcgaattaattaagctgacaaaatgaaaatgacttaattacccaaggtttggcatgtaaagatcttaagagggggcagaacgaaccactcgaaaacgagtagcagtgtaatgaaggcttcttttttaaacaataacaaatgcttcatcaatctgagtgtggaaggtgatttatcaaaataaatattactaat

SEQ ID NO: 35887 - DNA, 2426 bp, Homo sapiens
tttttgttgctatgagaaccttctattttgtattagacattgcagccttgacgacgcaatgtttgtgctattttgcgcatgttttcctgcagctattcctctcctctagcaatagtcgaatggctctggtttcctcttgcgcccggcccagtttttccgttttagcttcggttgtcataggctgtgctgtcgctttctctgggaaaggacggtgaagactggacgggagaaaccgggagggcaggcgcggccgttctgcagcagccgggccgcttcccagcggggaggcgggctgcgaatgggaagcgggaggaggaggccgggccgcgggctggttctatcacccccttgggagcccagctcttcacctagctctccggcgcttttcaaaatctgcagttaacaacaaaaatcgagcaacgccacgtcgcacaaacaggacaggagggggcgaggggccaggctcgccgcggggcgctgagcaggcccggacaccgcggccgaggttatcgttaggcatctcccaggcgaccggctccgcagcaagatggcggacgagaaggacagggaagagataatagtagcagaatttcacaaaaaaatcaaagaggcatttgaagtctttgaccatgagtcgaataatacagtggatgtgagagagattggaacaattatcaggtcattaggatgctgtcctacggaaggagagctgcatgatctgattgcagaggtagaggaagaagaacccactggatacattcgattcgaaaaatttcttccggtgatgacagaaatactactagaaagaaaatacagaccaattccagaagatgtccttcttcgagcttttgaggttttagattcagctaaacgtgggtttcttactaaggacgagctgatcaagtatatgactgaagaaggtgagcctttttctcaagaggaaatggaagaaatgttgtctgctgcaattgatccagaatcaaattcaattaattacaaggactatataacaatgatggtgatagatgaaaattaaatgttctaaagataatttctgattgaaagaacaattttagaaattgcttgttcttgttaatttcacatcttatcttaggattcctatatgtgatatttaataccttgtgacataactattttaagacactttgtttttaaagatgatcgtaacactttaaaccaaatttagtatgtctagccttacagaatgataaattactatttatttaaaaactattcttaaaacattttaacattagaatggattgttgtttattttctacaataaaactcaggtcaccttcgaattaattaagctgacaaaatgaaaatgacttaattacccaaggtttggcatgtaaagatcttaagagggggcagaacgaaccactcgaaaacgagtagcagtgtaatgaaggcttcttttttaaacaataacaaatgcttcatcaatctgagtgtggaaggtgatttatcaaaataaatattactaatttatttttttatgagtgccaattacaaatatcatttgggataataataacttagtgtaaacatttatatttgctgatccagcatgtcaccatttatggagtagctaaaggagttgagatcattggaactagagaaaagaaggttgagtggaagttgatagtgtaaggtagtggcaattctccctttgtctttagaattctcacccactccgcatatctgtcatgggagcattgtcctgaatactgagtaagaatactgagaaatgttatggtgtgcaaatgtacagctcctgaaagagcagaatgaagcacaagcagtcacaatggaaaaatatatggcatggccactgcctcctccttgcaattctctccgatcttggcatcttatatggcaactatatggcaacttacaagcaaaggggaagataaagtaaagggaagtgaacaattttccaaacttagatattctgttataacaagacacacacacacacacacacacacacacacacacgggtctctatttgaagatggcttcaccactatatgtgtgtatctacatagatgtaaacatttagagttgctgtgagccttcctcaggcatgtagtcttgcccccaaaagaggcggctgctacccaagagactgtcgctgttcattcattcatgaaacactgaaggagtaccatgagatgatgtgctgggaaccggagtccctaacgaatccaggtcacagtttagtgagggaagcctgcaaggcagtcagcagccacatttcagataggggcatgttcagggtcccgtgcaagtgccgaagagaggcagctactcagccttgcagggagagagctttctggaagatgaaaggtgctagtgagcggagaaggcttcccaggacaggaagctcctgactttaa

SEQ ID NO: 35888 - DNA, 2538 bp, Homo sapiens
tttttgttgctatgagaaccttctattttgtattagacattgcagccttgacgacgcaatgtttgtgctattttgcgcatgttttcctgcagctattcctctcctctagcaatagtcgaatggctctggtttcctcttgcgcccggcccagtttttccgttttagcttcggttgtcataggctgtgctgtcgctttctctgggaaaggacggtgaagactggacgggagaaaccgggagggcaggcgcggccgttctgcagcagccgggccgcttcccagcggggaggcgggctgcgaatgggaagcgggaggaggaggccgggccgcgggctggttctatcacccccttgggagcccagctcttcacctagctctccggcgcttttcaaaatctgcagttaacaacaaaaatcgagcaacgccacgtcgcacaaacaggacaggagggggcgaggggccaggctcgccgcggggcgctgagcaggcccggacaccgcggccgaggttatcgttaggcatctcccaggcgaccggctccgcagcaagatggcggacgagaaggacagggaagggcctgggatacaacagtgatgagataaggcctcggactttactgatcgaacatctaatggaaggtggaagaagagaccatcacacaatgacggtgttatggggaacacaggagataatagtagcagaatttcacaaaaaaatcaaagaggcatttgaagtctttgaccatgagtcgaataatacagtggatgtgagagagattggaacaattatcaggtcattaggatgctgtcctacggaaggagagctgcatgatctgattgcagaggtagaggaagaagaacccactggatacattcgattcgaaaaatttcttccggtgatgacagaaatactactagaaagaaaatacagaccaattccagaagatgtccttcttcgagcttttgaggttttagattcagctaaacgtgggtttcttactaaggacgagctgatcaagtatatgactgaagaaggtgagcctttttctcaagaggaaatggaagaaatgttgtctgctgcaattgatccagaatcaaattcaattaattacaaggactatataacaatgatggtgatagatgaaaattaaatgttctaaagataatttctgattgaaagaacaattttagaaattgcttgttcttgttaatttcacatcttatcttaggattcctatatgtgatatttaataccttgtgacataactattttaagacactttgtttttaaagatgatcgtaacactttaaaccaaatttagtatgtctagccttacagaatgataaattactatttatttaaaaactattcttaaaacattttaacattagaatggattgttgtttattttctacaataaaactcaggtcaccttcgaattaattaagctgacaaaatgaaaatgacttaattacccaaggtttggcatgtaaagatcttaagagggggcagaacgaaccactcgaaaacgagtagcagtgtaatgaaggcttcttttttaaacaataacaaatgcttcatcaatctgagtgtggaaggtgatttatcaaaataaatattactaatttatttttttatgagtgccaattacaaatatcatttgggataataataacttagtgtaaacatttatatttgctgatccagcatgtcaccatttatggagtagctaaaggagttgagatcattggaactagagaaaagaaggttgagtggaagttgatagtgtaaggtagtggcaattctccctttgtctttagaattctcacccactccgcatatctgtcatgggagcattgtcctgaatactgagtaagaatactgagaaatgttatggtgtgcaaatgtacagctcctgaaagagcagaatgaagcacaagcagtcacaatggaaaaatatatggcatggccactgcctcctccttgcaattctctccgatcttggcatcttatatggcaactatatggcaacttacaagcaaaggggaagataaagtaaagggaagtgaacaattttccaaacttagatattctgttataacaagacacacacacacacacacacacacacacacacacgggtctctatttgaagatggcttcaccactatatgtgtgtatctacatagatgtaaacatttagagttgctgtgagccttcctcaggcatgtagtcttgcccccaaaagaggcggctgctacccaagagactgtcgctgttcattcattcatgaaacactgaaggagtaccatgagatgatgtgctgggaaccggagtccctaacgaatccaggtcacagtttagtgagggaagcctgcaaggcagtcagcagccacatttcagataggggcatgttcagggtcccgtgcaagtgccgaagagaggcagctactcagccttgcagggagagagctttctggaagatgaaaggtgctagtgagcggagaaggcttcccaggacaggaagctcctgactttaa

SEQ ID NO: 35889 - DNA, 2215 bp, Homo sapiens
tttttgttgctatgagaaccttctattttgtattagacattgcagccttgacgacgcaatgtttgtgctattttgcgcatgttttcctgcagctattcctctcctctagcaatagtcgaatggctctggtttcctcttgcgcccggcccagtttttccgttttagcttcggttgtcataggctgtgctgtcgctttctctgggaaaggacggtgaagactggacgggagaaaccgggagggcaggcgcggccgttctgcagcagccgggccgcttcccagcggggaggcgggctgcgaatgggaagcgggaggaggaggccgggccgcgggctggttctatcacccccttgggagcccagctcttcacctagctctccggcgcttttcaaaatctgcagttaacaacaaaaatcgagcaacgccacgtcgcacaaacaggacaggagggggcgaggggccaggctcgccgcggggcgctgagcaggcccggacaccgcggccgaggttatcgttaggcatctcccaggcgaccggctccgcagcaagatggcggacgagaaggacagggaagagagattggaacaattatcaggtcattaggatgctgtcctacggaaggagagctgcatgatctgattgcagaggtagaggaagaagaacccactggatacattcgattcgaaaaatttcttccggtgatgacagaaatactactagaaagaaaatacagaccaattccagaagatgtccttcttcgagcttttgaggttttagattcagctaaacgtgggtttcttactaaggacgagctgatcaagtatatgactgaagaagatggagtttcgctccgtcgcccaggctgaagtgcagtggcgtgatcttggctcgttgcaacctccacctcccgggttcaagagattctcctgcctcagcctcctgagcagctgggatgacaggcacacaccaccacgcctggctaatttctgtatttttagtagagacggggtttcaccatggtctggtgacctcctggtctcgaactcctgacctcaagtgatcctcccgcctcagcctcccaaagttctgggattacaggcatgagccaccgcacccggctgcttccttaactcttgatctcctctctgtatcttgctttgtctagctgttctcttctctccatattcatccaaacatttgcttagaagtacccagaagcatggcgttgaatgtggtacaccttgaacgaagggtgaagaaacgaggcagagtgacttagtagcaagtgacagcacacagtttaaattttaatattagcccatttacaaacaacagcttatataatagtcattcacatacctcaacactcaccatcccctccccactttttttctggagacagggtttcactgtcaccccagctggaatgcaggtggcatgatcacagctcactgtagcatcgacctcctggactcaaggggtcctcgcgcctcagcctcctgagtagctgggaccacaggtgcatgccaccacgcccagctaatgtttttttttattttttgtagagacagggtctggctatgttgcttaggctggtctcaaactcctgggttcaagcgatcctgccacctcagcctcccaaagtgttaggattacagatgtgagccactgtgcccagccaacattcaccccattcaagtgtgcaattcaatggattctagtatcttcacagtgctgtgcaactatcactcctatctacttacaaagcatttccatcatcttaaaaagaatccccatgtccaatagcagttccccttcccccaccgtcatcctcgggcaaccgctaatcttcctgtgtgtctgtggatttgcctcttcagggcatttcacataaacacaatcatacaatatgtggccttctgtgtctggcttctttcatttagtgtaaggcttttgaggttcatccatgttgtaatgtatatccttagttcattcttttttgttaagctcacaaataaaaagcctcactttttatttgaggcaaggagactggctacagggattacagttccagcagtcaaaacgcaactccaagtggcactatttggaccgtaggttttgcttcattttggctggaaaagggtattcaggatgtacttctcccagccggacaagaaaaagggcaaagaaaactggaagagacgtctcgtctacaca

SEQ ID NO: 35890 - DNA, 2464 bp, Homo sapiens
tttttgttgctatgagaaccttctattttgtattagacattgcagccttgacgacgcaatgtttgtgctattttgcgcatgttttcctgcagctattcctctcctctagcaatagtcgaatggctctggtttcctcttgcgcccggcccagtttttccgttttagcttcggttgtcataggctgtgctgtcgctttctctgggaaaggacggtgaagactggacgggagaaaccgggagggcaggcgcggccgttctgcagcagccgggccgcttcccagcggggaggcgggctgcgaatgggaagcgggaggaggaggccgggccgcgggctggttctatcacccccttgggagcccagctcttcacctagctctccggcgcttttcaaaatctgcagttaacaacaaaaatcgagcaacgccacgtcgcacaaacaggacaggagggggcgaggggccaggctcgccgcggggcgctgagcaggcccggacaccgcggccgaggttatcgttaggcatctcccaggcgaccggctccgcagcaagatggcggacgagaaggacagggaagagataatagtagcagaatttcacaaaaaaatcaaagaggcatttgaagtctttgaccatgagtcgaataatacagtggatgtgagagagattggaacaattatcaggtcattaggatgctgtcctacggaaggagagctgcatgatctgattgcagaggaggagaagccaggcgtatcagggccttggttttccaggtagaggaagaagaacccactggatacattcgattcgaaaaatttcttccggtgatgacagaaatactactagaaagaaaatacagaccaattccagaagatgtccttcttcgagcttttgaggttttagattcagctaaacgtgggtttcttactaaggacgagctgatcaagtatatgactgaagaaggtgagcctttttctcaagaggaaatggaagaaatgttgtctgctgcaattgatccagaatcaaattcaattaattacaaggactatataacaatgatggtgatagatgaaaattaaatgttctaaagataatttctgattgaaagaacaattttagaaattgcttgttcttgttaatttcacatcttatcttaggattcctatatgtgatatttaataccttgtgacataactattttaagacactttgtttttaaagatgatcgtaacactttaaaccaaatttagtatgtctagccttacagaatgataaattactatttatttaaaaactattcttaaaacattttaacattagaatggattgttgtttattttctacaataaaactcaggtcaccttcgaattaattaagctgacaaaatgaaaatgacttaattacccaaggtttggcatgtaaagatcttaagagggggcagaacgaaccactcgaaaacgagtagcagtgtaatgaaggcttcttttttaaacaataacaaatgcttcatcaatctgagtgtggaaggtgatttatcaaaataaatattactaatttatttttttatgagtgccaattacaaatatcatttgggataataataacttagtgtaaacatttatatttgctgatccagcatgtcaccatttatggagtagctaaaggagttgagatcattggaactagagaaaagaaggttgagtggaagttgatagtgtaaggtagtggcaattctccctttgtctttagaattctcacccactccgcatatctgtcatgggagcattgtcctgaatactgagtaagaatactgagaaatgttatggtgtgcaaatgtacagctcctgaaagagcagaatgaagcacaagcagtcacaatggaaaaatatatggcatggccactgcctcctccttgcaattctctccgatcttggcatcttatatggcaactatatggcaacttacaagcaaaggggaagataaagtaaagggaagtgaacaattttccaaacttagatattctgttataacaagacacacacacacacacacacacacacacacacacgggtctctatttgaagatggcttcaccactatatgtgtgtatctacatagatgtaaacatttagagttgctgtgagccttcctcaggcatgtagtcttgcccccaaaagaggcggctgctacccaagagactgtcgctgttcattcattcatgaaacactgaaggagtaccatgagatgatgtgctgggaaccggagtccctaacgaatccaggtcacagtttagtgagggaagcctgcaaggcagtcagcagccacatttcagataggggcatgttcagggtcccgtgcaagtgccgaagagaggcagctactcagccttgcagggagagagctttctggaagatgaaaggtgctagtgagcggagaaggcttcccaggacaggaagctcctgactttaa

SEQ ID NO: 35891 - DNA, 2298 bp, Homo sapiens
tttttgttgctatgagaaccttctattttgtattagacattgcagccttgacgacgcaatgtttgtgctattttgcgcatgttttcctgcagctattcctctcctctagcaatagtcgaatggctctggtttcctcttgcgcccggcccagtttttccgttttagcttcggttgtcataggctgtgctgtcgctttctctgggaaaggacggtgaagactggacgggagaaaccgggagggcaggcgcggccgttctgcagcagccgggccgcttcccagcggggaggcgggctgcgaatgggaagcgggaggaggaggccgggccgcgggctggttctatcacccccttgggagcccagctcttcacctagctctccggcgcttttcaaaatctgcagttaacaacaaaaatcgagcaacgccacgtcgcacaaacaggacaggagggggcgaggggccaggctcgccgcggggcgctgagcaggcccggacaccgcggccgaggttatcgttaggcatctcccaggcgaccggctccgcagcaagatggcggacgagaaggacagggaagagagattggaacaattatcaggtcattaggatgctgtcctacggaaggagagctgcatgatctgattgcagaggtagaggaagaagaacccactggatacattcgattcgaaaaatttcttccggtgatgacagaaatactactagaaagaaagttttagattcagctaaacgtgggtttcttactaaggacgagctgatcaagtatatgactgaagaaggtgagcctttttctcaagaggaaatggaagaaatgttgtctgctgcaattgatccagaatcaaattcaattaattacaaggactatataacaatgatggtgatagatgaaaattaaatgttctaaagataatttctgattgaaagaacaattttagaaattgcttgttcttgttaatttcacatcttatcttaggattcctatatgtgatatttaataccttgtgacataactattttaagacactttgtttttaaagatgatcgtaacactttaaaccaaatttagtatgtctagccttacagaatgataaattactatttatttaaaaactattcttaaaacattttaacattagaatggattgttgtttattttctacaataaaactcaggtcaccttcgaattaattaagctgacaaaatgaaaatgacttaattacccaaggtttggcatgtaaagatcttaagagggggcagaacgaaccactcgaaaacgagtagcagtgtaatgaaggcttcttttttaaacaataacaaatgcttcatcaatctgagtgtggaaggtgatttatcaaaataaatattactaatttatttttttatgagtgccaattacaaatatcatttgggataataataacttagtgtaaacatttatatttgctgatccagcatgtcaccatttatggagtagctaaaggagttgagatcattggaactagagaaaagaaggttgagtggaagttgatagtgtaaggtagtggcaattctccctttgtctttagaattctcacccactccgcatatctgtcatgggagcattgtcctgaatactgagtaagaatactgagaaatgttatggtgtgcaaatgtacagctcctgaaagagcagaatgaagcacaagcagtcacaatggaaaaatatatggcatggccactgcctcctccttgcaattctctccgatcttggcatcttatatggcaactatatggcaacttacaagcaaaggggaagataaagtaaagggaagtgaacaattttccaaacttagatattctgttataacaagacacacacacacacacacacacacacacacacacgggtctctatttgaagatggcttcaccactatatgtgtgtatctacatagatgtaaacatttagagttgctgtgagccttcctcaggcatgtagtcttgcccccaaaagaggcggctgctacccaagagactgtcgctgttcattcattcatgaaacactgaaggagtaccatgagatgatgtgctgggaaccggagtccctaacgaatccaggtcacagtttagtgagggaagcctgcaaggcagtcagcagccacatttcagataggggcatgttcagggtcccgtgcaagtgccgaagagaggcagctactcagccttgcagggagagagctttctggaagatgaaaggtgctagtgagcggagaaggcttcccaggacaggaagctcctgactttaa

SEQ ID NO: 35892 - DNA, 1360 bp, Homo sapiens
tttttgttgctatgagaaccttctattttgtattagacattgcagccttgacgacgcaatgtttgtgctattttgcgcatgttttcctgcagctattcctctcctctagcaatagtcgaatggctctggtttcctcttgcgcccggcccagtttttccgttttagcttcggttgtcataggctgtgctgtcgctttctctgggaaaggacggtgaagactggacgggagaaaccgggagggcaggcgcggccgttctgcagcagccgggccgcttcccagcggggaggcgggctgcgaatgggaagcgggaggaggaggccgggccgcgggctggttctatcacccccttgggagcccagctcttcacctagctctccggcgcttttcaaaatctgcagttaacaacaaaaatcgagcaacgccacgtcgcacaaacaggacaggagggggcgaggggccaggctcgccgcggggcgctgagcaggcccggacaccgcggccgaggttatcgttaggcatctcccaggcgaccggctccgcagcaagatggcggacgagaaggacagggaagagataatagtagcagaatttcacaaaaaaatcaaagaggcatttgaagtctttgaccatgagtcgaataatacagtggatgtgagagagattggaacaattatcaggtcattaggatgctgtcctacggaaggagagctgcatgatctgattgcagaggtagaggaagaagaacccactggatacattcgattcgaaaaatttcttccggtgatgacagaaatactactagaaagaaaatacagaccaattccagaagatgtccttcttcgagcttttgaggttttagattcagctaaacgtgggtttcttactaaggacgagctgatcaagtatatgactgaagaagagacaggtaagctaaggtggggagctgtgaagtgacttgctcaagatctcagagctcgtgagaggcagccagcatgtggatccaaacttgtgctttaaccactcagttatcttccttccatctttcatcaaatactggggcttcaagttaatcctctggtaatttcaaaagttttaatctaaataaataaccttgttcatgatgtctgtatgtcttcctactgttttgcctgaaatgacgtgttctagaggttgcttgatctatgacatctgcaggctaaaagaagtccagaatctaccagggtgtacaatagccttgtctttgaacctctggactgtcgtgatgtcctggctctacagctccagggagcgtaactagtggcactgtgggagcttgtggggctccatggctattaagctggctagtggaaagagaaaaaa

SEQ ID NO: 35893 - DNA, 1387 bp, Homo sapiens
tttttgttgctatgagaaccttctattttgtattagacattgcagccttgacgacgcaatgtttgtgctattttgcgcatgttttcctgcagctattcctctcctctagcaatagtcgaatggctctggtttcctcttgcgcccggcccagtttttccgttttagcttcggttgtcataggctgtgctgtcgctttctctgggaaaggacggtgaagactggacgggagaaaccgggagggcaggcgcggccgttctgcagcagccgggccgcttcccagcggggaggcgggctgcgaatgggaagcgggaggaggaggccgggccgcgggctggttctatcacccccttgggagcccagctcttcacctagctctccggcgcttttcaaaatctgcagttaacaacaaaaatcgagcaacgccacgtcgcacaaacaggacaggagggggcgaggggccaggctcgccgcggggcgctgagcaggcccggacaccgcggccgaggttatcgttaggcatctcccaggcgaccggctccgcagcaagatggcggacgagaaggacagggaagagataatagtagcagaatttcacaaaaaaatcaaagaggcatttgaagtctttgaccatgagtcgaataatacagtggatgtgagagagattggaacaattatcaggtcattaggatgctgtcctacggaaggagagctgcatgatctgattgcagaggtagaggaagaagaacccactggatacattcgattcgaaaaatttcttccggtgatgacagaaatactactagaaagaaaatacagaccaattccagaagatgtccttcttcgagcttttgaggttttagattcagctaaacgtgggtttcttactaaggacgagctgatcaagtatatgactgaagaaggtggtgtcgttatcacccccattctagagacaggtaagctaaggtggggagctgtgaagtgacttgctcaagatctcagagctcgtgagaggcagccagcatgtggatccaaacttgtgctttaaccactcagttatcttccttccatctttcatcaaatactggggcttcaagttaatcctctggtaatttcaaaagttttaatctaaataaataaccttgttcatgatgtctgtatgtcttcctactgttttgcctgaaatgacgtgttctagaggttgcttgatctatgacatctgcaggctaaaagaagtccagaatctaccagggtgtacaatagccttgtctttgaacctctggactgtcgtgatgtcctggctctacagctccagggagcgtaactagtggcactgtgggagcttgtggggctccatggctattaagctggctagtggaaagagaaaaaa

SEQ ID NO: 35894 - DNA, 946 bp, Homo sapiens
tttttgttgctatgagaaccttctattttgtattagacattgcagccttgacgacgcaatgtttgtgctattttgcgcatgttttcctgcagctattcctctcctctagcaatagtcgaatggctctggtttcctcttgcgcccggcccagtttttccgttttagcttcggttgtcataggctgtgctgtcgctttctctgggaaaggacggtgaagactggacgggagaaaccgggagggcaggcgcggccgttctgcagcagccgggccgcttcccagcggggaggcgggctgcgaatgggaagcgggaggaggaggccgggccgcgggctggttctatcacccccttgggagcccagctcttcacctagctctccggcgcttttcaaaatctgcagttaacaacaaaaatcgagcaacgccacgtcgcacaaacaggacaggagggggcgaggggccaggctcgccgcggggcgctgagcaggcccggacaccgcggccgaggttatcgttaggcatctcccaggcgaccggctccgcagcaagatggcggacgagaaggacagggaagggcctgggatacaacagtgatgagataaggcctcggactttactgatcgaacatctaatggaaggtggaagaagagaccatcacacaatgacggtgttatggggaacacaggagataatagtagcagaatttcacaaaaaaatcaaagaggcatttgaagtctttgaccatgagtcgaataatacagtggatgtgagattcttcctattttgctcccgactgatttgatcctgctgtgtgtctcctactcctttgcgtctacctcctcatgggttcagatgctttgtgattctgcacctgccttctctctctgtgccgttcctcttccatctctcttccatctgtatgtcttgctttaaaactcccaaggaaaa

SEQ ID NO: 35895 - DNA, 227 bp, Homo sapiens
gcattcctacagccctggatgtcatatgataaaataaatcacactgaatcaagttcctacaagatagaagtccctaagtgtccaggaatgtgtattgcatcagacagtgtttagcagccgggaagatctcagaacaattttttaaacaaacacttgcatgttgctgcttctatgccaggtactgttctaagtcccattcaaatcataacacgtttcattctcatgac

SEQ ID NO: 35896 - DNA, 249 bp, Homo sapiens
ctttgagagccacagactctcttgtctttgttgcagctactcggttctcccattatggtggaaaagcagccactgacaacgtgtaaacaaatgggtgccactgtgttccaataaaattttatttacagggttggatgtggtggctcacacctgtaatcccagcactttgggaggacaaggcgggtggatcatgaggtcagatgttcgacaccagcctgaccaacatggtgaaaccccgtatttactaaa

SEQ ID NO: 35897 - DNA, 111 bp, Homo sapiens
agcctgtaagtgtccacatatcatgcacatgcagtgcgtatttgttgcatgagctcctggtatgcaggtgccaaatgtcatgctaagtgtgtcgactggatgacagaagaa

SEQ ID NO: 35898 - DNA, 402 bp, Homo sapiens
gcgtcgacccagaatcctaaatagacctgtgttgagaaaattaaattagtagctaacatatatgcatacatgtgtacatgcatacatacatgcgtaaacatgcccacacacaccagacgtaagcaggtttacacttctaccaaacattcaagaaacgtgaaaataagccgggtgcggtggctcatgcctgtaatcccagcactttgggaggctgaggcgggtggatcacgaggtcaggagatcgagaccatcctggctgacacggcgagaccccgtgtctactaaaaatacaaaacatttgccgggcgtggtggcaggtgcctgtggtcccagctactcaggaggcagagtcttgttctgtcgcccaggctggagttcagtggtgcaatctcgcctcaatgc

SEQ ID NO: 35899 - DNA, 466 bp, Homo sapiens
ttatgtgatcttgctgtttttctctgattatttgtaagaatttctgttttctccagtgttttgaaatttcacaatgatacagctaattgtagatctcattttcctttgtgctcggtactcagtggattctttaaacttggaaacaaatttcttttatttctaagaaggcttctagagtcatttcattaatgacttcatcctttaattttttcctctcctttctttctaagactcctgtttggaagttttgcctcctatactagtcctctgtttttcatgttttttttcattttttattttttgacattttactttctgggagatttcattttccaactgatattattttcttctatcatgttaattattaagaattctttttcttcttgcagcatcctattcttatttaatagatgaagcattttttaatatctgataattttaatgatagattttttgaagtttt

SEQ ID NO: 35900 - DNA, 488 bp, Homo sapiens
tgaaataataccaaatatccaacgtttgcattagagcccaaaatgagaaaagagggaaaaaaagagttgggctgaaagagtatttgcagaaataatgtcggaaaacttcccaaatttggtgaaagacagaaataactaagaaattgagagaatactaattgagataaacccaaagatattcatgccatgaaaaatactgtgttgaaagctgaacaaattgcatcgtatttaatggtgaaagactgaatttttccaaagtaaggaatatccactcatcactgttactcaacaataattgaagttctagatgttgctattatacaagaaaagtaagaaaggcatgcagattgaaaaggaagacataaaactgtctatttgcagatgatacgactacacagaaaatttcaaggaatgtgaaaaccaaaaaaggatacaagatcaaacacaaaaatcaatctcatttctgtgcactaacatgaacacagaaa

SEQ ID NO: 35901 - DNA, 696 bp, Homo sapiens
agtagatttgaaggcttatttggctttagagttaacatataggtttttaaaaatgtacttgtatatttaagaaaatgacggttttaatgtgacctcttgtgctagaacaatcactacaaaaacataaagccacaagtacgagtctgctttttaatgatttgtgttttgtttctctttatagtttatatggtatagcgtaaggaacagagcttactctatcagcgaggcaggctaatttcatcaatgtttgaaagtttcatagtggtgtgcctttatctcctctttgctgtgtgttagagcgatcagagtttcccagaagtattcattttttacaaattataaatggatgtattttgaaaccgcatgtctgagcttcctaacttaattatcttttctaattttaagtgctgatttatttgggatgatttttctgcacctcagcattcccttagccgttcaattttaatagcagatagttgtcctcacacacatgaatgccttggtacaaacgtctgtctttaggacatatggattagatctatttagagtcaagaaaaagaaacattgcaaattttgcctggctatttcagagtaactgtattagaatttgcatcaaggctatgatgtttgctccatcatttattgattcaaataaaccacaacccacagcagttgcatttcatataagcagtccta

SEQ ID NO: 35902 - DNA, 340 bp, Homo sapiens
attgacatttccaacccagcacatacccacatacgtaaccaaagcaaaagcttcacgaaatagtgacctactttaccttcctccccatgatcgactctgatatttccactctgattggatatttccaatcatattttctggtaggtccttttattttctacctcatttttaaaaaatgttggtcacagttcactaaattgacttcgtgatgcgctaatgggggtgagacccttagtttgaaattttgaaggagactgaattctaaaggcaatccgtagatttaggcatattttagccccacttcatggatgggaaaatcaaggctttgttgtgaatcagt

SEQ ID NO: 35903 - DNA, 375 bp, Homo sapiens
taggaactgttaacccaaggacaaaataactgctgggatagagcaaagcacagaagtgtgtacccatagagagtgggtgacaaaactgaggcaaatattggcagatcgcatccccaagcaaggagggcacccacacatgggagcactcaggtctaaggttaactctaatgtaaaatgggtacaaggctgaaatcctacaacattctaacacttcctccttataagcatccatatatctttactgcaataaggtgtggtatatgcatacaaataaaattccctaacttagaatctgcctttaagagaaaaaaaaaaattcccagctctaatttcattcctatcaagttattttagattcttcatgcagtccccttc

SEQ ID NO: 35904 - DNA, 5312 bp, Homo sapiens
  misc_feature (758)..(758): n is a, c, g, or t
  misc_feature (2040)..(2040): n is a, c, g, or t
  misc_feature (3496)..(3496): n is a, c, g, or t
  misc_feature (3630)..(3630): n is a, c, g, or t
tgtggtgactctaaccataacagcctgagacagaggtcccaggagatccctccttgtggaaaagcagtagttctcttccccagaaaggactggggtcaaaggatgcacaacagtaacgactttgtggtgaggttggcagagaatatacgatggggagcttgatgtgtgagaagtggaaagaaggtcatcttggatgattggaggacaacatcccgcaaacgacaacagggaaagcacagtacttttacaaaaggctccgcaaatatctcatccttaccatctgttccttgtgccttataagatttttggatttcatcctaagagtaacacgcatttatggggagactgagggataggactgggtaaatttgagatatatctccaaaaaccatcttcattttaccaaagagaaaaatgaagcccagagaggttaagtgacttgcccaggatcatacagctaatgagtagtcaggaaaatattctctttagagttctttgtatttctttcttcatagtgttgccaaatataaataatagtgtagggttggcctgccatgtgttggagtgggcaggatctttggtgtgacaaaggtagataatttgtctagccaagttttgagatatcacaaagctaccagtgccttagccaggcagaagttatattcagaatgattacaagttgctctatgatagaaggtgctcaaataaatgttagtataggccagcactgtattctatgctacagggattccagaaangaaaattagtaaggtgtagactcctttctactgggtcataagctatttaggagtctgtttctgtctatggttcctttgtgtgctcttgttaactatactgcaaagtaaacatattgtattgttgcagagggggagagattgcatctggcctgggagatcaggaaagctgaagcaggaggtggcatttgaaatgaaatacttagaagctggtgattaaattctgttcatcttttataagaaatgacatttatggaacacttattgcatgctttgagctttgcaacaatctttcatttaatccttctaacaactcagtgggaaaggtacacttatttcacagaggaggaaccgaaggctcagttaacttattggagcaatgccattggtgccacacctggatggccttgctgggccagcttctcttggtgttggctgccaactagttcacaccagccttctcctgaggaatgctcttggctgatgagagcactcatacctggagaagtaatctggaagggaaagtcaaggaaaccttgctgactaagtagacagtatgaaaaacactggtgagagactttggacttcctggatctgtcttccatctaatagatattccagaaagagagactttaaggttttcttttttgttttaatggagaatagaaaataatccctttttttttttttttttttttttgagacgggatcttcccctgtctccgaggctggaatacggtggtgcgatcaaagctcactgcagccttgaactcctaggctcatcatgcagtcttccctcagcctcctgagtagctaggaccataggcacatgtcaccacatctggctaatttttcttactttttggagaaatgaagtcttgctattttacccaggctggtcttgaactcttgggctcaatgattctcctgtctcagcctcccaaaatgttgagattgcaggcatgagccactgcgcctggcctaatccatttgtttgtttttttgtttgtttgtttgttttttgagacggagtctcgatctgttgcccaggctggagtgcagtggagcaatcttgggtcactgcaacctctgcctcctgggttcaagcaattctcctgccttagcctcctgagtagctgcgactacaggtgcatgccaacacgcctggctaattttttgtatttttaatagagacagggtttcaccatgttagccacggtggtctcgatctcctgacctcgtgatccacctgcctcggcctcccaaagtgctgggattacaggcntgagccactgcgcccggccctaatccattttttttaaagtgaatttccttgtggccccaggtggtgagcaacaatagtgggagaaagttcacacacagatatcacctagtataatttcaacctcctaagaattccaaggatcgttcgctaaagctaaggtgaaaattctacgtattgccagaggagacatagaaagtttcaacagactggcactcaatggtttatcttccaaatgggaactatctccaaagtgctaaatttttatgaaggaagatgattttgaatttagaattctatattctgtttactatctttaagagtgagaacaaaataacagtgttcttgaacatgcaaacactcagacaacactgcatacataattttgggggcccaatgcataataaaagcgtggggctgcttgttgaaagatttaagagtttgggccgggtgcggtggctcacacctgtaatcccagcagtttgggaggccaaggcaggcggatcacctgaggtcgggagttcacaaccagcctgaccaacatggagaaaccccgtctctactaaaaatacaaaaattagccgggtgtggtggcgcatgcctgtaatcccaactactcaggaggctgaggcaggagaatcgcttgaacccgggagacgggaggttgtggtgagctgagatcgtgccattgcactccagtctgggtaagaagagtgaaactccgtctcaataaataaataaataaataaaaattaaaattaaaaattaagaatttcaggatggcaactgcagagcattaaaataagtgtgggacccctctgaatgcagcgccccatgcagttgcacagctcatgtgcccaggaagctgagaaaactcaccacccatgaagtcttctggaaaaaagaaagcatttaattcaaaaaagtggtgagtgcgagacaaaacaaaaaatgatcccagtaaaacataaaaaaaattattgtctttaatattctttatgaagcttaatgatttttagaataccattaagaatagaggggagggcttggcacggtggctcatgcttgtaattccagcactgtggaaggccgaggtgggtggataacttgagatcaagagttcaagaccagcctggccaacatgatgaaaccttgtctctactaaaaatacaaaaattagccggcagggtggcacgtgcctgtaattccagctacttgggaggctgaggcaggagactcgcttgaacctgggagttggaggttgcagtgaaacgagattgcaccactgcactccagcctgagtgaggaagcaaaatctgtgtctcaaaaacaaaacaaaacaaacagaatagaggggagatgtgtacttaaaaatcatacacattaaaatttgataatttcaacaacaggaaagagatggtcaagaagtaagagaaaagtaaaatgcaagcttaaagtnttgttagacttgggcaggggatgtttaaatactgattaattagaactaattgtatttttaaaaattaattttaaatatgtaaaggtaagcacaatatttaaaggtaactgcaaaattagtgacttacccaacanacatttataatctcatggtttctgcggatgaagaattcagacatggctgagctaggtcctctgcttcaagatctttgcatggccgcagtcaagatggtagccagggctggggtctcaaggctggagtcaaggtgatggccagggctgggcttcctctttgagtgaggaaggacatgctttccaagctcatgtggttgttgggatttggttccctccagctgatggattgagggccttagttggtagctgtccatctgctgaaggccaccttcagtttgtttccacgtgaacctcctcaacatggccacttccttcatcaaagcatgtaaaccaagaaggcagtggagagtctaacaagacagcagttacaaccttgtgcagtgtaatcatggaagtgacatcccgcggtctttgctggattctgatggttagaaggaagtcacaggtttcatccacactcaggagcagaggaactctcaagggtgtgagcaccaggagactgggatccctgggggctgtcttagagcttactcactaccacactcattcataataaggcctgtcagacaagggagacttggtcatacacctgagttatataaatcctcatccagtctccctatggttgacaaggtgtcttgctcataagcgtcagtacctggtgtcaggtgctctcatataatcaatcactgtttgttgaatgaacatgaattgctacaaataaaagcagttttgaaaaaacagtttggcgccattaacaggttgtttttaatttgcattgtaaaatgggtttggcagttttgcatattaaaaggtcaaaatgttatgccatgaaagataaaacaagagcttaaacattccagaacaaaattttccacaggatgcccttgtgtttgcctttcacatctggattgttgtcatagtcctgccattcgcagtaatttacatttgagtcacatttctctcttgaggagtaaatatagtacagtacttccctttaaatgtcctttactcaaggagaaaaacgtatttggggtacatattttcacaaccatcctggcataaattttaaaatctgtgtgcaaatgggtggtgattgcatcatgttaggttgctcagagaatgtctttaagatgacatgattgagaattgattcattaacactgttactattttttcagagctcattccgcaaaaccatgtctgagagccaggaagtctggattcttgtcccagtgccccaaccaatgagctgagtggccttggcaagtcacccagtctgcaccagttttcttgtctgtggaatgctgggcttggatgaatagtaattcaaggatctctccctctgcagtgtgctttctggtgaccatgaatggatgctgtcagtagatgccttggtgctctttacggtgctggtgcaactacccccaactgtcaggaagatgtcccctagtggcttatagctgtctcctctgcagaattgcccttggccaaacagctgcttcctcacctgggagatcacacccctgcagccgatgattgactgacacgtgggtgcagaaagcctgccctcttgcctccaggtgggacccagtctgtggtgcaatttgtgttcctgggcacctgtgggactggctgaagttaaacttcagattaaactacatccttaattaaaaaattcc

SEQ ID NO: 35905 - DNA, 4083 bp, Homo sapiens
  misc_feature (758)..(758): n is a, c, g, or t
  misc_feature (2267)..(2267): n is a, c, g, or t
  misc_feature (2401)..(2401): n is a, c, g, or t
tgtggtgactctaaccataacagcctgagacagaggtcccaggagatccctccttgtggaaaagcagtagttctcttccccagaaaggactggggtcaaaggatgcacaacagtaacgactttgtggtgaggttggcagagaatatacgatggggagcttgatgtgtgagaagtggaaagaaggtcatcttggatgattggaggacaacatcccgcaaacgacaacagggaaagcacagtacttttacaaaaggctccgcaaatatctcatccttaccatctgttccttgtgccttataagatttttggatttcatcctaagagtaacacgcatttatggggagactgagggataggactgggtaaatttgagatatatctccaaaaaccatcttcattttaccaaagagaaaaatgaagcccagagaggttaagtgacttgcccaggatcatacagctaatgagtagtcaggaaaatattctctttagagttctttgtatttctttcttcatagtgttgccaaatataaataatagtgtagggttggcctgccatgtgttggagtgggcaggatctttggtgtgacaaaggtagataatttgtctagccaagttttgagatatcacaaagctaccagtgccttagccaggcagaagttatattcagaatgattacaagttgctctatgatagaaggtgctcaaataaatgttagtataggccagcactgtattctatgctacagggattccagaaangaaaattagtaaggtgtagactcctttctactgggtcataagctatttaggagtctgtttctgtctatggttcctttgtgtgctcttgttaactatactgcaaagtaaacatattgtattgttgcagagggggagagattgcatctggcctgggagatcaggaaagctgaagcaggaggtggcatttgaaatgaaatacttagaagctggtgattaaattctgttcatcttttataagaaatgacatttatggaacacttattgcatgctttgagctttgcaacaatctttcatttaatccttctaacaactcagtgggaaaggtacacttatttcacagaggaggaaccgaaggctcagttaacttattggagcaatgccattggtgccacacctggatggccttgctgggccagcttctcttggtgttggctgccaactagttcacaccagccttctcctgaggaatgctcttggctgatgagagcactcatacctggagaagtaatctggaagggaaagtcaaggaaaccttgctgactaagtagacagtatgaaaaacactggtgagagactttggacttcctggatctgtcttccatctaatagatattccagaaagagagactttaaggttttcttttttgttttaatggagaatagaaaataatccctttttttttttttttttttttttgagacgggatcttcccctgtctccgagctgagatcgtgccattgcactccagtctgggtaagaagagtgaaactccgtctcaataaataaataaataaataaaaattaaaattaaaaattaagaatttcaggatggcaactgcagagcattaaaataagtgtgggacccctctgaatgcagcgccccatgcagttgcacagctcatgtgcccaggaagctgagaaaactcaccacccatgaagtcttctggaaaaaagaaagcatttaattcaaaaaagtggtgagtgcgagacaaaacaaaaaatgatcccagtaaaacataaaaaaaattattgtctttaatattctttatgaagcttaatgatttttagaataccattaagaatagaggggagggcttggcacggtggctcatgcttgtaattccagcactgtggaaggccgaggtgggtggataacttgagatcaagagttcaagaccagcctggccaacatgatgaaaccttgtctctactaaaaatacaaaaattagccggcagggtggcacgtgcctgtaattccagctacttgggaggctgaggcaggagactcgcttgaacctgggagttggaggttgcagtgaaacgagattgcaccactgcactccagcctgagtgaggaagcaaaatctgtgtctcaaaaacaaaacaaaacaaacagaatagaggggagatgtgtacttaaaaatcatacacattaaaatttgataatttcaacaacaggaaagagatggtcaagaagtaagagaaaagtaaaatgcaagcttaaagtnttgttagacttgggcaggggatgtttaaatactgattaattagaactaattgtatttttaaaaattaattttaaatatgtaaaggtaagcacaatatttaaaggtaactgcaaaattagtgacttacccaacanacatttataatctcatggtttctgcggatgaagaattcagacatggctgagctaggtcctctgcttcaagatctttgcatggccgcagtcaagatggtagccagggctggggtctcaaggctggagtcaaggtgatggccagggctgggcttcctctttgagtgaggaaggacatgctttccaagctcatgtggttgttgggatttggttccctccagctgatggattgagggccttagttggtagctgtccatctgctgaaggccaccttcagtttgtttccacgtgaacctcctcaacatggccacttccttcatcaaagcatgtaaaccaagaaggcagtggagagtctaacaagacagcagttacaaccttgtgcagtgtaatcatggaagtgacatcccgcggtctttgctggattctgatggttagaaggaagtcacaggtttcatccacactcaggagcagaggaactctcaagggtgtgagcaccaggagactgggatccctgggggctgtcttagagcttactcactaccacactcattcataataaggcctgtcagacaagggagacttggtcatacacctgagttatataaatcctcatccagtctccctatggttgacaaggtgtcttgctcataagcgtcagtacctggtgtcaggtgctctcatataatcaatcactgtttgttgaatgaacatgaattgctacaaataaaagcagttttgaaaaaacagtttggcgccattaacaggttgtttttaatttgcattgtaaaatgggtttggcagttttgcatattaaaaggtcaaaatgttatgccatgaaagataaaacaagagcttaaacattccagaacaaaattttccacaggatgcccttgtgtttgcctttcacatctggattgttgtcatagtcctgccattcgcagtaatttacatttgagtcacatttctctcttgaggagtaaatatagtacagtacttccctttaaatgtcctttactcaaggagaaaaacgtatttggggtacatattttcacaaccatcctggcataaattttaaaatctgtgtgcaaatgggtggtgattgcatcatgttaggttgctcagagaatgtctttaagatgacatgattgagaattgattcattaacactgttactattttttcagagctcattccgcaaaaccatgtctgagagccaggaagtctggattcttgtcccagtgccccaaccaatgagctgagtggccttggcaagtcacccagtctgcaccagttttcttgtctgtggaatgctgggcttggatgaatagtaattcaaggatctctccctctgcagtgtgctttctggtgaccatgaatggatgctgtcagtagatgccttggtgctctttacggtgctggtgcaactacccccaactgtcaggaagatgtcccctagtggcttatagctgtctcctctgcagaattgcccttggccaaacagctgcttcctcacctgggagatcacacccctgcagccgatgattgactgacacgtgggtgcagaaagcctgccctcttgcctccaggtgggacccagtctgtggtgcaatttgtgttcctgggcacctgtgggactggctgaagttaaacttcagattaaactacatccttaattaaaaaattcc

SEQ ID NO: 35906 - DNA, 502 bp, Homo sapiens
cttccctgacatttgttgctcctcacattcttgattcatttagctgtcattctctgctgctgagctacaggcaacttgagggcagggactaggtagctttagactttttctccaatgacattccaaaggctgtgtgggttatgagggggagtcatcccagcaggaagtagtctgcgttgctgacatcatttaggattgccttcatacagtgatcataaaaagcatactgacacttagtgtcatcctggtgtttacattttctacaatgtgccctcttgttgctttgcacccaaggctgaccactctcaccgtccttgcttggtacctatttagtgccagaccttgcacatagtagctactttataaataagccagggtggctacgttcagcaggggccaggcaaaggctgggaagggggtcttgttctaggggaagaagcagccaaaactgaggaacacttagaccatgcaagagagagaaagactcagggccttggtaggg

SEQ ID NO: 35907 - DNA, 748 bp, Homo sapiens
acagagctaaaaggagaagtacacaaagtcacaattacagctggggacttctgtaacccactatgaacagttgatagaactactagacagaatgttagtaaagatgtaacagtgccatcaaacaacaaaatctcataaacattgatagaaattccactcagtgacagaatgtacattcttctcaggtgtccattaaacactcaccaagatggatcttgggtcataaaaccaacttgaatcaatttaaaagattgaaattatgatggggcatggtggtttgtgcctataatcccagcgctttgggaagctgatgtgggaggactgcttgagaccggtcagtttgggccacatggcaagacctccatctcttcaaaaaaattttttttgtaaattattcaggtatggtggcacgtaccagtagtcccagctacttggaaggctgaggcattagggtctcttgagcccaggagttccaggtggcagtgagctgtgatcatgccactgtactgcagcctaggcaacagacttcatctcttaaaaaaaaaaaaaaaaaaaaaaaactgaaattggaattatttcaggtatacaaggttagtgcaataatcaaaagtaattgtcagccaggtgtggtggctcacacctgtaatcccaacattttgggaggccgaggcaggtggatcacgaggtcaggagatggagaccatcctggctaacatggtgaaaccccatctctactaaaaatgcaaaa

SEQ ID NO: 35908 - DNA, 509 bp, Homo sapiens
tgctgctgctgtattttacttctcagtcctctatttgagttggcaagtaggagttgagttgacagcagggtctctctttcagtagacattgtgaccttcacttatttaaggaaataataaattggaatttcctattaaagggcaatgactttgcttttaaaatgaaaagctcatgccaatcaaataaaaaggaaatagatactttggagagtgaaggaccccaattattactatgcctgcaccttttgtacacaacatatgctcttaagttttttaaaaaaatccttcaccattattcagaaatctaaatcaacattattaaagtcaatttctctttctctcccttttttctccttcctttcctctcatttcaacagtggtatgagagttcagatattctctgccgtgagtaaaaagctctggaaatcagctattgtgccaacaccgggaacatatccaggcccatggtgcgaaaatgaaatatgtgctgttgaattattatttttgtc

SEQ ID NO: 35909 - DNA, 303 bp, Homo sapiens
gctaagctaggaaaataaaactagcacacctgcaataattagccaccaattaagtgctaaatcatgtgctcctgacagtgttggaatgcagtgtgggtgaggggaaatttgaggtggacactggctctcttggagctttggcaagattcagctgtgccttgctgaacaattgagcaatgttgtaaaaaatacatttttaataaatatgtgtgacagcttttcccacttctttttaaaaatattagatcagaattttaagacattttattataaaacactactataacataaataacattttaa

SEQ ID NO: 35910 - DNA, 760 bp, Homo sapiens
aaatgactcagttcaggaggagaatcctcacctcatcttcttccataggcttaggtgtggagaggagatagaaggaagtttttttaaaaagtaattagaggtatagaattgtaggcttcttatactcttgagtctctgtcattgtgtcaaggaaaccatgaaacgcgtgacaaatgtgtcatatcttatgggaagttaattttacttgaagtggttgaggtaggtggtaccttgtttttatgaaaaacgcaggtccatttcaaaatagaaatataaaacataaattgtttaggggaaaaaagagactttaaagaaatatttcaaccttgccttctagacttctctataaatatttttctctgccataagaggtactttgctgggaaagcttacatcattcctgtgtaatagaaagactataaatgttagggtcagataggagttatgatttcagctccctgacctgctggctctgcaacctttacaaatttacttaactacactgaacttctcttcatctataaaataccttttttttctagtcgtgatccctgtggcccttgtggacccatgcacatctgctcaggaaacgtggaattgttgtgaggatatgatggggttccagggtttcctcctgggagctggcactttgaagccggtgggacttagcctgcttttctgtctttaaaaggctgtatgtcaagtcatcactatccatctttttctagctgttgctttttcatctctttcttgtttgggc

SEQ ID NO: 35911 - DNA, 390 bp, Homo sapiens
ttgaccagttttctactcagggtgccatattttgtttttctaagtggagtaaagttcttggatctaaaaagaagctcagcccttctgtgagtaacagatggggaaagatgagcaagttcagggggataatcagtgccagtgtggtcctggtgaatggatgatgatagcactggagagataggcccagggagaaggagtccactggcccagccaggcacttggggaaggagccagtgacgtcactgcagtctggggacactagggcacaatgggcagcagagttatcctccaggtccgctgacaccaggcaacctagtttgtggcaggaagaaaggatcaaagtttgacatggaggagagtgttcctgaaattagattcatggtttgtttc

SEQ ID NO: 35912 - DNA, 325 bp, Homo sapiens
gttatccagtacaaaatcataatagcaaatgttgggaaatgatagaggattgattaaataaattgtagtatgtctttccatcagtgaaaaataaataacatccgctgtcagaaagaatgagctaattctctttctgctgctaagatctccaaaatacattgttgactgaaggaaaaagaaaagataagaacagtgaattaaatatgctatctttgtaaaagaatgagggaaaagtagaaaagattatgtattcatttttacttatgttgtgtcaagaaacctggccaggtgcatgcctgtaatcccagctactcagaaggtggga

SEQ ID NO: 35913 - DNA, 261 bp, Homo sapiens
gttatccagtacaaaatcataatagcaaatgttgggaaatgatagaggattgattaaataaattgtagtatgtctttccatcagtgaaaaataaataacatccgctgtcagaaagaatgagctaattctctttctgctgctaagatctccaaaatacatcgtggcctgggcctagttttagaagtttcaatagcaacaacaacaacaacaacaacaaacaacgttattgggtaagagcagttttaagttcacagcaaaaag

SEQ ID NO: 35914 - DNA, 1859 bp, Homo sapiens
tactttaaaaatcaataaataaaacaaatgaaaaatagcagcattgcatttctttgcacagagaaaggtgagaggaggagagtggcattatccctcctaggcagagtgcctgtgcgtgagggcgcccataaagccctgtgctgcctctttaaacgaaggattttcgatcatgacaacgatagcaattgatataccttcaaaatacgtgtccagtgagtgttgattgtgtgtggtttctctaggagaccgtgttcatgcaacacagcattatttcaccgcctttaccccagcttcttcatacacatgcacttgtcaagggctctttggctgaagagaagttagaagtttccagatatggaggggtattttcagcagatatgcccaccgccatggttttgtcagctctgtagggtggtcttgcaccctgctcactgctggcatcacctgagcctatggcagatacccagtgctgcccgccaccatgtgaattcatcagctctgcaggcacagaccttgcactaggaatgggctgggacgccaccctctgcctcttaccattcactgggtttggcaagtgtgctgggatctggaatcacatggatgaggaacccgataatggtgacgaccgaggtagcaggcgaaccacctggccagggcaggaagtgggcagctcacgggactatggctgcaccgcgggttcataccgactaccatcctggaggtgggagcgcatgctcatctgtaaaagtccggtcccacgttggacacaccggggtcttcttctttgttgaccaggatcctctggcagtgtctttaacaagccagagtctgatcccaccgctcataaagccagggttgttgaaagcttggggcttcctcctcctctgtgcgcagccctcagcaaacggtcacagcctgtgctgtctgctgtacaccgacttggtatcatcccatgaactgtccccctttcgtgctctgtgcttagggccctctgatgccccatctgcctgtgcttcctgcaactgtttagcaagcacctattatctatagggtgctggggtgctgggcgaggccaatcgctcctattactttctgccctggggacgtcctgttttcccacctacccctgtaacgcctctgctctgccttcccatctgcggggctaacgccatcccacaagggctgggctgtccgttcagaagagaaactgggaaggggccttgaggacctgtgtccaggcagggtggacaagggctttgtgcagggagctcctctcccatctttgtgtcctgacagccgtgaccgtgacccctcaaagcagagccagtagtgatcagtatcctgctgcttcaagcctgcacggtcctcttctcctctccgcacatctgcatgcctgtcaaacccagaatagtttggggcctggtaaacagagggaagttggctggaggaggccagtcaggagtgcaagaaccccgcgtactctgtcccacgtggataaagtctctaattccagtctgaggtgaattcttagagagtgctttcatttaatgtttgctttatgcatttcccctgcagctgtgactaattgtggaacagcatacattttgttttgagactctcttgagatttttctggcagtgtaaggtctacaccattttcctctcagcatcagagaaggcagaaagcaagagaaaggaatgcaatgtgagcaaggccaggcacacttgtgctactgcagttggcaagaatggagtctaatcccagcactttgggaggccgaggcgggtggatcacctgaggtcaggaatttgagaccaacctggccaacatgttgaaacctcgtctgtactaaaaataca

SEQ ID NO: 35915 - DNA, 375 bp, Homo sapiens
aataatggcatatatcggagccaaatggtcaaatgatacacagagccaggagcctagcagccttgtccagtttgatgctctataccaagcttgtccaaccagtggcctgcatatcacatgtggcccaggacggctttgaatatggcccaacacaaattcataaactttcttaaaacaatatgagcattatgaaatttttttcatgatattttttcttttttcttttttttttttttttaactcatcagctatcattagtgttaatgtattttatgtgtggcccaagacagttcttccaatgtggcccaggaaagccaaaagattggacacccctgctttataccctttacactgtccttggtagagaaaaaaaaa

SEQ ID NO: 35916 - DNA, 1023 bp, Homo sapiens
gctaggtaaggcctggtgtaaaatcggacgaggaagaagagccacgggcgggcacgcactgcccattggttggaaggcccttcgctctagctgggaggctgacggcccgcgggcgtaagcggactgcagccgcgagctcctggaggcggcgggatggaggcggcggccgagcctggaaacctggccggcgtcaggcacatcatcctggtcctctcaggaaaggggggcgttgggaaaagcaccatctccacggagctggccctggcactgcgccatgcaggcaagaaggtgggaatcctggatgtggacctgtgtggccccagtatcccccgcatgctcggggcgcagggcagggctgtgcaccagtgcgaccgcggctgggcacccgtcttcctggaccgggagcagagcatctcgctcatgtctgtgggcttcctgctggagaagccggacgaggccgtggtgtggagaggccccaagaaaaacgcgctgataaagcagtttgtgtccgacgtggcctggggggagctggactacctggtggtggacacgcccccggggacctccgatgagcacatggccaccatagaagccctgcgtccctaccagcccctgggggccctcgtggtcaccacgccccaggcggtgtccgtgggggacgtgaggcgcgagctgaccttctgtaggaagacgggcttgcgggtgatgggaatcgtggagaatatgagcggcttcacctgcccacactgcacggagtgcaccagcgtcttctccaggggcggcggagaggagctggcccagctcgccggggtgcccttcttaggctccgtgcccctggaccctgcgctcatgaggaccctggaggagggccacgacttcatccaggagttccccgggagccggctatgttggatacctcatagacagaagtttggagcaacacggtggctccctgatatggactctgagacgttccggcacaggttggcacccaagaaaaacgcggcggacggcccaagggca

SEQ ID NO: 35917 - DNA, 201 bp, Homo sapiens
gactttgacaccccgtagctaacaccgatgacatagaccaggtgctggaggcccggggtcacctgaggactgcagaagtcctgcgctccgctaactgtgtggacacgcggcgtgccccctaagggggcgaactgacctcaggcatgtcttgtaactgtagaggcgcctgccattaaacgtgtccgctgctgtggcgacaga

SEQ ID NO: 35918 - DNA, 1441 bp, Homo sapiens
gctaggtaaggcctggtgtaaaatcggacgaggaagaagagccacgggcgggcacgcactgcccattggttggaaggcccttcgctctagctgggaggctgacggcccgcgggcgtaagcggactgcagccgcgagctcctggaggcggcgggatggaggcggcggccgagcctggaaacctggccggcgtcaggcacatcatcctggtcctctcaggaaaggggggcgttgggaaaagcaccatctccacggagctggccctggcactgcgccatgcaggcaagaaggtgggaatcctggatgtggacctgtgtggccccagtatcccccgcatgctcggggcgcagggcagggctgtgcaccagtgcgaccgcggctgggcacccgtcttcctggaccgggagcagagcatctcgctcatgtctgtgggcttcctgctggagaagccggacgaggccgtggtgtggagaggccccaagaaaaacgcgctgataaagcagtttgtgtccgacgtggcctggggggagctggactacctggtggtggacacgcccccggggacctccgatgagcacatggccaccatagaagccctgcgtccctaccagcccctgggggccctcgtggtcaccacgccccaggcggtgtccgtgggggacgtgaggcgcgagctgaccttctgtaggaagacgggcttgcgggtgatgggaatcgtggagaatatgagcggcttcacctgcccacactgcacggagtgcaccagcgtcttctccaggggcggcggagaggagctggcccagctcgccggggtgcccttcttaggctccgtgcccctggaccctgcgctcatgaggaccctggaggagggccacgacttcatccaggagttccccgggagccccgccttcgctgcactcacctccatagcccagaagattctggacgcgacgcccgcgtgcctcccctgactaaggccaccttgcagccgctttccagggccaccaagggctctgctccagcctctcagagaaacagaggcctgggctcggttcccgggccctgcaggggcaggcccaggcagcgtcagcgggagagcttctccccgaccagcccagccccaggatgtgtcgcaccagcagctctgcctggttggcctgcagtgccgtggtctgcgtgctctgcagctgtgagacgggggcggcctgggctctcttcccatccatgttgcctacctgtgcccctggcagccgcgtgtccacacagttagcggagcgcaggacttctgcagtcctcaggtgaccccgggcctccagcaccctgggtcgctgtcatctgtgtttagctcggggagtgccccctaagggggcgaactgacctcaggcatgtcttgtaactgtagaggcgcctgccattaaacgtgtccgctgctgtggcgacaga

SEQ ID NO: 35919 - DNA, 1495 bp, Homo sapiens
gctaggtaaggcctggtgtaaaatcggacgaggaagaagagccacgggcgggcacgcactgcccattggttggaaggcccttcgctctagctgggaggctgacggcccgcgggcgtaagcggactgcagccgcgagctcctggaggcggcgggatggaggcggcggccgagcctggaaacctggccggcgtcaggcacatcatcctggtcctctcaggaaaggggggcgttgggaaaagcaccatctccacggagctggccctggcactgcgccatgcaggcaagaaggtgggaatcctggatgtggacctgtgtggccccagtatcccccgcatgctcggggcgcagggcagggctgtgcaccagtgcgaccgcggctgggcacccgtcttcctggaccgggagcagagcatctcgctcatgtctgtgggcttcctgctggagaagccggacgaggccgtggtgtggagaggccccaagaaaaacgcgctgataaagcagtttgtgtccgacgtggcctggggggagctggactacctggtggtggacacgcccccggggacctccgatgagcacatggccaccatagaagccctgcgtccctaccagcccctgggggccctcgtggtcaccacgccccaggcggtgtccgtgggggacgtgaggcgcgagctgaccttctgtaggaagacgggcttgcgggtgatgggaatcgtggagaatatgagcggcttcacctgcccacactgcacggagtgcaccagcgtcttctccaggggcggcggagaggagctggcccagctcgccggggtgcccttcttaggctccgtgcccctggaccctgcgctcatgaggaccctggaggagggccacgacttcatccaggagttccccgggagccccgccttcgctgcactcacctccatagcccagaagattctggacgcgacgcccgcgtgcctcccctgactaaggccaccttgcagccgctttccagggccaccaagggctctgctccagcctctcagagaaacagaggcctgggctcggttcccgggccctgcaggggcaggcccaggcagcgtcagcgggagagcttctccccgaccagcccagccccaggatgtgtcgcaccagcagctctgcctggttggcctgcagtgccgtggtctgcgtgctctgcagctgtgagacgggggcggcctgggctctcttcccatccatgttgcctacctgtgcccctggcagccgcgtgtccacacagttagcggagcgcaggacttctgcagtcctcaggtgaccccgggcctccagcaccctgggtcgctgtcatctgtgtttagctcggggagtgccccctaagggggcgaactgacctcaggcatgtcttgtaactgtagaggcgcctgccattaaacgtgtccgctgctgtggcgacagaaaaaactaacaaaaaaaaaatccggccttttttggggaaagggtaagggcgtca

SEQ ID NO: 35920 - DNA, 1521 bp, Homo sapiens
gctaggtaaggcctggtgtaaaatcggacgaggaagaagagccacgggcgggcacgcactgcccattggttggaaggcccttcgctctagctgggaggctgacggcccgcgggcgtaagcggactgcagccgcgagctcctggaggcggcgggatggaggcggcggccgagcctggaaacctggccggcgtcaggcacatcatcctggtcctctcaggaaaggggggcgttgggaaaagcaccatctccacggagctggccctggcactgcgccatgcaggcaagaaggtgggaatcctggatgtggacctgtgtggccccagtatcccccgcatgctcggggcgcagggcagggctgtgcaccagtgcgaccgcggctgggcacccgtcttcctggaccgggagcagagcatctcgctcatgtctgtgggcttcctgctggagaagccggacgaggccgtggtgtggagaggccccaagaaaaacgcgctgataaagcagtttgtgtccgacgtggcctggggggagctggactacctggtggtggacacgcccccggggacctccgatgagcacatggccaccatagaagccctgcgtccctaccagcccctgggggccctcgtggtcaccacgccccaggcggtgtccgtgggggacgtgaggcgcgagctgaccttctgtaggaagacgggcttgcgggtgatgggaatcgtggagaatatgagcggcttcacctgcccacactgcacggagtgcaccagcgtcttctccaggggcggcggagaggagctggcccagctcgccggggtgcccttcttaggctccgtgcccctggaccctgcgctcatgaggaccctggaggagggccacgacttcatccaggagttccccgggagccccgccttcgctgcactcacctccatagcccagaagattctggacgcgacgcccgcgtgcctcccctgactaaggccaccttgcagccgctttccagggccaccaagggctctgctccagcctctcagagaaacagaggcctgggctcggttcccgggccctgcaggggcaggcccaggcagcgtcagcgggagagcttctccccgaccagcccagccccaggatgtgtcgcaccagcagctctgcctggttggcctgcagtgccgtggtctgcgtgctctgcagctgtgagacgggggcggcctgggctctcttcccatccatgttgcctacctgtgcccctggcagccgcgtgtccacacagttagcggagcgcaggacttctgcagtcctcaggtgaccccgggcctccagcaccctgggtcgctgtcatctgtgtttagctcggggagtgccccctaagggggcgaactgacctcaggcatgtcttgtaactgtagaggcgcctgccattaaacgtgtccgctgctgtggcgacagaaaaaaaacaaaccacaacacaacacaaaacacacgaccacaaacatcaaccacaaaacaggcggccacaccaagaggtca

SEQ ID NO: 35921 - DNA, 1366 bp, Homo sapiens
gctaggtaaggcctggtgtaaaatcggacgaggaagaagagccacgggcgggcacgcactgcccattggttggaaggcccttcgctctagctgggaggctgacggcccgcgggcgtaagcggactgcagccgcgagctcctggaggcggcgggatggaggcggcggccgagcctggaaacctggccggcgtcaggcacatcatcctggtcctctcaggaaaggggggcgttgggaaaagcaccatctccacggagctggccctggcactgcgccatgcaggcaagaaggtgggaatcctggatgtggacctgtgtggccccagtatcccccgcatgctcggggcgcagggcagggctgtgcaccagtgcgaccgcggctgggcacccgtcttcctggaccgggagcagagcatctcgctcatgtctgtgggcttcctgctggagaagccggacgaggccgtggtgtggagaggccccaagaaaaacgcgctgataaagcagtttgtgtccgacgtggcctggggggagctggactacctggtggtggacacgcccccggggacctccgatgagcacatggccaccatagaagccctgcgtccctaccagcccctgggggccctcgtggtcaccacgccccaggcggtgtccgtgggggacgtgaggcgcgagctgaccttctgtaggaagacgggcttgcgggtgatgggaatcgtggagaatatgagcggcttcacctgcccacactgcacggagtgcaccagcgtcttctccaggggcggcggagaggagctggcccagctcgccggggtgcccttcttaggctccgtgcccctggaccctgcgctcatgaggaccctggaggagggccacgacttcatccaggagttccccgggagccccgccttcgctgcactcacctccatagcccagaagattctggacgcgacgcccgcgtgcctcccctgactaaggccaccttgcagccgctttccagggccaccaagggctctgctccagcctctcagagaaacagaggcctgggctcggttcccgggccctgcaggggcaggcccaggcagcgtcagcgggagagcttctccccgaccagcccagccccaggatgtgtcgcaccagcagctctgcctggttggcctgcagtgcccctggcagccgcgtgtccacacagttagcggagcgcaggacttctgcagtcctcaggtgaccccgggcctccagcaccctgggtcgctgtcatctgtgtttagctcggggagtgccccctaagggggcgaactgacctcaggcatgtcttgtaactgtagaggcgcctgccattaaacgtgtccgctgctgtggcgacaga

SEQ ID NO: 35922 - DNA, 1334 bp, Homo sapiens
gctaggtaaggcctggtgtaaaatcggacgaggaagaagagccacgggcgggcacgcactgcccattggttggaaggcccttcgctctagctgggaggctgacggcccgcgggcgtaagcggactgcagccgcgagctcctggaggcggcgggatggaggcggcggccgagcctggaaacctggccggcgtcaggcacatcatcctggtcctctcaggaaaggggggcgttgggaaaagcaccatctccacggagctggccctggcactgcgccatgcaggcaagaaggtgggaatcctggatgtggacctgtgtggccccagtatcccccgcatgctcggggcgcagggcagggctgtgcaccagtgcgaccgcggctgggcacccgtcttcctggaccgggagcagagcatctcgctcatgtctgtgggcttcctgctggagaagccggacgaggccgtggtgtggagaggccccaagaaaaacgcgctgataaagcagtttgtgtccgacgtggcctggggggagctggactacctggtggtggacacgcccccggggacctccgatgagcacatggccaccatagaagccctgcgtccctaccagcccctgggggccctcgtggtcaccacgccccaggcggtgtccgtgggggacgtgaggcgcgagctgaccttctgtaggaagacgggcttgcgggtgatgggaatcgtggagaatatgagcggcttcacctgcccacactgcacggagtgcaccagcgtcttctccaggggcggcggagaggagctggcccagctcgccggggtgcccttcttaggctccgtgcccctggaccctgcgctcatgaggaccctggaggagggccacgacttcatccaggagttccccgggagccccgccttcgctgcactcacctccatagcccagaagattctggacgcgacgcccgcgtgcctcccctgactaaggccaccttgcagccgctttccagggccaccaagggctctgctccagcctctcagagaaacagaggcctgggctcggttcccgggccctgcaggggcaggcccagctgtgagacgggggcggcctgggctctcttcccatccatgttgcctacctgtgcccctggcagccgcgtgtccacacagttagcggagcgcaggacttctgcagtcctcaggtgaccccgggcctccagcaccctgggtcgctgtcatctgtgtttagctcggggagtgccccctaagggggcgaactgacctcaggcatgtcttgtaactgtagaggcgcctgccattaaacgtgtccgctgctgtggcgacaga

SEQ ID NO: 35923 - DNA, 1705 bp, Homo sapiens
gctaggtaaggcctggtgtaaaatcggacgaggaagaagagccacgggcgggcacgcactgcccattggttggaaggcccttcgctctagctgggaggctgacggcccgcgggcgtaagcggactgcagccgcgagctcctggaggcggcgggatggaggcggcggccggagtgtggggctggggctgccttttccgcgtcccctggaggagacctcaggcagcctctgtaggtctgaggacccgcctgcatgccaggttctccgggaggctttggacttgggagcctttgaacgtgcccttgagaggcggatcagaagggggcaggttttacgcatcatgtgttgagcccctcacatgcaccctccaaggacctgtcggggatggagcagcttgctggagacaaggggcatggcctcagcggtggcgccgggagcctggaaacctggccggcgtcaggcacatcatcctggtcctctcaggaaaggggggcgttgggaaaagcaccatctccacggagctggccctggcactgcgccatgcaggcaagaaggtgggaatcctggatgtggacctgtgtggccccagtatcccccgcatgctcggggcgcagggcagggctgtgcaccagtgcgaccgcggctgggcacccgtcttcctggaccgggagcagagcatctcgctcatgtctgtgggcttcctgctggagaagccggacgaggccgtggtgtggagaggccccaagaaaaacgcgctgataaagcagtttgtgtccgacgtggcctggggggagctggactacctggtggtggacacgcccccggggacctccgatgagcacatggccaccatagaagccctgcgtccctaccagcccctgggggccctcgtggtcaccacgccccaggcggtgtccgtgggggacgtgaggcgcgagctgaccttctgtaggaagacgggcttgcgggtgatgggaatcgtggagaatatgagcggcttcacctgcccacactgcacggagtgcaccagcgtcttctccaggggcggcggagaggagctggcccagctcgccggggtgcccttcttaggctccgtgcccctggaccctgcgctcatgaggaccctggaggagggccacgacttcatccaggagttccccgggagccccgccttcgctgcactcacctccatagcccagaagattctggacgcgacgcccgcgtgcctcccctgactaaggccaccttgcagccgctttccagggccaccaagggctctgctccagcctctcagagaaacagaggcctgggctcggttcccgggccctgcaggggcaggcccaggcagcgtcagcgggagagcttctccccgaccagcccagccccaggatgtgtcgcaccagcagctctgcctggttggcctgcagtgccgtggtctgcgtgctctgcagctgtgagacgggggcggcctgggctctcttcccatccatgttgcctacctgtgcccctggcagccgcgtgtccacacagttagcggagcgcaggacttctgcagtcctcaggtgaccccgggcctccagcaccctgggtcgctgtcatctgtgtttagctcggggagtgccccctaagggggcgaactgacctcaggcatgtcttgtaactgtagaggcgcctgccattaaacgtgtccgctgctgtggcgacaga

SEQ ID NO: 35924 - DNA, 1911 bp, Homo sapiens
gctaggtaaggcctggtgtaaaatcggacgaggaagaagagccacgggcgggcacgcactgcccattggttggaaggcccttcgctctagctgggaggctgacggcccgcgggcgtaagcggactgcagccgcgagctcctggaggcggcgggatggaggcggcggccggtgagtggcgggccagggtgcggagccgctccagggcctcgcttggggccccgccgcgtcccttcccggggcggcctcgctgcgtcgcgcgcctccggtgcgaccatcaccggccggcgtggctgggccgggccagaggccgcggcgcgggcattttctaaacagggtcgtttcccgcgtgctcctgcttcgatgtggaagctccgtgatctcggagggcctgagtcgtggagttgggggagcttttaaagttaactttgttgagcaccgcgttgtaggcgggcgcggtggcgcctgtgggccccgctatcctggaggtcgcggttgcaactgcaccgcagcccgggcaagagcgagaccctgtctctaaataaatcacacgcgcgcagtcatgaaagtaagacggacgccagaatctcacatgcttttaagttctttgtggaagtggcgctctcagtgttcagaaaagtagcctggaaacctggccggcgtcaggcacatcatcctggtcctctcaggaaaggggggcgttgggaaaagcaccatctccacggagctggccctggcactgcgccatgcaggcaagaaggtgggaatcctggatgtggacctgtgtggccccagtatcccccgcatgctcggggcgcagggcagggctgtgcaccagtgcgaccgcggctgggcacccgtcttcctggaccgggagcagagcatctcgctcatgtctgtgggcttcctgctggagaagccggacgaggccgtggtgtggagaggccccaagaaaaacgcgctgataaagcagtttgtgtccgacgtggcctggggggagctggactacctggtggtggacacgcccccggggacctccgatgagcacatggccaccatagaagccctgcgtccctaccagcccctgggggccctcgtggtcaccacgccccaggcggtgtccgtgggggacgtgaggcgcgagctgaccttctgtaggaagacgggcttgcgggtgatgggaatcgtggagaatatgagcggcttcacctgcccacactgcacggagtgcaccagcgtcttctccaggggcggcggagaggagctggcccagctcgccggggtgcccttcttaggctccgtgcccctggaccctgcgctcatgaggaccctggaggagggccacgacttcatccaggagttccccgggagccccgccttcgctgcactcacctccatagcccagaagattctggacgcgacgcccgcgtgcctcccctgactaaggccaccttgcagccgctttccagggccaccaagggctctgctccagcctctcagagaaacagaggcctgggctcggttcccgggccctgcaggggcaggcccaggcagcgtcagcgggagagcttctccccgaccagcccagccccaggatgtgtcgcaccagcagctctgcctggttggcctgcagtgccgtggtctgcgtgctctgcagctgtgagacgggggcggcctgggctctcttcccatccatgttgcctacctgtgcccctggcagccgcgtgtccacacagttagcggagcgcaggacttctgcagtcctcaggtgaccccgggcctccagcaccctgggtcgctgtcatctgtgtttagctcggggagtgccccctaagggggcgaactgacctcaggcatgtcttgtaactgtagaggcgcctgccattaaacgtgtccgctgctgtggcgacaga

SEQ ID NO: 35925 - DNA, 1460 bp, Homo sapiens
gctaggtaaggcctggtgtaaaatcggacgaggaagaagagccacgggcgggcacgcactgcccattggttggaaggcccttcgctctagctgggaggctgacggcccgcgggcgtaagcggactgcagccgcgagctcctggaggcggcgggatggaggcggcggccgagcctggaaacctggccggcgtcaggcacatcatcctggtcctctcaggaaaggggggcgttgggaaaagcaccatctccacggagctggccctggcactgcgccatgcaggcaagaaggctgtgccgctccttgcaggtgggaatcctggatgtggacctgtgtggccccagtatcccccgcatgctcggggcgcagggcagggctgtgcaccagtgcgaccgcggctgggcacccgtcttcctggaccgggagcagagcatctcgctcatgtctgtgggcttcctgctggagaagccggacgaggccgtggtgtggagaggccccaagaaaaacgcgctgataaagcagtttgtgtccgacgtggcctggggggagctggactacctggtggtggacacgcccccggggacctccgatgagcacatggccaccatagaagccctgcgtccctaccagcccctgggggccctcgtggtcaccacgccccaggcggtgtccgtgggggacgtgaggcgcgagctgaccttctgtaggaagacgggcttgcgggtgatgggaatcgtggagaatatgagcggcttcacctgcccacactgcacggagtgcaccagcgtcttctccaggggcggcggagaggagctggcccagctcgccggggtgcccttcttaggctccgtgcccctggaccctgcgctcatgaggaccctggaggagggccacgacttcatccaggagttccccgggagccccgccttcgctgcactcacctccatagcccagaagattctggacgcgacgcccgcgtgcctcccctgactaaggccaccttgcagccgctttccagggccaccaagggctctgctccagcctctcagagaaacagaggcctgggctcggttcccgggccctgcaggggcaggcccaggcagcgtcagcgggagagcttctccccgaccagcccagccccaggatgtgtcgcaccagcagctctgcctggttggcctgcagtgccgtggtctgcgtgctctgcagctgtgagacgggggcggcctgggctctcttcccatccatgttgcctacctgtgcccctggcagccgcgtgtccacacagttagcggagcgcaggacttctgcagtcctcaggtgaccccgggcctccagcaccctgggtcgctgtcatctgtgtttagctcggggagtgccccctaagggggcgaactgacctcaggcatgtcttgtaactgtagaggcgcctgccattaaacgtgtccgctgctgtggcgacaga

SEQ ID NO: 35926 - DNA, 1242 bp, Homo sapiens
gctaggtaaggcctggtgtaaaatcggacgaggaagaagagccacgggcgggcacgcactgcccattggttggaaggcccttcgctctagctgggaggctgacggcccgcgggcgtaagcggactgcagccgcgagctcctggaggcggcgggatggaggcggcggccgagcctggaaacctggccggcgtcaggcacatcatcctggtcctctcaggaaaggggggcgttgggaaaagcaccatctccacggagctggccctggcactgcgccatgcaggcaagaagcgctgataaagcagtttgtgtccgacgtggcctggggggagctggactacctggtggtggacacgcccccggggacctccgatgagcacatggccaccatagaagccctgcgtccctaccagcccctgggggccctcgtggtcaccacgccccaggcggtgtccgtgggggacgtgaggcgcgagctgaccttctgtaggaagacgggcttgcgggtgatgggaatcgtggagaatatgagcggcttcacctgcccacactgcacggagtgcaccagcgtcttctccaggggcggcggagaggagctggcccagctcgccggggtgcccttcttaggctccgtgcccctggaccctgcgctcatgaggaccctggaggagggccacgacttcatccaggagttccccgggagccccgccttcgctgcactcacctccatagcccagaagattctggacgcgacgcccgcgtgcctcccctgactaaggccaccttgcagccgctttccagggccaccaagggctctgctccagcctctcagagaaacagaggcctgggctcggttcccgggccctgcaggggcaggcccaggcagcgtcagcgggagagcttctccccgaccagcccagccccaggatgtgtcgcaccagcagctctgcctggttggcctgcagtgccgtggtctgcgtgctctgcagctgtgagacgggggcggcctgggctctcttcccatccatgttgcctacctgtgcccctggcagccgcgtgtccacacagttagcggagcgcaggacttctgcagtcctcaggtgaccccgggcctccagcaccctgggtcgctgtcatctgtgtttagctcggggagtgccccctaagggggcgaactgacctcaggcatgtcttgtaactgtagaggcgcctgccattaaacgtgtccgctgctgtggcgacaga

SEQ ID NO: 35927 - DNA, 1077 bp, Homo sapiens
gctaggtaaggcctggtgtaaaatcggacgaggaagaagagccacgggcgggcacgcactgcccattggttggaaggcccttcgctctagctgggaggctgacggcccgcgggcgtaagcggactgcagccgcgagctcctggaggcggcgggatggaggcggcggccgagcctggaaacctggccggcgtcaggcacatcatcctggtcctctcaggaaaggggggcgttgggaaaagcaccatctccacggagctggccctggcactgcgccatgcaggcaagaaggtgggaatcctggatgtggacctgtgtggccccagtatcccccgcatgctcggggcgcagggcagggctgtgcaccagtgcgaccgcggctgggcacccgtcttcctggaccgggagcagagcatctcgctcatgtctgtgggcttcctgctggagaagccggacgaggccgtggtgtggagaggccccaagaaaaacgcgctgataaagcagtttgtgtccgacgtggcctggggggagctggactacctggtggtggacacgcccccggggacctccgatgagcacatggccaccatagaagccctgcgtccctaccagcccctgggggccctcgtggtcaccacgccccaggcggtgtccgtgggggacgtgaggcgcgagctgaccttctgtaggaagacgggcttgcgggtgatgggaatcgtggagaatatgagcggcttcacctgcccacactgcacggagtgcaccagcgtcttctccaggggcggcggagaggagctggcccagctcgccggggtgcccttcttaggctccgtgcccctggaccctgcgctcatgaggaccctggaggagggccacgacttcatccaggagttccccgggagccccgccttcgctgcactcacctccatagcccagaagattctggacgagggccggtgctcctgatagggcacttgagcgttcaggcacaggttgtcagttaaaaaaaggtggctgtcggcctgggggcaggaggaggaattccgcacagccgtttacctcctgggcagacggcaggca

SEQ ID NO: 35928 - DNA, 1339 bp, Homo sapiens
ttttttgagacagggtcttaactgtcgccaaggctgaagtgcagtggcacgatcataactcactgcagccttgacctcctgggctcaagcgaccctcccacctcagcctcctgagcacctgggaccacaggatgcaccaccccgcttggctacatttttaatgtgtagacatggggtctgaatacgttattgagagtggtgcggaactcctcctggaccgaaatgatccttccactttggcctctcagagtgctgggattactggcagcctggaaacctggccggcgtcaggcacatcatcctggtcctctcaggaaaggggggcgttgggaaaagcaccatctccacggagctggccctggcactgcgccatgcaggcaagaagcgctgataaagcagtttgtgtccgacgtggcctggggggagctggactacctggtggtggacacgcccccggggacctccgatgagcacatggccaccatagaagccctgcgtccctaccagcccctgggggccctcgtggtcaccacgccccaggcggtgtccgtgggggacgtgaggcgcgagctgaccttctgtaggaagacgggcttgcgggtgatgggaatcgtggagaatatgagcggcttcacctgcccacactgcacggagtgcaccagcgtcttctccaggggcggcggagaggagctggcccagctcgccggggtgcccttcttaggctccgtgcccctggaccctgcgctcatgaggaccctggaggagggccacgacttcatccaggagttccccgggagccccgccttcgctgcactcacctccatagcccagaagattctggacgcgacgcccgcgtgcctcccctgactaaggccaccttgcagccgctttccagggccaccaagggctctgctccagcctctcagagaaacagaggcctgggctcggttcccgggccctgcaggggcaggcccaggcagcgtcagcgggagagcttctccccgaccagcccagccccaggatgtgtcgcaccagcagctctgcctggttggcctgcagtgccgtggtctgcgtgctctgcagctgtgagacgggggcggcctgggctctcttcccatccatgttgcctacctgtgcccctggcagccgcgtgtccacacagttagcggagcgcaggacttctgcagtcctcaggtgaccccgggcctccagcaccctgggtcgctgtcatctgtgtttagctcggggagtgccccctaagggggcgaactgacctcaggcatgtcttgtaactgtagaggcgcctgccattaaacgtgtccgctgctgtggcgacaga

SEQ ID NO: 35929 - DNA, 1130 bp, Homo sapiens
tccagaggagaagcctggaaaagcctgtccttattatcaggacggatttactacaaaagcctggaaacctggccggcgtcaggcacatcatcctggtcctctcaggaaaggggggcgttgggaaaagcaccatctccacggagctggccctggcactgcgccatgcaggcaagaagcgctgataaagcagtttgtgtccgacgtggcctggggggagctggactacctggtggtggacacgcccccggggacctccgatgagcacatggccaccatagaagccctgcgtccctaccagcccctgggggccctcgtggtcaccacgccccaggcggtgtccgtgggggacgtgaggcgcgagctgaccttctgtaggaagacgggcttgcgggtgatgggaatcgtggagaatatgagcggcttcacctgcccacactgcacggagtgcaccagcgtcttctccaggggcggcggagaggagctggcccagctcgccggggtgcccttcttaggctccgtgcccctggaccctgcgctcatgaggaccctggaggagggccacgacttcatccaggagttccccgggagccccgccttcgctgcactcacctccatagcccagaagattctggacgcgacgcccgcgtgcctcccctgactaaggccaccttgcagccgctttccagggccaccaagggctctgctccagcctctcagagaaacagaggcctgggctcggttcccgggccctgcaggggcaggcccaggcagcgtcagcgggagagcttctccccgaccagcccagccccaggatgtgtcgcaccagcagctctgcctggttggcctgcagtgccgtggtctgcgtgctctgcagctgtgagacgggggcggcctgggctctcttcccatccatgttgcctacctgtgcccctggcagccgcgtgtccacacagttagcggagcgcaggacttctgcagtcctcaggtgaccccgggcctccagcaccctgggtcgctgtcatctgtgtttagctcggggagtgccccctaagggggcgaactgacctcaggcatgtcttgtaactgtagaggcgcctgccattaaacgtgtccgctgctgtggcgacaga

SEQ ID NO: 35930 - DNA, 1219 bp, Homo sapiens
gctaggtaaggcctggtgtaaaatcggacgaggaagaagagccacgggcgggcacgcactgcccattggttggaaggcccttcgctctagctgggaggctgacggcccgcgggcgtaagcggactgcagccgcgagctcctggaggcggcgggatggaggcggcggccgagcctggaaacctggccggcgtcaggcacatcatcctggtcctctcaggaaaggggggcgttgggaaaagcaccatctccacggagctggccctggcactgcgccatgcaggcaagaagcgctgataaagcagtttgtgtccgacgtggcctggggggagctggactacctggtggtggacacgcccccggggacctccgatgagcacatggccaccatagaagccctgcgtccctaccagcccctgggggccctcgtggtcaccacgccccaggcggtgtccgtgggggacgtgaggcgcgagctgaccttctgtaggaagacgggcttgcgggtgatgggaatcgtggagaatatgagcggcttcacctgcccacactgcacggggcggcggagaggagctggcccagctcgccggggtgcccttcttaggctccgtgcccctggaccctgcgctcatgaggaccctggaggagggccacgacttcatccaggagttccccgggagccccgccttcgctgcactcacctccatagcccagaagattctggacgcgacgcccgcgtgcctcccctgactaaggccaccttgcagccgctttccagggccaccaagggctctgctccagcctctcagagaaacagaggcctgggctcggttcccgggccctgcaggggcaggcccaggcagcgtcagcgggagagcttctccccgaccagcccagccccaggatgtgtcgcaccagcagctctgcctggttggcctgcagtgccgtggtctgcgtgctctgcagctgtgagacgggggcggcctgggctctcttcccatccatgttgcctacctgtgcccctggcagccgcgtgtccacacagttagcggagcgcaggacttctgcagtcctcaggtgaccccgggcctccagcaccctgggtcgctgtcatctgtgtttagctcggggagtgccccctaagggggcgaactgacctcaggcatgtcttgtaactgtagaggcgcctgccattaaacgtgtccgctgctgtggcgacaga

SEQ ID NO: 35931 - DNA, 1045 bp, Homo sapiens
cctgtgttgaatcggcacagtggaggcgggggatggaggcggcggcgagcctggaaacctggccggcgtcaggcacatcatcctggtcctctcaggaaaggggggcgttgggaaaagcaccatctccacggagctggccctggcactgcgccatgcaggcaagaagcgctgataaagcagtttgtgtccgacgtggcctggggggagctggactacctggtggtggacacgcccccggggacctccgatgagcacatggccaccatagaagccctgcgtccctaccagcccctgggggccctcgtggtcaccacgccccaggcggtgtccgtgggggacgtgaggcgcgagctgaccttctgtaggaagacgggcttgcgggtgatgggaatcgtggagaatatgagcggcttcacctgcccacactgcacggagtgcaccagcgtcttctccaggggcggcggagaggagctggcccagctcgccggggtgcccttcttaggctccgtgcccctggaccctgcgctcatgaggaccctggaggagggccacgacttcatccaggagttccccgggagccccgccttcgctgcactcacctccatagcccagaagattctggacgcgacgcccgcgtgcctcccctgactaaggccaccttgcagccgctttccagggccaccaagggctctgctccagcctctcagagaaacagaggcctgggctcggttcccgggccctgcaggggcaggcccaggcagcgtcagcgggagagcttctccccgaccagcccagccccaggatgtgtcgcaccagcagctctgcctggttggcctgcagtgcccctggcagccgcgtgtccacacagttagcggagcgcaggacttctgcagtcctcaggtgaccccgggcctccagcaccctgggtcgctgtcatctgtgtttagctcggggagtgccccctaagggggcgaactgacctcaggcatgtcttgtaactgtagaggcgcctgccattaaacgtgtccgctgctgtggcgacaga

SEQ ID NO: 35932 - DNA, 792 bp, Homo sapiens
gctaggtaaggcctggtgtaaaatcggacgaggaagaagagccacgggcgggcacgcactgcccattggttggaaggcccttcgctctagctgggaggctgacggcccgcgggcgtaagcggactgcagccgcgagctcctggaggcggcgggatggaggcggcggccgagcctggaaacctggccggcgtcaggcacatcatcctggtcctctcaggaaaggggggcgttgggaaaagcaccatctccacggagctggccctggcactgcgccatgcaggcaagaaggctgtgccgctccttgcaggtgggaatcctggatgtggacctgtgtggccccagtatcccccgcatgctcggggcgcagggcagggctgtgcaccagtgcgaccgcggctgggcacccgtcttcctggaccgggagcagagcatctcgctcatgtctgtgggcttcctgctggagaagccggacgaggccgtggtgtggagaggccccaagaaaaacgcgctgataaagcagtttgtgtccgacgtggcctggggggagctggactacctggtggtggacacgcccccggggacctccgatgagcacatggccaccatagaagccctgcgtccctaccagcccctgggggccctcgtggtcaccacgccccaggcggtgtccgtgggggacgtgaggcgcgagctgaccttctgtaggaagacgggcttgcgggtgatgggaatcgtggagaatatgagcggcttcacctgcccacactgcacggtgagtcccgggggttgcag

SEQ ID NO: 35933 - DNA, 1461 bp, Homo sapiens
gctaggtaaggcctggtgtaaaatcggacgaggaagaagagccacgggcgggcacgcactgcccattggttggaaggcccttcgctctagctgggaggctgacggcccgcgggcgtaagcggactgcagccgcgagctcctggaggcggcgggatggaggcggcggccggagtgtggggctggggctgccttttccgcgtcccctggaggagacctcaggcagcctctgtaggtctgaggacccgcctgcatgccaggttctccgggaggctttggacttgggagcctttgaacgtgcccttgagaggcggatcagaagggggcaggttttacgcatcatgtgttgagcccctcacatgcaccctccaaggacctgtcggggatggagcagcttgctggagacaaggggcatggcctcagcggtggcgccgggagcctggaaacctggccggcgtcaggcacatcatcctggtcctctcaggaaaggggggcgttgggaaaagcaccatctccacggagctggccctggcactgcgccatgcaggcaagaaggtgggaatcctggatgtggacctgtgtggccccagtatcccccgcatgctcggggcgcagggcagggctgtgcaccagtgcgaccgcggctgggcacccgtcttcctggaccgggagcagagcatctcgctcatgtctgtgggcttcctgctggagaagccggacgaggccgtggtgtggagaggccccaagaaaaacggtaacggccgggcggcgcgtccgccgtcctggtgaagggggttagcgtccgtgccggcctctcctgtggaaatgttcctcttcagcagccaggcctgttcctggggacctgcacatgacacccacgaccaggcacagggctcaggctggcggtgtgtctccagttgggtccgtgctgccacacagctgtccccaactcccggtcagagggagtggggtctgctgagaccctggccatggcatgcagggacctgaggccccagtgtggcaggtcataggggcagagctgagggggttctggtgcctctggagcaggtggcattagacgcccccaaaggcagggagaggctggtgggagtgaggcgcaggctgtgggtgcaccagtggggcatccaccacggagaatgtgggtgctcccatgtgtgggtacagacgcctggagggtcctggctccgtgttctgatttggggcctcggggagtcagcgggggctctgtgggcaggggccagacactgcagaaagggacgctgtaatggccccggccccatctttgcactcctgcagcgggccagggcctcccgagagcctgtgatggaggctggtggcaagtgacacctgatggactgcagcccctcggcctgacctggctggttcttagtggcgcagggccacgtgtgcagacctgccctgccctgaccgccccgtctgccc

SEQ ID NO: 35934 - DNA, 1298 bp, Homo sapiens
gctaggtaaggcctggtgtaaaatcggacgaggaagaagagccacgggcgggcacgcactgcccattggttggaaggcccttcgctctagctgggaggctgacggcccgcgggcgtaagcggactgcagccgcgagctcctggaggcggcgggatggaggcggcggccgagcctggaaacctggccggcgtcaggcacatcatcctggtcctctcaggaaaggggggcgttgggaaaagcaccatctccacggagctggccctggcactgcgccatgcaggcaagaaggtgagcgccctacccctcactgggcggagccccgggcagctgcccgcatccccgtggaggcctggcggtgcccccggcctaggctgtgccgctccttgcaggtgggaatcctggatgtggacctgtgtggccccagtatcccccgcatgctcggggcgcagggcagggctgtgcaccagtgcgaccgcggctgggcacccgtcttcctggaccgggagcagagcatctcgctcatgtctgtgggcttcctgctggagaagccggacgaggccgtggtgtggagaggccccaagaaaaacggtaacggccgggcggcgcgtccgccgtcctggtgaagggggttagcgtccgtgccggcctctcctgtggaaatgttcctcttcagcagccaggcctgttcctggggacctgcacatgacacccacgaccaggcacagggctcaggctggcggtgtgtctccagttgggtccgtgctgccacacagctgtccccaactcccggtcagagggagtggggtctgctgagaccctggccatggcatgcagggacctgaggccccagtgtggcaggtcataggggcagagctgagggggttctggtgcctctggagcaggtggcattagacgcccccaaaggcagggagaggctggtgggagtgaggcgcaggctgtgggtgcaccagtggggcatccaccacggagaatgtgggtgctcccatgtgtgggtacagacgcctggagggtcctggctccgtgttctgatttggggcctcggggagtcagcgggggctctgtgggcaggggccagacactgcagaaagggacgctgtaatggccccggccccatctttgcactcctgcagcgggccagggcctcccgagagcctgtgatggaggctggtggcaagtgacacctgatggactgcagcccctcggcctgacctggctggttcttagtggcgcagggccacgtgtgcagacctgccctgccctgaccgccccgtctgccc

SEQ ID NO: 35935 - DNA, 783 bp, Homo sapiens
gctaggtaaggcctggtgtaaaatcggacgaggaagaagagccacgggcgggcacgcactgcccattggttggaaggcccttcgctctagctgggaggctgacggcccgcgggcgtaagcggactgcagccgcgagctcctggaggcggcgggatggaggcggcggccgagcctggaaacctggccggcgtcaggcacatcatcctggtcctctcaggaaaggggggcgttgggaaaagcaccatctccacggagctggccctggcactgcgccatgcaggcaagaaggtgagcgccctacccctcactgggcggagccccgggcagctgcccgcatccccgtggaggcctggcggtgcccccggcctaggctgtgccgctccttgcaggtgggaatcctggatgtggacctgtgtggccccagtatcccccgcatgctcggggcgcagggcagggctgtgcatccaccacggagaatgtgggtgctcccatgtgtgggtacagacgcctggagggtcctggctccgtgttctgatttggggcctcggggagtcagcgggggctctgtgggcaggggccagacactgcagaaagggacgctgtaatggccccggccccatctttgcactcctgcagcgggccagggcctcccgagagcctgtgatggaggctggtggcaagtgacacctgatggactgcagcccctcggcctgacctggctggttcttagtggcgcagggccacgtgtgcagacctgccctgccctgaccgccccgtctgccc

SEQ ID NO: 35936 - DNA, 635 bp, Homo sapiens
gacatggcgccaccgcctccactgtgccctgcaggctccgtgcccctggaccctgcgctcatgaggaccctggaggagggccacgacttcatccaggagttccccgggagccccgccttcgctgcactcacctccatagcccagaagattctggacgcgacgcccgcgtgcctcccctgactaaggccaccttgcagccgctttccagggccaccaagggctctgctccagcctctcagagaaacagaggcctgggctcggttcccgggccctgcaggggcaggcccaggcagcgtcagcgggagagcttctccccgaccagcccagccccaggatgtgtcgcaccagcagctctgcctggttggcctgcagtgccgtggtctgcgtgctctgcagctgtgagacgggggcggcctgggctctcttcccatccatgttgcctacctgtgcccctggcagccgcgtgtccacacagttagcggagcgcaggacttctgcagtcctcaggtgaccccgggcctccagcaccctgggtcgctgtcatctgtgtttagctcggggagtgccccctaagggggcgaactgacctcaggcatgtcttgtaactgtagaggcgcctgccattaaacgtgtcc

SEQ ID NO: 35937 - DNA, 289 bp, Homo sapiens
gagtgtggggctggggctgccttttccgcgtcccctggaggagacctcaggcagcctctgtaggtctgaggacccgcctgcatgccaggttctccgggaggctttggacttgggagcctttgaacgtgcccttgagaggcggatcagaagggggcaggttttacgcatcatgtgttgagcccctcacatgcaccctccaaggacctgtcggggatggagcagcttgctggagacaaggggcatggcctcagcggtggcgccggggtgagaatgcaggggttttgccaag

SEQ ID NO: 35938 - DNA, 1367 bp, Homo sapiens
catgttggacaggttggtcttggtgatctgcccaccttggcctccaaagtgctgggattacacgtgtgagccaccatgcctggccctctctactactaccattctaatccaagccaccaataactcttgcctagacttctgcaatgacttcctaactagtcttcttgcttccactccgcctatctatgtaaaacaaatctttagaattccaatttcaaatatcattaaaatcagaaacaccactgtcaagcatgaattagggaagagcaggaaaatcaaagataataactgggaattaactttcactgtcattaagatttagtttaagttaaacttgtactgttttcaaaaggggagctagtggcattttggctgaagcaattcttccccctacagctcatcagtactgcaaaacttttagcttgcctggccaatagtctgttacaatccaaaaggtaattccaaacatcctgactccaccccaatctcctttgagaagcactaagttaaaattatgtcaatataagcctgtggtaaaatcagggtgaggttaaataacaagtgagaatcatcctaacaacattaggactaaataaacacacgtttatagcaaacaaagatccatctctatgattcccttcccttcacccactaagctcccaggatatggcagccaagagtttggaacaatctcctctagggaatttgatcacctcaagaggaaagacctaaaaatactgacatttggggttccccagtgaaatattccaataagattaccctacagtgaggctcaatgttgataagccacagccacttgcttggctacaaatcaacattttaatctctcactcttaaaacaagaacagacagttgaaggggatgagaaaagcagatgtgtgaagggctctatgttatccccacttccagcttgaaacaaggcataaactccccatgcaaaagttaccctcctgatactaggaagaaaagaatattcttatcaccaggaatggggagtcaatgcagggatgagtctgcacaacaaaccgtactaaaataatcctttccttccattagtttcccccatgtagttcctagtcactttcctacaatttgccacccttagaaactcaaaaccctttccttcatccagtcatttctcttcaatttattaccctttgttaaaatggtatataaagccaggcttggtgactcacacctgtaatcccagcactaaggccgaggtgggaggactgcttgagcctaggagttcaagatcagcatgggcgacaaagcaagacctcatctctacaaaaaaaatttttaaaagaacttaactgggcatgcttatagtcctagctatttgg

SEQ ID NO: 35939 - DNA, 1313 bp, Homo sapiens
catgttggacaggttggtcttggtgatctgcccaccttggcctccaaagtgctgggattacacgtgtgagccaccatgcctggccctctctactactaccattctaatccaagccaccaataactcttgcctagacttctgcaatgacttcctaactagtcttcttgcttccactccgcctatctatgtaaaacaaatctttagaattccaatttcaaatatcattaaaatcagaaacaccactgtcaagcatgaattagggaagagcaggaaaatcaaagataataactgggaattaactttcactgtcattaagatttagtttaagttaaacttgtactgttttcaaaaggggagctagtggcattttggctgaagcaattcttccccctacagctcatcagtactgcaaaacttttagcttgcctggccaatagtctgttacaatccaaaaggtaattccaaacatcctgactccaccccaatctcctttgagaagcactaagttaaaattatgtcaatataagcctgtggtaaaatcagggtgaggttaaataacaagtgagaatcatcctaacaacattaggactaaataaacacacgtttatagcaaacaaagatccatctctatgattcccttcccttcacccactaagctcccaggatatggcagccaagagtttggaacaatctcctctagggaatttgatcacctcaagaggaaagacctaaaaatactgacatttggggttccccagtgaaatattccaataagattaccctacattaatctctcactcttaaaacaagaacagacagttgaaggggatgagaaaagcagatgtgtgaagggctctatgttatccccacttccagcttgaaacaaggcataaactccccatgcaaaagttaccctcctgatactaggaagaaaagaatattcttatcaccaggaatggggagtcaatgcagggatgagtctgcacaacaaaccgtactaaaataatcctttccttccattagtttcccccatgtagttcctagtcactttcctacaatttgccacccttagaaactcaaaaccctttccttcatccagtcatttctcttcaatttattaccctttgttaaaatggtatataaagccaggcttggtgactcacacctgtaatcccagcactaaggccgaggtgggaggactgcttgagcctaggagttcaagatcagcatgggcgacaaagcaagacctcatctctacaaaaaaaatttttaaaagaacttaactgggcatgcttatagtcctagctatttgg

SEQ ID NO: 35940 - DNA, 848 bp, Homo sapiens
cacctgccagtagtgggatagataagccacgtggctcaataaattattgaacccatagtgtcaccctccaagtatttttcttttttaatcacaataccataatgcctttaggtgtgaaactgggtatagcctaagaataggaactggatgagatatttcatgaggacacttgatccttgcttgctgtgatattgctaagggtgtggcatcatgatttggacaaaatgagaatggcaggaattggggagataaaatatcaggctcataggccttcatggagttaaagcagtattgtgtgtgcttagctccagaattctcagaatttttacaataattcaacaggacgttggattgaataagcactttaatactgaaacactggatttgaaaactggatgttatgtgttctactcataagcctattactcattggctgtgacctgggatacatcactgcttttgcttttagagaatgagggtcattgggctaggtatttacagctcttaatattttagggttgcagtctagcaccgtatttttaaaacaagaattctaagcttctaatatccacctgttctttgcaaggttaacttttttttaacaaactctgagaatcagaagtcttagacatttacttgataattttagcatttgaggaattggctgatgttcctagaatcaaattctgacagaaactttaatgccccctctatctcactgttttatttaacaagagttctgattgctttcattggttggtaaaacagatatttcaagtaatagccacactgattaatttcattatggtgacatttcattaatgtcattatggtgacatttcagtttt

SEQ ID NO: 35941 - DNA, 1005 bp, Homo sapiens
ctgtaaatattcatgaagtaagcacaccatgtaacacctatatttaaaaaacaatattaccactaccttataagccttcccttcctctacccttacagtcactatgtcccaccaagcaaacaggatgacttctacagcatatattagttttgcctgcttttgagtatgaaatcatatggcggctttttcaaattttatttgtgagatttattgatgttgttgtttgtactaacagttcattcaggcccattgctgtattatattccactgcatgactagaccctagtttatctgttctatttttggatttgttttgtttttacattttggctgtatgtctttgggtgtgcatacatacacatttctgttggctatgtacctagaagtggggctgctggatcatagaacgtgcatatgttcaacttttgtagatgctgctagatgctttccttaagtgtttattctttatattccagcagcagtttgtaagtttcatttgttctatatcttcaccaacacttggtgatattgttggtagagatgggcctcttcctatggttgctgaggctggtcttaaactcctgggtgtaagcaatccttccaaagtgctgggattacaggcatgacaggtgtagcatcaaccttggccagtaatgtggttttaatttgtattcccctgataactaatgaagtagaactctttttcatatatttactattcatttggagtactaaaaaaattttatgacacttgcattttaaaatattaaactttcctatgttaagaagggctgttgtaaattagttattttctaaaacatttggcataatcattcagtctatctctgtatttgataagttgtgaaattctttgaaaatatttttttccttaataaaactatgtatttcaaaccatggaattgatttcaaatgctaccttctgagtgttattaagactatttattcatagtatttttgaaaacaagactagaaaaaatgaagtgt

SEQ ID NO: 35942 - DNA, 715 bp, Homo sapiens
atggaaatgatgttagacaaaaagtgaattcagcagttttcttatttgaattcaaaatgggtcataaagcagtgaagacaacttgcaacatcaacaatacatttggcccaggaactactaatgaacctacagtatagtggtggttcaagaagtttcataaaggagacagccttgaagataaggagcacagtggtcggccattgaagttgacaacaaccagttgagagcaatcatcgaagcagatcctctgacaactacacgagaagttgccgaagaactcatcgttgaccattttatgattgttcggcatttgaagcaaattggaaaggtgaaaaagcttaataagtgggtgttaggatcacctaagcagaccattcccttcccctcccacaggccttacaatacagtctcttgcgctctccacacagtcaccccagggcaaaagacaaaccccccacttcactgacccctccactaactgtttgtccaggcagttacaggatgccattaacgtctgttcacctcacataacaaagctggcaaaaaacatctccaggatgcggacaagacacttgcatccccgaatcagctccccgaccctgacccagttcctcatcctataaagccctgctgtagtctgtaagtgtggctgcctcctctgcttttgtcaggaggtagcccggcaggactgacaataaattagcttgcctgaact

SEQ ID NO: 35943 - DNA, 553 bp, Homo sapiens
atggaaatgatgttagacaaaaagtgaattcagcagttttcttatttgaattcaaaatgggtcataaagcagtgaagacaacttgcaacatcaacaatacatttggcccaggaactactaatgaacctacagtatagtggtggttcaagaagtttcataaaggagacagccttgaagataaggagcacagtggtcggccattgaagttgacaacaaccagttgagagcaatcatcgaagcagatcctctgacaactacacgagaagttgccgaagaactcatcgttgaccattttatgattgttcggcatttgaagcaaattggaaaggcagttacaggatgccattaacgtctgttcacctcacataacaaagctggcaaaaaacatctccaggatgcggacaagacacttgcatccccgaatcagctccccgaccctgacccagttcctcatcctataaagccctgctgtagtctgtaagtgtggctgcctcctctgcttttgtcaggaggtagcccggcaggactgacaataaattagcttgcctgaact

SEQ ID NO: 35944 - DNA, 383 bp, Homo sapiens
tgttgatcattaaactttgaactgcatttgagtgtaatattgcagtttcttttgctcgtgaatcctcaaacccaaaatgatgaaagtaaaactttcagcaaaacagtcacataggcaaccaagtagggcaaggtgaccacagtctgactactatttaactgctcacttcccaggggaggggcattggccactttgctcattacccaaaaagtcctgagccccttgatcctaggttcctcagctgtgattcaactgcctgtatgcgtagcgtccatctgagcctgttgcattgtcccgtggcacttgggggcaggggaactggaaaaaccatactgatgctcatgttgcttgctgtgttgtaataaactgtcttgtttgaaccc

SEQ ID NO: 35945 - DNA, 340 bp, Homo sapiens
cagacaaaaaatcaaaagacaaaaatcagtttcaaatacatacaccagcaccgtcaggaaaagcattttttttcatttaccgtagtgagaaaaagcataatgtacttaggagaaatctaacaagagacatacaagcctgtacatttcattctttgctatttctctttaacatgtaatggtttatgcactgtaagtcatagtaaaaatgttgagcaaaggaataaagtcatagaagagtacgtagcatgattctattatcatacttaagtcaaggtaaaagtaaatgacatattgtttagaaattcaaatgcagtggaaaaattataaccaaaaatgtcag

SEQ ID NO: 35946 - DNA, 312 bp, Homo sapiens
gcatccataccaccaactaataaaaaatctgtcctttgaagcaataatacattcaagtatcttcctcaggcactacttttgttatgttttatactacatttattcatacacttggccttattttctctgttgctaagttaaaaacttgaagtcagaaactttttctttttcatacatatatcccttggagtactggcactatattcagaacacagtaggtcaataaatatttatttgattggtattcaaaagctgggcaaactagcctttaaatatgaagatcacaagttctgataagtttttctcacaaat

SEQ ID NO: 35947 - DNA, 2830 bp, Homo sapiens
  misc_feature (23)..(23): n is a, c, g, or t
  misc_feature (599)..(599): n is a, c, g, or t
ttgctacatcaaagagagagatncttttgtttgtttgttcgtttgttttttgagactgagtttcactctttcgcccaggctggagtgcattggcatgatctcagctcactacaacctctgccttctggtttcaagcaactcttctgcctcagcatcccaagtagctgggataacaggtgccagccaccatgcccagctaatttgtgtatttctagtagagatggggtttcaccatattggccaagctggtcttgaactcctgacctcatgtgatccgcccgcctcagcctcccaaagtgctgggattacaggcttgagccaccacgcccagcctgtagcatattttaataggagaatacaatatataatagtagcagggttaagtaaggcatccatcatctgtagcatttctcctttgttttacaaacaatccaattctacactttaaaaaaaaatttttaaatgtacaattaaatttttatttaccacagtgttatttttatcgtcataataaaaattatatacgagtataaatgaaattcatttctaaattcttaataaatattttctcatgccaggtgtggtggctcacgtctgtnatcccagcactttgacaggctgagcgagggagtggatcttgaggtcagcagttcgagaccagcatggccaatatggagaaatcccgtctctactaaaaatacaaaaattagccaggcgtggtggcatgtgcctgtaatcccagctactcaggaggctgaggcaggagaatcgcttgaacctgggaggtggaggttgcaatgagccaagatcaccccactgcactccagcctgggcaacagagcgagactccatctcaaaaagtaaaatatattttcaaattttctatatatttttctttgaacatgtggcctgtctgcctgcaaacatatacagacttttagttttgattcatatagagttaaatacatgttagtctaaagacaaatcttaggtgtaagaaaattatggagttaagtatgtgtgtgtgagtatgagtttgtacatattttcagaaggaaagaatgatacgggaacaaaaatcattttaatatggtgactactataaaactaaaaacctaaaaaatgctgaaagcaaatgtatactttttggtttgtattgaatttattactgtacagtctatgacttagagttctgaatcttcccaagcaaattctctgtatatacttgcctggtactcatgctagacccatactttttttgtttcttacattttttttgttttatattttatgaagtattcattatgtgagctggtctgcgattataagaatttttatgaaatttagtgcacacaaaataatctttagatgtaattccaaaagtagtgtattaagttacattttatttagttagagcactccattttgttcttttaagaggagaacaatatataggttttctttagtgatttgttcctttcactttttataattgacataagcatatttattgagtcaatttgttcagctaagtactagggaggcttcattagtcatgaggatgtttttatatataaatgtagcaaacatatattacagttttcactgtgtaatagattatccataataattcataaatattcctgctgaagttagtttgtaacttcaagtcaaagatgaaaaatatcaatggtgaagattgattgttcatatagagaggacattttttttccagactgtaaaactgaatcttgttgaatttaaagagaaattctggcagaggcagatgaatcacctgaggtcaggagtttgagaccagcctgatgaatatggtgaaacccagtctctactaaaactacaaaaatagccaggcatggtggtgggtgcctgtaatcccactcgggaggctgagtcaggagaattgcttgaacccggaggtgaagattggagtaagccaagattgtgccgttgcactacagcctgggcgacagagcgagactccatataaaaaaaaaaaaaaaaaaaaagctgggcgtggtggctcacacctgtaatcccagcactttgggaggccaaggtgggcgaatcacttgaggtcgggagtttgagaccaggtgaccaacatggagaaactccatctctactaaaaaatacaaaattagcccggtgtggtggcgcatgcctgtaatcccagctactcgggagactgaggcaggagaatcgcttgaacacgacaggtggaggttgcagtgtggcgagattgcaccattgcactccagtctgggcgacaagagggaaactccatctgaaaaaaaagagaaattcttttattttctacttctcttcagatttgtcttatgcattttccaactatgtatgcatcacagctattctttttctgagttatagctacagttttcttactgttgtcttcatgccatttcatttcacatggtactttgtagattttgatgaggaagttggtatttttagtgcacacaaaaattggttttaactgtagagtttgcttatcagaacagttaaaaggcagccaggtgtggctcacgcctgtaatcccagcactgagataggtcaaggagggtggatcacttgaggtcaggagtttgagaccagcctgaccaacatggtgaaaccctgtgtctactaaaaatacaaatttagccacgcgtggtgacgcacgcctgtaatcccagctactcggaaggccgagggagcagaatcgcttgaacctgggaggtagaggttgcggtgagccgagactgggccactgcacttcagcctgggcaacaagagcgaaattctgtctaaa

SEQ ID NO: 35948 - DNA, 2689 bp, Homo sapiens
  misc_feature (23)..(23): n is a, c, g, or t
  misc_feature (599)..(599): n is a, c, g, or t
ttgctacatcaaagagagagatncttttgtttgtttgttcgtttgttttttgagactgagtttcactctttcgcccaggctggagtgcattggcatgatctcagctcactacaacctctgccttctggtttcaagcaactcttctgcctcagcatcccaagtagctgggataacaggtgccagccaccatgcccagctaatttgtgtatttctagtagagatggggtttcaccatattggccaagctggtcttgaactcctgacctcatgtgatccgcccgcctcagcctcccaaagtgctgggattacaggcttgagccaccacgcccagcctgtagcatattttaataggagaatacaatatataatagtagcagggttaagtaaggcatccatcatctgtagcatttctcctttgttttacaaacaatccaattctacactttaaaaaaaaatttttaaatgtacaattaaatttttatttaccacagtgttatttttatcgtcataataaaaattatatacgagtataaatgaaattcatttctaaattcttaataaatattttctcatgccaggtgtggtggctcacgtctgtnatcccagcactttgacaggctgagcgagggagtggatcttgaggtcagcagttcgagaccagcatggccaatatggagaaatcccgtctctactaaaaatacaaaaattagccaggcgtggtggcatgtgcctgtaatcccagctactcaggaggctgaggcaggagaatcgcttgaacctgggaggtggaggttgcaatgagccaagatcaccccactgcactccagcctgggcaacagagcgagactccatctcaaaaagtaaaatatattttcaaattttctatatatttttctttgaacatgtggcctgtctgcctgcaaacatatacagacttttagttttgattcatatagagttaaatacatgttagtctaaagacaaatcttaggtgtaagaaaattatggagttaagtatgtgtgtgtgagtatgagtttgtacatattttcagaaggaaagaatgatacgggaacaaaaatcattttaatatggtgactactataaaactaaaaacctaaaaaatgctgaaagcaaatgtatactttttggtttgtattgaatttattactgtacagtctatgacttagagttctgaatcttcccaagcaaattctctgtatatacttgcctggtactcatgctagacccatactttttttgtttcttacattttttttgttttatattttatgaagtattcattatgtgagctggtctgcgattataagaatttttatgaaatttagtgcacacaaaataatctttagatgtaattccaaaagtagtgtattaagttacattttatttagttagagcactccattttgttcttttaagaggagaacaatatataggttttctttagtgatttgttcctttcactttttataattgacataagcatatttattgagtcaatttgttcagctaagtactagggaggcttcattagtcatgaggatgtttttatatataaatgtagcaaacatatattacagttttcactgtgtaatagattatccataataattcataaatattcctgctgaagttagtttgtaacttcaagtcaaagatgaaaaatatcaatggtgaagattgattgttcatatagagaggacattttttttccagactgtaaaactgaatcttgttgaatttaaagagaaattctggcagaggcagatgaatcacctgaggtcaggagtttgagaccagcctgatgaatatggtgaaacccagtctctactaaaactacaaaaatagccaggcatggtggtgggtgcctgtaatcccactcgggaggctgagtcaggagaattgcttgaacccggaggtgaagattggagtaagccaagattgtgccgttgcactacagcctgggcgacagagcgagactccatataaaaaaaaaaaaaaaaaaaaagctgggcgtggtggctcacacctgtaatcccagcactttgggaggccaaggtgggcgaatcacttgaggtcgggagtttgagaccaggtgaccaacatggagaaactccatctctactaaaaaatacaaaattagcccggtgtggtggcgcatgcctgtaatcccagctactcgggagactgaggcaggagaatcgcttgaacacgacaggtggaggttgcagtgtggcgagattgcaccattgcactccagtctgggcgacaagagggaaactccatctgaaaaaaaagagaaattcttttattttctacttctcttcagatttgtcttatgcattttccaactatgtatgcatcacagctattctttttctgagttatagctacagttttcttactgttgtcttcatgccatttcatttcacatggtactttgtagattttgatgaggaagttggtatttttagtgcacacaaaaattggttttaactgtagagtttgcttatcagaacagttaaaaggcagccaccaggcctggctcctaatccactttcatggaccctcgtgattgcattggatctccccgggtaatctgggatgttctacttggcctaaggtcagctgattagcaaccttagttcatctgcagtctccataacttct

SEQ ID NO: 35949 - DNA, 379 bp, Homo sapiens
caaaagacacctacacagataaaacaaggttttcctttctctatcctctctcatcaccaaatgtccagcttagagtcgccctctttcaaaaataccaaacacatctcagggtaggtcatttcctgtggtccccagtgtgggtaaaatccttggctctacagatacatttcaaatgggtttgttttggaggcatcttcctctctaaatcctaaatactctgttgacactcttaatctggaatttttgaggggtagaaaagggaagtgcgatctgaagtgttatcccagtttcatgtttgaacttgttaagaaaatacctctgtcctcagtgacgtactcttttgggtttggatgtggtatcctagaagttccaaatgatg

SEQ ID NO: 35950 - DNA, 414 bp, Homo sapiens
acaagcaatgtcagatgcccctcttctagagaggacagtacaggtggcttaccaaaagaggctgcagttcacaagaacaggttagatgtctatctgtccatacaaggtcatgaggtggactccacaaccaggctgaagcctaatgcctaataactaactgagcagaggctccagaccagggtcagactgcacaagagagtgagtggtgctctatctagagtgttgagttagactatgatcctctgtataaggcatatttgttgggaactgtacaagactgagccttctgaaatgacttaagtagtcccggattaaaaggggcaggtcataggtacagtaggaagcccaggaatcgggtagaagatttgagcaggatgctttgtctgatatctcacagtgccatttgttcttccc

SEQ ID NO: 35951 - DNA, 294 bp, Homo sapiens
taatagagacagggtctcactatgttgcccaactggtcttaaaatcctgggctcaaatgttcctcccacctcaacctcccaaagtgctgggattacaggtgtgagacatcacacctaccctgaacatgttaagttttaaatgcctaagagacatccaatcagagatgtcaagcaactagttggatttgtaagtctggagctcagagaagacataaattcaggaggtatcagcccatagaatatttttaaagccatgaatgaatgagtttctttaggaatgtataaagagggccc

SEQ ID NO: 35952 - DNA, 354 bp, Homo sapiens
tttctctcctgaaggcaattctctagtaatgtgtggtatttaataattgaaccaagtcagaaatcccaagaacaaccagcctcaacaagaagacaattaaagtagaatccaattaaggggtatacatttcttcctcaacctgatgaacagatttttttaaaggtgagagaaatttcagttgaatatttgtatttcaagattaaacccaataacaaattatacatatagaaaatgggccgggcgcggtggctcacgcctgtaatcccagcactttgggaggtcgaggcgggcggatcacgaggtcaggagatcaagaccatcccggctaaaacggtgaaaccccgtctctactaa

SEQ ID NO: 35953 - DNA, 607 bp, Homo sapiens
cttgtagtgagccgagatactgcactccagcctgggagacagagcgagacgccgtctcaaaaaacaaaaacaaaaacaaaaacaaaacaaaaaaaaaaaccacacacatgtaccaaacgcttaagatttaatacaaggaatactttttactatctcatcaagaatattttttcagccaggtgtggtggctcacatctgtaatctcagcactttggaaggccaaagtgggaggatcacttgaagccaggagttcaagactagcctgggcaacatagtaagaccctgtctctacaaaaaattaaaaatcagccaagtgtggtggtgcatgcctgtagtcctggctactcaggaggctgaggcagcaggatcacttgagctcaggggtccaaggctgcagcaagctgtgatgccactgttggactccagcctggacaacagagcaaggccctatctcaaaaataaattaattaattaagaaatgagtggacacagtggctcccacctataatcccagcactttgggaggcgaacacaggaggattacttatggccaggcgttcaagaccagcctgggcaacgtagtgagaccctgtctctacaaaacagt

SEQ ID NO: 35954 - DNA, 239 bp, Homo sapiens
gatgctactagtttggacaccacactttgggaaccagtgccttaaatatttactttatgtagacaagccatgaattttgtctcctgtgtggtaccactgagaacagcattagtggtaaagaaagggatctggcatttactgagcacctatgacatttgccatctgccaggtacctcatggggcactttatacacattattctatttaagactcacagccaccctgtcaatcaatttatg

SEQ ID NO: 35955 - DNA, 467 bp, Homo sapiens
ggacattaaaaaaaaaagatatttaccatgggaccatgggacttgagagaaatggattctggaagctgtggctgagcatctgaatttattcaggttctgaagggcagcattatgagtggaccccaagatcaacaaaggcctcacagagccaggcatttggtgacagtttgtgagaatgtaacaatgcaaaatttagcctgtattggctgtcattatcctagaagtctctttcagacaatttaaaggactcatgacaactcttaagaaaacaaaatacatatatcaaaatgtgtacctgagggaagtaaaatgttctgtttggcttctgtaccagggctcgttagtgaagaatgaataaagcaagtgttattattattattattattgttattacaatgataattcatgtggttgcttgtgtggagcaaagaaattcttgtgtaaatggcctttaatagtagttgatg

SEQ ID NO: 35956 - DNA, 351 bp, Homo sapiens
ataggtactaccttaaatacttattgatgagttaagattgaacaactaatgatttttcacatttgcataaatatccttataaatcaaccatgcttttgagaaatctgctaacatctgtaaaatgtgataaatactaaaagggaagctatgagtgctgtgtgagctaccaagtcctatgaagaagccattctccaacctcttttctaccccagtcccttctcaagagaggcagctggggctgggcgtggtggctcatgcctgtaatcccagaactctgggaggccaaggcgggtggatcacctgaggtcaggggttggtgatcagcctggccaacatggtgaaaccctgtct

SEQ ID NO: 35957 - DNA, 605 bp, Homo sapiens
cacagatccactctccactcatttccatcctgtcttatgccacttggggcttgtccttctagaatgcatccctggctcccctgtgtgcacacttgtagttaggtttagcattgggggcacccgatggagcctggaagtgagaggaaggtgaggtccgtatttcttccctctccctccctgctctggcactgagtatctggcaatagctgcatctgtctattacttcagtggccactcttccacagccccaattctcagtgggtcccatagcattatttacctttgttcctttagctcccatcaaggaagacccagaggcattctcctcaccaaggcattaagaaatgcatgggtgaggggaacagcggcgtgcgtgtaaaggtcctgtggcacctctcctctgcaggctggaggtcatggcgggagatgctgcatggatttgccctccctgctgtcagaacaacagggttctggaagagtagaggacaggccgtgggacttggctgtctagagacatggcgggagggatttccttgagaggcagggacatgtggtggttactaatcattgtgaggtgtctgggatgtaatggatgggaaatctac

SEQ ID NO: 35958 - DNA, 381 bp, Homo sapiens
gaattgcattatacttatagatcaatctggggagaattggcatctttactgtgttgaatcttccaatctgtgaacatggcctctctgttccttgagacacaacaatattgaaattgggccaatgaataaccctacagtagcctatcattcactttggggaacggaagctgttgtgagcaaccctatgtgagcctcctgtcctcagctacatcgatgagcttggcagtgaattatctagtcccatccaagcttccagaagactgcagccccagctgacagcttgactgcaacctcatgaatgtttctgagctaggaccacccagttgcttctgaattcctcaccctcagaaactatgatacaataaataccgattattttaa

SEQ ID NO: 35959 - DNA, 284 bp, Homo sapiens
gaattgcattatacttatagatcaatctggggagaattggcatctttactgtgttgaatcttccaatctgtgaacatggtatgtctctaattatttagatcttttattttattcatcagcattttacagtttttagcctatgaatcctgtatggtttactagatttattcccaaacattttatttttgaaggtatttaaatggtattttttttaaaatttctattttcaattcttctctgctagtatatagaaatgtgattaatttttatgcatgatcttgtat

SEQ ID NO: 35960 - DNA, 396 bp, Homo sapiens
atttactgtagctttatctgtaatagctaaaaactcaaaagaacccagctgttcttccatgagtaaatgattaaatgaactgtggtacatccacaccatggactagtactcatcaataaaaagaaatgaactattgatacatgccacaatctccagagaatcatgctgagtggaaaaagccaatcctaaaggttaatatataatatgctacatacttccatttataaaaattcttgaagtgagaaaattacaggaagaaatgaggctgggagcagtggctcacgcctgtaatcccagcactttgggtaaaataatagcctcccattaagaagaaatttggaaaaaatttgaaaaatctaaaagtagtataaagtatctactaaatgtaaaaaaaaa

SEQ ID NO: 35961 - DNA, 1101 bp, Homo sapiens
  misc_feature (2)..(2): n is a, c, g, or t
  misc_feature (12)..(12): n is a, c, g, or t
  misc_feature (16)..(16): n is a, c, g, or t
  misc_feature (21)..(21): n is a, c, g, or t
  misc_feature (28)..(28): n is a, c, g, or t
  misc_feature (36)..(36): n is a, c, g, or t
tnacaccggaangggngtggnctgaatncgggcccnttttatgaattttttcagccacaacaactggattctcttttctgatttttgctgcagcttctgctttgtaatcatacggacagttgtgcttgtcagagttaacggtgaagtccacaaaacaaatttccacatcggcagtcaaacctgtaagaccaactttctttctgcacatgaaacatctgtttttctttggtttgggcaattcaggagctttttctttactctgagaagtactgggctgaaaaactgatgggctgggctgagtgacaactggctctcacacctctgttttcggggtagttattttgtcctctgttgaaatgctcatttctgtcatttgctgagttacaggcaaggcagccgcaggcacatttcttgatttttcagatgtgctgccagcagcaccttcacagttgtttaagctagtgtctgctctctgtacagatgcagaatctgaggtaggactgttggaaccactagctgtccccattgggctcattctgccactattctgctgcctctgaagatgttctttgtagcaaactgaacacattccatttgtcctaggatttccataaaagccacatcctgtgctacacagcatgggccccggggtctggttagtctcctgagccatatttttttgcttgggaatgaacacttgagttcaagtctctagtctgccactaagtcagtgaccttgggcaagtccttactttccagatttcagttccctctttgccaaatggagtagaattgacttttaaaggctccttttcagggccctgcagggtcccaaatgcgaaagccgggttcgcgcgcgaagccggcacgatgaggccgggccgaggcctccgggaaggctgagccgggcgccctggtgccgccgccgcgggccgggagcgggtcggagcagcaggcggaggtggcgccgccgccgccgcggggtcttcctttgttcctgcagcagcgtcgagcgtggccgggacacgccggagctcgggaagtgggaggagggaagcgagggggggccgaggaggaggtggagggagcaccggcggccgc

SEQ ID NO: 35962 - DNA, 426 bp, Homo sapiens
ttgagatggagtctcactctgtcgcccaggctggagtgcagtggcgcctcctggcttcatgccattctcctgcctcagcctccccagtagctgggactacaggcgcccgccaccacgcccggctaattttttgtatttttagtagagatggggtttcatcatgttcgccaggctggtcttgatctcctgaccttgtgatccgcccgcctcggccttctaactcttctcagagttatgagatacttaccactaaggaggatacttacccttctgagtaactgatgtgaatttaatcacaacttctaatgggcgtaagacatatagagcattgcatgcattcaggacaattctttctgccaattaaggatactattatattatcccatgtatgatgtggggttgctttctcagcacacttggggttgc

SEQ ID NO: 35963 - DNA, 397 bp, Homo sapiens
cctcaccgtcatgacctcctctaaccctaatcacctcccaaaggccccgcctcctaatactatcccacggaggggttagggcatcaacataagaatttggagggggccacagttcagtccacagcaggatgtgtgtgtgtggagtgaagcagactgaccgggcctcaacatcacctgggaatcctggaaggaaacaggttcctgggccttgctccaacctaaggaacccgaatctgcatagctcacatggcgccgtatttccaacgttcagagcacattggaaagttgggaggaaggatgaggcttgtgttttcactcacaaactccctccagaagatgataatgaaagtgtctgacgcataaggaaataaataagatggttatgtgcccagctcaa

SEQ ID NO: 35964 - DNA, 797 bp, Homo sapiens
cctcaccgtcatgacctcctctaaccctaatcacctcccaaaggccccgcctcctaatactatcccacggaggggttagggcatcaacataagaatttggagggggccacagttcagtccacagcaggatgtgtgtgtgtggagtgaagcagactgaccgggcctcaacatcacctgggaatcctggaaggaaacaggttcctgggccttgctccaacctaaggaacccgaatctgcataggtgaggcctcagaatcagccttcccagcagcgcggtggggagtacaggggagccgcgggagggttttgggaggggggaagcagctacatggtagaccctgcacgcgccctcgctcctctgctggaggaagtgatgagggcaggcctggggctggcaatgggatcctcagcagttgctgctcagatcagttgcctccttggaccatgttcccatgagcaagacaggagccaccaggaaatgcaggtttccatttggacaagctcctttaggctggacagtcgagggatggtagaagtgtgcccccaccccatttctgccccactttgctctaatggtgtgagttggaaggaccatctccctcacttttcccttcatcctgagtgaaacctggtttccacagctcacatggcgccgtatttccaacgttcagagcacattggaaagttgggaggaaggatgaggcttgtgttttcactcacaaactccctccagaagatgataatgaaagtgtctgacgcataaggaaataaataagatggttatgtgcccagctcaa

SEQ ID NO: 35965 - DNA, 628 bp, Homo sapiens
aggtcagttaccttcctctctaaactggctgttgtggctatcagctcctgtattgtttgatcatgattcttagcttctttgcattgggttacaacatgctcctttagctcaccaaagtttgttgttatccaccttctgaagccgacttctgtcaattcagccatctccacctcagcctggttctgtgcccttgctggaggggtgttgcagtcatttagagaagaggaactctgactttttgagttttcagtgcttttgtattgattctttctcatctttgggggctatctatcttcagtctttgaggttgctgacctctgaatgaggtttttgtggggtctttttttttcatgttgttgttgttgttttctggttttcttttttttttctttgaaatttaaagaaaaaatttattgaagatctgaaaaacaattcctaaaagattgacttttccagaaaactagctacacagtgcattgcatctatcatgttaaaacgtgcattagacacaaatacaaaaaccatgaaacaagccaccattcttcaacaatttgagccaagataaaatgcctaagtaacaacatggatgccttgcaaaggatgggctctttactttaagcaccataaa

SEQ ID NO: 35966 - DNA, 380 bp, Homo sapiens
tcattgaaaaggggctcagaaggctaaattagatgtaattgttaatgggttaaaaaaaatctaagtctaaactaatagcttcagcaacggcttccccatcatctctcctgctgcttgccacactgttctccatacaacagcctgaaagagtttttaaaagtaaaatcaaatcctatgtctcacctatttaaaacctttctataccttcccattccactctaaactgatctctaggctctctcggggcactgcatgatctgcttatccttccaacggcatttcctcatcactctccctttttacttcattaatggccacagccagattggcctcccttctattccataaacaatcaaaactttcttgcctctggatcttca

SEQ ID NO: 35967 - DNA, 386 bp, Homo sapiens
ccccatctcaaacaacaacaacaaaacaaaaaaaaaaatagaagaagaaggttagagaaaaaaaatctaagtctaaactaatagcttcagcaacggcttccccatcatctctcctgctgcttgccacactgttctccatacaacagcctgaaagagtttttaaaagtaaaatcaaatcctatgtctcacctatttaaaacctttctataccttcccattccactctaaactgatctctaggctctctcggggcactgcatgatctgcttatccttccaacggcatttcctcatcactctccctttttacttcattaatggccacagccagattggcctcccttctattccataaacaatcaaaactttcttgcctctggatcttca

SEQ ID NO: 35968 - DNA, 385 bp, Homo sapiens
caaaagcctcctcctccaagcagccttccctgcctccctcaggcagaacagctccttctgggcacccacctgcatgaaagcacctcttccccacccacacctccctcctgcctgaggcgggcacagggcatgtgctcgatgaagcctgtagcctgggggctccaggtccaggcctctgaaaaacccacctcccttgtccagccaagccctcaggtggcttatcacagggccactttctctttgttgctcttcctgagtccttcttggttctgggctggagggggcttggaccgaactccctcctgcaggtgaccaagcccctggcctctgcccatctctgagtctaggttctccgctgcttccctagggaggagcatctcagaat

SEQ ID NO: 35969 - DNA, 345 bp, Homo sapiens
actggaaagagaaaggatacaattctgcatgagcatttattatagatcctaggctgaggggtgtgttgtttttgcataggctgagtcacacggaggactggcagaaatgttaataaagagctgagaactgaatagaaatagcagagtttatgtaggcctccagacatagaaattctggtccagtcaaggttaagagaccttattgaatatcttaggcatttcactgaaactcatgaaagaccaagcaggtaagaatcgcatactacttggtcgggcacggtggctcacgcctgtaatcccagcactttgagaggccgaggcgggcggatcacgaggtcaggaaat

SEQ ID NO: 35970 - DNA, 214 bp, Homo sapiens
tttttttgaaatatttaaagaggtttattctgagccaaatatgagtgaccaaggcctgtgacaaagcccaaggagttcctgagaaactgtgcccaaggcggttggtttacagcttggttttatacatttgaggaggacagaagttacaggcagacatcaatccagaaaggcgggacaacttgaagtggatggggaaggcacagggtctggaggg

SEQ ID NO: 35971 - DNA, 381 bp, Homo sapiens
ctggaattacagttgtgagccaccacacctggcctgtctccaaattaacaaaaaaattattaacataatttatttgagtcatacaatacatagagtatttcaagtgaattaaaatactataacaatgtaagagaatgtttataaaaatggaagaaagaaatagaaaaaccacccatactactaccatcgcaatgtaaatttctttttcatattccttcacagtaatttttccaattatgtaatttgtataacactctggacataacgtatccataagtggttatgttgttgtttttgagactcattttttttcttgttgcaatatattcttgtcatttagaattactaatgacctcaaaatattcctttgaacaaaggcac

SEQ ID NO: 35972 - DNA, 277 bp, Homo sapiens
cctatatttcagggacatttaaatgaataacaccaacaacttgatagaaacttctttcacttgagaggaaacacaagaaaaatataaatcagcagaatactgatatgcatgttaaaattttggagtcaaaaagaaaaataattgtaggctgggtttatatttttgaaatatttaggttcaagatttaccatgtcagcaggtgtggtgccaatctaaactaccttttgaagtgagcttaaataccaactaattaattgcaaaactaatattcttgaga

SEQ ID NO: 35973 - DNA, 699 bp, Homo sapiens
ttctagataggtggtagactccaggtcttaattgcatgcctgttgttatttctggatctcatatacctaatgtcttggccgactttccatgcaatgaaaactcatttccttgtggcattgaattgatggatgaattaatgaatgaaaagaaaatttaaaaaatctcttgtagcaagcaattctggcactatagccaagtataattttcactgcaagaataattgcaccatttattttcaccttggtctttactctatttacattgctataaaaatgtttcatattttcttaggttagccctcaccatcatctttgtgaaaaaggaattaaaaataattttaacacctatgtatacttggctccttatcatacacaatgagaagttagtttggataggaaaatgacttaaacacagctgggtgcggtcagtggctcacacttgtaatcccaggactttgggaggccgaggtgggtggatcacctgaggtcaagagttcaaaaccagcctgaccaacatggtgaaaccccatctctactaagaatacaaaaattagctgggcatcgtggcatccacctgtaatcccagctactagggagactggggcaggagaatcgcttgaacccaggaggtggaggtgcagtgagtcgagatctcgccattgtactccagcctgggcaacaagagtgaaactctgtttc

SEQ ID NO: 35974 - DNA, 352 bp, Homo sapiens
tgcttcagcctcccaaagtgctgggattacaggtgtgagccactgcgcccagcccatggccaattttctattctgttctgaacattagcttttagtttcagggtatgtatgtgtaaatacacaaatactttcaaaccgtatacatacagtttttaaatgacctaggtcaagatttaatagcagagatttaaatttatagtaatatgcctccatcatctcttggcaaaattctcttctgttgttttatagcagtttcctgttaacacgtgttatttactagcttgtgaggacagagatgggttttattcatctttgcatcctctgtggtaagtatagtacgaagcacagagta

SEQ ID NO: 35975 - DNA, 514 bp, Homo sapiens
acgtgaaaagctgagagacaccatgttcttcatagtagggtactgagcctcctgaaatttagttgatattggaaatgctgacagacccttaactagagtgctgtgcaaagtagtgctataattcagtttaaagtggacttacatttgaaaaacatccttctgaatgtcacacattaataataagttctgaggaggcatttggtgcagctagtaatcataattcttattaaaactggtgacgtctggcccccagggtgtagccaagctcaaattgatgctttttgccgcctgatcaccagcatggcctaagtgctcattatattgtagagagggcctttggagctctcattagatttgacaggaattctctctagggggaaactgggcattagcgagactcctgacaggctgaaattattcctgctttatggcttataaccaaatgctagcaaggcatcatcaggggacacaaaaaattgtcatttttgacaacatctttgttactaaaaaaaaa

SEQ ID NO: 35976 - DNA, 264 bp, Homo sapiens
ttttctttttgttttttgggactgagtctcactctgtggctcaggctggagtacaatggcgcgatctaggctgactgcaacctctgggaaacttctaaaaatcccatcgctcaggtcatatcccagaccaataaatcagaatctttcagagcagaagccagacacttcttaggtgattctaatgttcaagcaaatttgagttgtcaatgaatagtttctctcaagtcaggcagagattgtacgtaaggtagtaatacaaggcat

SEQ ID NO: 35977 - DNA, 427 bp, Homo sapiens
tgagaacaactgccacaggggaaattattcactgccagaactgcagcaagatgaaggatttggggaattaatacccctctctccttccaccactgatcagttgctgcttcccatgggccagccccaaacagaagccagaaagcaggtgaccctaagtaatgctatctgcagaggtcagccttccagggagcagagcagggccgtgaagagtggagaatggataggctggggcaaacagaataaccagaaccatcatggacagaagaatggatagatcaatggaaagaggggtggatggatgaattaatgaacagatacctgaataaaaggatagaaggccaggcacggtggctcacgcctgtaatcccaacactttgggaagcggaggcaagcagatcatttgaagtcaggagttcgaaaccaggag

SEQ ID NO: 35978 - DNA, 533 bp, Homo sapiens
ctcagggcctacccactggggcatggcagcaacatggcttcctccctcccctctctgctagaaagagcctccagtagggatctggcccctctttcgggtatagctcagctccagagtagaggatattagaaagatactgcatcccttattttacaggtgaggccaacagcaggcaagtgagctgcccaaaacacacagcaaggaactgacagaggaggggcttgtttctaagaaagaagggacaaaaaaagaaatagagttggagacgtctagaagagagagacctagagaagagtggggagtagggaagagagagtatggaaagggggtggctacggcttactgcacggacagggtggtgggccctcacaggcccagggacccagggagaaggctctaagctgcctcctgctgtgggggaatgtgaagtcttggagaagaggtgagaggcacaggaagaggtgtctgggggatggagaagccgtggcctgagaggaccccagtggcctggctggggcgtctgaccgctcccc

SEQ ID NO: 35979 - DNA, 412 bp, Homo sapiens
acaccatggaatactatgcagccataataaagaacaaaatgatgtctcttgcagcagcatggatgcagctggagaccattatcctaagcaaaccaacacagaatcagaaaaccacatgttcttgcttttaagtgagagctaaaccttgggtacacatggacataaagatgggaacagtagacagtggaggctatgataaaaagaagggaagtggggcaagggttgaaaaactaactgttgggtactaggcttaactacctgggtgttgggaccatttgtatcccaaaccttagtatcatacaacatacccgtgtaacaaacctgcatctttactctctgaatctaaaataaaagttgaaatttttaaaaaacccaaagtgaagtaaacaataaaaataaaaaagtggttcaa

SEQ ID NO: 35980 - DNA, 367 bp, Homo sapiens
gggtcatgttcagtgctatgtcctttttaaaaattaacttttaagctctccaaaaatctacaagataggtttcattatctccatttttgcataagggtaaaatgtaagcccagatgaaagtgacttgttcaaacttcccccactccccataatatgcttcagacctggaaagatttagaggagcagattattacctgtaacaaaaattactgccaaaaaaaaagaatataagggaacttatccttctccttttaagaagctacaattccaaaacgggatgaagactgtaaaagaaagaaaattatcagcacacttgatttttgcttataaatgcaaaaagtataaataaaatattaactgaatctaa

SEQ ID NO: 35981 - DNA, 714 bp, Homo sapiens
gattgagggatggtgatgcagattgtgggggattaacaccccccccccacaagatatccctggtgcggtcactatttttcagtaccaattatgtgccagggccatacaacatgctttaaatgtattatttcatttaattcttaaagaggcttgtaaaatagaatattatgttatgatacccatttacaacaaagaaaactaagtcacagaaagtttaagtaaattgcctaaggttatacctggcagggtgcagggccaaggtctgaactctgatgtaaagttaaaaacatggaatggactgtctgcatttgaatcctggctcagctaggaaccttccttgggcaaatttcttaatctgtcagtgcctgtcttttcatatttagagtgggggaaaataatagcacccacctcacaggaatgttgcaagtattaaatgagttaagatgtgtagtacatggcacacataaacctctcaattattattgtaatagttattgtttatttttatgattaccgtcttcttctactgtaggcattctggaagtgaagatcattgttcccaaactctggcttattcactgtaacaaatggacccctagatccgcagatgtcagagccagcagctcacccagtgctccaggagagcacagaatcattaaggaataagaaccagcctgacctgattttacagctgagaagatgaagtcaggggag

SEQ ID NO: 35982 - DNA, 281 bp, Homo sapiens
ccttctgcatcagcctcaaacattttaacatgtcagatcaggattcatcttttaatcaatcaatggtaccttaagataatttgcagccagttttccttcttaatggtatgtaaaacagcatcttctcatcgatactatcttaatttactgaaacagcacctagcagaactggtggtggtctgcagtttatacaatataaacctgatctggtaactaccccaactcctcaggtgtggtgtattagcccagtaaaagggaaaatcctctttctgagtcactaa

SEQ ID NO: 35983 - DNA, 927 bp, Homo sapiens
tacaatagaaaagagataggagcatgggtgatagaaaagacaggaaaaagggacatgggattattgtttcctgggatatcgccataaactattaaagaaatgtttgctctgaaacaacctgatatgacttcaagagaaatgaacgactgggaagaaattaaaatttaatagacactccagacaaataagatcttagtctacaataccataactacaagcacaggctggcaaactcgagtctgaatgagagactaaattacaaatgatggatagctgctttcgcagaccaaacagataatggttggaaaaaagtatgcttgtgaataggaaactaatgaccatgcagtacagtatgaaagttagataagagaaaaatactataatgaagaaagctgcatggctgagggaaatgctgagcaaactatttgtacacctaaagaaaaggggaaaagcactaaaagcttccaaatataacagaatctacccttgtatgggagttactagatattaaagactgagataaactaagacaatataatcagtacgatatgagcttttaagaaacatcttctttcatgtcataatacaactaagtatgaaacaaataatcaaagtctaacacagtcttatcagaaaaacaggaaacaactccaaatcaaatacacatgaggaactaagcgaaatttagggaaaattctgtatgctttcatacagtcattgtaataaagacaatatgagacactgattcaacagaaaggcagcaaccagcctgaacttggttaacagttaatcacattatatggagagaactacaaacaggcccctgtaaaatctaactgtaggagatacacagccatagtcaattcaatgcaataaaaatatactcagtctctactatgagccagaagctgccagagaccagaaata

SEQ ID NO: 35984 - DNA, 393 bp, Homo sapiens
gatatttcccaaatttagctccttttcttgtagtagcaggctattgcttccagatttgttctgttctctttgttattggtagagtgagctatctgaattatatctcactgtgtttttttctcgtctgcctgcagtttttatctgagttgtatctgactgtgtcccttccttatgacaggacagagtctctgtgacttggtcttgctgcctctctaggtttatcgtttgctactccgtgctttgctgtagtaagatacttttatgatacatttttatacttcattgtactttgaagcaaactgtaatttctgaccagcatatccttgttcattttgcttggtttagcctttaaaatttaatgtaattatcttcatctggaagaattctctgttt

SEQ ID NO: 35985 - DNA, 552 bp, Homo sapiens
gagaattggatgcatgtcttccccctttagttgtataagcataaactggttttatgacggcaagcataaaattaagatcagcagtgcacaaatctctgtgtaaccttcaagaccttttatttccccaaattagaagtgaccttaagaactgatggtgtcttcaccctgggcagctatggtggtggagcagaaaatagtagactgggattgggacaggctaagtcccacccttcaccctggctgggtgaccttgggcatactcacccttgcttttctgggactgagggtcttcatctgagaaatgaatcatttttcttgataatttacagttttctttcaaatccctccacacccccacccccaccaaggtttttatttttatggcaactcagatcttgaaccttaaaaaaaaaaataaagtagagaggacagcaatccttaccagtgtcactctatcaccctatacagctcctcaaacacaagcccagaaggggcttcattttggtggaagtcctgggcctacatttgtatatttaagtggaacccgaatac

SEQ ID NO: 35986 - DNA, 493 bp, Homo sapiens
  misc_feature (79)..(79): n is a, c, g, or t
caccaaccctatacgtatggtttaacaatggctactggcagcaatgcccctcatctctggggcaactgcagatcagggnagggattcaaggagggccatcagaagaaggaggcaacatcagtggatctttgggtctcaaggccccataccattgcaagagacccacccctctgcagtgccccactcccatcccacagacccggcctttcctcggtgagtcagtgcccactcaagcccaactcaaggctaaaagtgtgtgatgatccttcccaccttcctgttcatccactgtccctggaattcctcttctaaaatgaggataccaagtccagaacagtttttggttattaacctataaaacctcaatgcataaatctttgttataaaattggtgataatatgatcataaatgtcacctcaagtgatactttaacaaagggtcattcatttctttatgtagtcttgagaaaataaactgttgaataaaaaaaaa

SEQ ID NO: 35987 - DNA, 349 bp, Homo sapiens
  misc_feature (306)..(306): n is a, c, g, or t
  misc_feature (315)..(315): n is a, c, g, or t
aatcagaaagacaataaccttcatcatcaaagaggaagtacaggtccatggctgagataaacgtttggcagagctgctggtgaaagctgcccatcttctgggtttgtggaagaagataatgacttaaagtcctcagctgcccagtgagtaccctttccatggtcagataaagtaatctcaacagaacagttgttaaaaatccatacttgttgctccctaagagtaatacattcacccactttggatgaaaggattcaggccaaagtcaagaagagctaagaaactctacagtatcattctctctgnaccgattcnagagccaagtgagtgtttacttagaactgagtca

SEQ ID NO: 35988 - DNA, 513 bp, Homo sapiens
atctccaacaaggccacatcattgcatttagggactgctcagataatctgggatgatatccgtagttaattacatctgcaaggaccctttttccaaacaaggtcacacgaacaggtgtcagggatgtgatgtggatgtatcttttgggagcccaccattcaacccagtgtaaaccctaatgcagaaattggtgcagaaaaaaatggggagaatctgggattggctatctggccaggctgtggcaaaaagcaatgaagatactgcttgtcttagggaacgggacaaagggttgtcccctgggcgtccctgggaggaggagcccagtgaaagtctctggggtttcggggtggtgcccccaaaagaattcaatggctatgtctatggtgtgggatacgtttaaaatagctcttcaagaatgagaataaggccaggtgccgtggctcatgcctgtaatcccagcattttgggaagctacggtgagcatatggcttgagcccagaacttcaagaccag

SEQ ID NO: 35989 - DNA, 1642 bp, Homo sapiens
acaggctcccgggccacgagaaaccggccgagcagtccgggccaagctccccggaaccctcggccgtcgcaacccccgacgccagggctgaagcgccgggcactgccgcctccctcggtcgcccgcccgcacgcccggagcggggaagcacgccgcctccctacgcaccagcatggcacctcgcacaagtagcgccgccaaagtttccccacgagggggctgagggacaaaagcccctcccgaaactcgcccgaacttcgagggcctccgacctgcacggccctacgcccaggcggcggccccgagcgccgggggcccgcacgggcacatgcagccctttgttttctgtccagccgggcgctgcctacgtgcagcatcagggatgtcggagcgtttcgcaggggccggacactggacgatcaccctgggtaggggtccggaccccgcgccccgaagagtccggagcctggccccccgaccctcccctcgggagcaggcccatttaatcaaagttttgcagtgtccttgatgagaaacgcccggagtatccgccccgcacgggcggagagttggcgactttcactctgctttttaaactggcaagacgccatcatcagcaaaccacattgtcctgccggccggacctgcccgacggcggccgcatcccacggcccacgcggggctggacattcggacaaggaccagggtcgcagcccgaagcacgtggtctgtcacgtagagcacaaaaagcagtgccctgcggagttcactgactcccgcggcgtacacaacgccgccgcctccatctccagccaagttggcttccctggccatcttacagcgcggacggccgcccataaacgggaagccctcgcggtgtcgcccacacctacgctacaggtgaacgcaccgggagcaaaacttcgggctccgaaagcaccccggacaccagaggctcttgggcgcggtccgaagagggcaggcgagtggaagacgggctgtttttaagcgaccgcgtgttgctctcattgtcgcatccgcatccctccggagttgagcaaacaacgccacgccgcgtgcgctccggcagagcccagcactgacccccaaaggccgatttaaagaccctcggccgccagctcggaagcggatggcaacttagtttccgagcgaatggcgtttattgtccaccctagtccgagggctgcagtcaactaaaccacgaggtttcacaacggcgcccgaccctgcccgcgcctcgcgcccacgcggacgcaccgaccccggccgctgcgcggtggccaacgagtcgctttcctctcgggcctttcggccgccgggctcctttccgcgagagaacactgcggcggagaaaagtcattgtcaccttcaacgtggatccctcaactccggcgactcctcaattatgcccaggctccactcacttccccgccccgagactttcggtttgcctcaaataccctccccaattaataaatacacactaaacacgagcgtaccaaagaacctggggtctgaagatcacgaaaacagcgctcccaacaatgccacctccaagacaaaacttcctgtgtgtatgtggaaggacggggggaggtgggtggaggtgaaaagagaaaaa

SEQ ID NO: 35990 - DNA, 449 bp, Homo sapiens
atgggaatttgaatcccggtctggcttactgctgcatttatactcctctttctccaggagccagggttggggctgtagcctaaagaaaatggtgacatgagggcatctcagcaggtcccgacctgagaaaatacttccgtttactctatttaattttattttgaggctgggcatggtggctcacacctgtaatcccagcactttgggaggctgcagtgggtggatcacctgaggtcaggagttcaaaaccagcctgaccaacatggcgaaaccctgtctctactaaaaatgcaacaattggctaggggtggtggcacatgcctgtaatcccagctacttgggaggctgagggaggagaatcacttgaacccaggatgcagaggttgcagtgagccaagattgctccactgcactacagcctgggctacgagagcgaaactccctctcaa

SEQ ID NO: 35991 - DNA, 771 bp, Homo sapiens
gaaggggtgggaagacctcgcagcacagccgggcgcccgtcgggctctgggagagagcgagagagaaatccggttaaaatcagagtcggagggaggtttaaccacagatcggttccgatcggattattccttaaaggggacgcgccattgtcaagagaacggagccaggggcccgagggcggggaccggcggcgctggaggagcgaggcagctgtactaggactgggaacggttcccatcatatgatccccggtcctcctgtccccaaaaagtgggtatcccttcatccagctattggtaacaccttcaggtcaaaacgaggaacttccccacattgacagtgacctattgcacgtgaagcctcagaattgaacagagaaaggagcaggagccaaaaagacctcaacattaggaagcctctgaatgcttttatgttatccttgaacgaacttgagagcgaatgtccgtagctagaggtggtaccctctaaacaaagaaagttgccgttatacaaccaagattcttggcagaaaggggtggcatgcccttctccccgggaaggagcaggcgctacactattatgattttacgccggaacagaaacgacacggtaacattattgcaggttttaatcccaggactggtctgcacgagcacacttttggttacgacacacgaacgggcaagaacaggcaaacttccggactctgctcaggtaacgggccaagaatgaacgtgctaactctgaacctggggaaaagaggtcttcca

SEQ ID NO: 35992 - DNA, 730 bp, Homo sapiens
gaaggggtgggaagacctcgcagcacagccgggcgcccgtcgggctctgggagagagcgagagagaaatccggttaaaatcagagtcggagggaggtttaaccacagatcggttccgatcggattattccttaaaggggacgcgccattgtcaagagaacggagccaggggcccgagggcggggaccggcggcgctggaggagcgaggcagctgtactaggactgggaacggagctgaagccatttattggtatcttggatggttaacatctaaatgcttaattcctgaaaccactcaagagtcataggattagatgatccaagtcaccaagaaattactgtctcaagtgatacgatccttgaggaattgccatactgtcttccacaatggttgaactaatttacactcccaccaacagcgtaaaagcattcctgtttctccacatcctctccagcatctgttgtttcctgactttttaatgattgccattctaactggcgtgagatggtatctcattgtaaagtcacagatatttttttacttttgttcatgttccaaagcctttaccttctactttttcttttgtaggtaatcatcaaaatttttattattagccaatatggtgtataaataataattattgtaatactaagcaattgtatgttatgtaaaaatttctgttatataaatctatgcataaatatatgcatataatatttgtgtacatat

SEQ ID NO: 35993 - DNA, 477 bp, Homo sapiens
gaaggggtgggaagacctcgcagcacagccgggcgcccgtcgggctctgggagagagcgagagagaaatccggttaaaatcagagtcggagggaggtttaaccacagatcggttccgatcggattattccttaaaggggacgcgccattgtcaagagaacggagccaggggcccgagggcggggaccggcggcgctggaggagcgaggcagctgtactaggactgggaacggcctagaacattccatattctgcttcacacacggtgactcactcactactgctttgtaccagtgtgcccactcgagtgcctgtaaagtacaagctccagatcaaaaaagcttctagatggatcctttccaaacttggtgtcttttctacaaactctgtgcctcaacaaccatttctaagtgcttcagcgccagtcagcaaagtaaataaatactgtgcttcttccaactttcattccacttgggga

SEQ ID NO: 35994 - DNA, 189 bp, Homo sapiens
ggtagaggagattgggagaactggttgagggttagaggcagcttacaaattaaatagggtagttatggtagacctcttgagttgatttattaaagtagagttcttttgtttcttttacttttagcttcagcgccagtcagcaaagtaaataaatactgtgcttcttccaactttcattccacttgggga

SEQ ID NO: 35995 - DNA, 280 bp, Homo sapiens
ctcattggaccctggaacagaaagaagacactgacagaaaaactagaaaaattctaatgaagtctggaatttaattaataatattttaccaacgttggtttcgttgtgtctccgttttgaccataaactgtgttaatatacgatgttatgaataagaaaactgagtgaagcattgatggcaactctttgtactgtctgcttgacttttctgtaaatgtaattgccaaatcagaaagttttagatgtttaaaataaagtgaataagctaaaaacaaaggga

SEQ ID NO: 35996 - DNA, 478 bp, Homo sapiens
  misc_feature (31)..(31): n is a, c, g, or t
tgtgtgtgtgtgcacgtgcatgcgcgtcatnttgtggtcatccaggaagcagtgtggggtagcaggaagtgcgcagggttagaatcagacaggcctggctttgattcttgccaatgtttactgtctgtccttgggcaagtcactaaatctctcttagcctcagtttcttcttctgtcaagtggggtgataatagtagctacttattgcagaaattaaatgtagctgcgtctgatcccctggcacagtgcagtatgcagtgctgatagggaaagctaaaatttgcagagcgctcacagcctgcctggagcattttacatgcagtaattctccaagccttacaacacctcctcacaaaataggttattcttagccccattttacagttgagaaacctgaggctcagggattgcacagccagttggcggcaggcagggattcaaatgcacacatctgtttctaaagtctgggctcctaaca

SEQ ID NO: 35997 - DNA, 366 bp, Homo sapiens
cctgggaggagaaggttgcagtgagccaagatcgcgccactacactccagcctaggcgacagagcgagactccatctcaaaaaaaaaaaaaaaaaaaacaaaaaaagaaaggctacgaataaccatttttatggggctacttatgaggattaaataggttattgcaccacataccttgctgacagcctgccacataataagtgatcaataaatggcagcgttgttattatttagaggggcacagattaaacatgtgcattctaggaacagataacttgctttaaaagtgtttcattacttaccctctttgggatcttgggcaaacttaacctttgtaagccttggtgtccttatctgtgaaataaa

SEQ ID NO: 35998 - DNA, 163 bp, Homo sapiens
ttttttttagaggcggttcagtgttttgttatattgcagtgctgctctgtgctcaggaccataggtgtttaggactctcctgcatatactgttgtttatagactgcttctttgcacagtctttaccttgttaaaagtagttagatattttactgctccttgcg

SEQ ID NO: 35999 - DNA, 498 bp, Homo sapiens
tgaagaagatttaacaggtagtagtgcttttcttcctgagctttaataccagtgagagaagcaactagttcagagaaattttgtaagcagaatccaggaaaacttatgagtcaggattcagaacctttaaggaaagcaggtttgacctaagccaaggcactgactgaaaagaggctttaagaaagacctttcgtaagtggaaggaaggatacactggagatttagactggaaatggttttaacagtatatattaggacaagtaagacaatatatcagattcctatgtatgtattaattatacccaaagagtatttcagactagtccaaagtagctttttactttcaatagttgccagtattatattgtgcaggacaccacagggaaggggaacagaaaagacaaggaaggccctggggacactattagaaaagtaatctggatcctctgatggtagaagaaaataggcaaccaactctaaagtaatgtaaaacagtct

SEQ ID NO: 36000 - DNA, 689 bp, Homo sapiens
aatgcaggcagcctctagtaggaaaggccagtcccagctgacaaccagcaaggaagtgggaactcagtcctacagctgcaaggaactaaattcagccaatagcttgaatgaatgtggaagcaaattttccccagagtttccagcagggaacccacccactggataccctcatttagcccttgtgagacccagtcaagcccactgacttctgtaagataatccatttgtgttgttttgtttgtgataatttgttatgacacaatggaaaacaaatacaggggttttgctggttttattttagagtctttgggatatcattttctagagaacaaagatagcaaagattctataaaacaatttagtcctggaagactccacggaataatggtgttgagtggaacctgtgcctgtttcttgatgtttgaatattattattgtccttagatgcagtttgaaggggcttgatggtcagcttagtgagatgtagtttctgaaggtctaggacattggtaggatttctgtaaataggtggttcttccatatcttggataaatgacataattccgtggagtcttccaggactaaattgttttatagaatctttgctatctttgttctctagaaaatgatatcccaaagactctaaaataaaaccagcaaaacccctgtatttgttttccattgtgtca

SEQ ID NO: 36001 - DNA, 485 bp, Homo sapiens
acttctcactggatttagggcctatttaaatataccaggatggtctcatctcaagttccttaacttcatctgcaaagagcttttttccaaataaggtcacatttacaggatccaggggtttggatatggacctatcttctgtgggggccaacataacccactgcatggtgtagatgaagaaaggcttttgtcaatcggtgaatccaggtcatgggtactttcaacttagttatattattctgtctacttttgtatttgctagaattcttccatgtaaatttaaaaactatcttattttaggagctcctacaatgaccaggttttgtgccagacaatgaggactggaatcaaacaagaagaaggctttcccctcaggaactcagggtctagtggggaagctgatattgaatacatcatgtcaaaacagtgtagggaaagaagacatagtagagaaaataccatggtaggtgaaagtagtgcattcc

SEQ ID NO: 36002 - DNA, 751 bp, Homo sapiens
ttatgcttaatagttctaccattcacatttagttttataatttatctcagagtattttttgtatatgatatgaggtatgggttaagggttcattggtttttatatagacatctaatcaatcaagaactacttattgaaaaggcatttcacaccattagactttttgaatctatgttcattgagtaatattcgtctctaggtttttgttcttataatgtacttacgagattttgctatcaaagttatgctgggtgtaataaaaatgagttgggaagagtttcttcatttactagtctctggaagaagttttatgatattagtattatatttttctcaagtgtttagaaaaattcaccataaaaatccttttgggactaaacttttttgcagaatgtttttgattttggactgcattttttttatgtataggattatttatattttctgcttcttcttgctgttttggataaattatgttgtttaaacaatttgcaaattcatctgagtttgttaaatttattggcatatgattacttgtaatatcactttgttatatttttaatgtcttttgggactgcaataatgtcccctgataattataatggattctctctctgtgtctctttattgatcattcttagtttggttcattaaaaccaacttttggttttactgaatttctaaattttttaaaatttgattcttgcttttatgtttattatattctctgatttactttaaatttgttatt

SEQ ID NO: 36003 - DNA, 1512 bp, Homo sapiens
gtaagaggtggggaggaggaggcacagttaatggatctgtaaacttgcaccctctttcagagtggtacatggaagacagcacaaagtggatccatactctgaaatgcagtaactctgatgcttgaatttgtctcccttcttgccagaaaggattctaataactcggtgtcaaagccaagacataaactcaaccccttctcttccaaaagcttcacgttacagcatggaagctgttgccaagtttgatttcactgcttcaggtgaggatgaactgagctttcacactggagatgttttgaagattttaagtaaccaagaggagtggtttaaggcggagcttgggagccaggaaggatatgtgcccaagaatttcatagacatccagtttcccaaatggtttcacgaaggcctctctcgacaccaggcagagaacttactcatgggcaaggaggttggcttcttcatcatccgggccagccagagctccccaggggacttctccatctctgtcaggcatgaggatgacgttcaacacttcaaggtcatgcgagacaacaagggtaattactttctgtggactgagaagtttccatccctaaataagctggtagactactacaggacaaattccatctccagacagaagcagatcttccttagagacagaacccgagaagaccagggtcaccggggcaacagcctggaccggaggtcccagggaggcccacacctcagtggggctgtgggagaagaaatccgaccttcgatgaaccggaagctgtcggatcaccccccgacccttcccctgcagcagcaccagcaccagccacagcctccgcaatatgccccagcgccccagcagctgcagcagcccccacagcagcgatatctgcagcaccaccatttccaccaggaacgccgaggaggcagccttgacataaatgatgggcattgtggcaccggcttgggcagtgaaatgaatgcggccctcatgcatcggagacacacagacccagtgcagctccaggcggcagggcgagtgcggtgggcccgggcgctgtatgactttgaggccctggaggatgacgagctggggttccacagcggggaggtggtggaggtcctggatagctccaacccatcctggtggaccggccgcctgcacaacaagctgggcctcttccctgccaactacgtggcacccatgacccgataaactcttcaggggacagaagctttttgtctggagctgcccacaagaaagagggcaaggaaaaaaggctggactccatgactatatatacatacatctatctacatctgcctgtgtacacacacaactttttatactagtaatttattggcaattgggctggtaattagttgatgcaaaagggaactcaggtggagaataatattgacacttgcttttctgcccccctcaggggtgtgtggaaggcagtgggggagttgggaggggggcagggaaatgaaatggagttttgtcctggc

SEQ ID NO: 36004 - DNA, 888 bp, Homo sapiens
  misc_feature (51)..(51): n is a, c, g, or t
cgcgccacccgcgcagtggagagacaacgaaaccacgcagccccccgcggngcggccttagtattttaagtaaccaagaggagtggtttaaggcggagcttgggagccaggaaggatatgtgcccaagaatttcatagacatccagtttcccaatccagcctgggcgacagagcgagactctgactcaaaaagaaacctccacttactctcagaggtatctttactctccgagaccctttaaaattcttgacctttcttttacatcaggcaattggcatcactagtgccagtttatttttagatataaatgtatgtctgtttgaaaaataaactttacatccaaaagagaatgacttggcaatgaagtaaaactggatctaatggtaaaggctcagcccacccttcctagatggataaaatccattttctctagccctggttcgaatgtgtcccatcacttgtgagtccagactggcaacaaaaggtgctgatctaaaagaagttatcgtccagtggcagggtctggggaaggggcggcaggcgccatgtccagccacgaaggtggcaagaagaaggcactgaaacagcccaagaagcaggccaaggagatggacgaggaagagaaggctttcaagcagaaacaaaaagaggagcagaagaaactcgaggtgctaaaagcgaaggtcgtggggaagggctctggccacaggtggaattaagaaatctggcaaaaaaataagctgttccttgtgcctaaggagacggtgaccctttatttcatccgtatttaaacctctctattccctcctataatatcttttgccacctatagttggaattaagtgtcgtcttggagctgttgtacatttaagaataaacttttgtaa

SEQ ID NO: 36005 - DNA, 2004 bp, Homo sapiens
gtaagaggtggggaggaggaggcacagttaatggatctgtaaacttgcaccctctttcagagtggtacatggaagacagcacaaagtggatccatactctgaaatgcagtaactctgatgcttgaatttgtctcccttcttgccagaaaggattctaataactcggtgtcaaagccaagacataaactcaaccccttctcttccaaaagcttcacgttacagcatggaagctgttgccaagtttgatttcactgcttcaggtgaggatgaactgagctttcacactggagatgttttgaagattttaagtaaccaagaggagtggtttaaggcggagcttgggagccaggaaggatatgtgcccaagaatttcatagacatccagtttcccaaatggtttcacgaaggcctctctcgacaccaggcagagaacttactcatgggcaaggaggttggcttcttcatcatccgggccagccagagctccccaggggacttctccatctctgtcaggcatgaggatgacgttcaacacttcaaggtcatgcgagacaacaagggtaattactttctgtggactgagaagtttccatccctaaataagctggtagactactacaggacaaattccatctccagacagaagcagatcttccttagagacagaacccgagaagaccagggtcaccggggcaacagcctggaccggaggtcccagggaggcccacacctcagtggggctgtgggagaagaaatccgaccttcgatgaaccggaagctgtcggatcaccccccgacccttcccctgcagcagcaccagcaccagccacagcctccgcaatatgccccagcgccccagcagctgcagcagcccccacagcagcgatatctgcagcaccaccatttccaccaggaacgccgaggaggcagccttgacataaatgatgggcattgtggcaccggcttgggcagtgaaatgaatgcggccctcatgcatcggagacacacagacccagtgcagctccaggcggcagggcgagtgcggtgggcccgggcgctgtatgactttgaggccctggaggatgacgagctggggttccacagcggggaggtggtggaggtcctggatagctccaacccatcctggtggaccggccgcctgcacaacaagctgggcctcttccctgccaactacgtggcacccatgacccgataaactcttcaggggacagaagctttttgtctggagctgcccacaagaaagagggcaaggaaaaaaggctggactccatgactatatatacatacatctatctacatctgcctgtgtacacacacaactttttatactagtaatttattggcaattgggctggtaattagttgatgcaaaagggaactcaggtggagaataatattgacacttgcttttctgcccccctcaggggtgtgtggaaggcagtgggggagttgggaggggggcagggaaatgaaatggagttttgtcctggccttcagctgtcactgcttcctccttgtcttgggaattttcacggagaacagctaagcagagaccacacctcggcactggacacagaacaacagggtggggttgaacttggtggggcacgttctagctgacctgcaagccccgctcacctggagggcttgcagagcagctctcctcctgttctccaaggggtgggcactgttgcattaggaattaaggtgcagcccagtgctgcgggcagccaagcgagtctgagcggggatgtgaaggcaggacggggttggagagaccctgcctgtgcaaggctggcctcctagtcaacacctagctgagacattcatctctgttcaaattaatattccttgggtctttcaaatgaatgtttcaatgtgaggagcgaagtactgggaaatcgagggattttccacaatccccaagcagcttactcagtggaacctctgtttccccagctatgaaggaaatagcatcctaca

SEQ ID NO: 36006 - DNA, 1578 bp, Homo sapiens
  misc_feature (13)..(13): n is a, c, g, or t
gatgatgaaaggngaagggaaaggctgcggatggccttcatttcctgctcctggcatctggggattccgagaatgatcccaggacctagatcctatagattccggcagctcttcctgcaaacacaagcccttgttgtgtgcctgagccttgctctccggcctggagacatccatctgcccactctcctaggaactgctgattaccaggaagcaccatcggcttgctgccctccccctggcagagaggcacaatgaccacattatttctcttccagcttcacgttacagcatggaagctgttgccaagtttgatttcactgcttcaggtgaggatgaactgagctttcacactggagatgttttgaagattttaagtaaccaagaggagtggtttaaggcggagcttgggagccaggaaggatatgtgcccaagaatttcatagacatccagtttcccaaatggtttcacgaaggcctctctcgacaccaggcagagaacttactcatgggcaaggaggttggcttcttcatcatccgggccagccagagctccccaggggacttctccatctctgtcaggcatgaggatgacgttcaacacttcaaggtcatgcgagacaacaagggtaattactttctgtggactgagaagtttccatccctaaataagctggtagactactacaggacaaattccatctccagacagaagcagatcttccttagagacagaacccgagaagaccagggtcaccggggcaacagcctggaccggaggtcccagggaggcccacacctcagtggggctgtgggagaagaaatccgaccttcgatgaaccggaagctgtcggatcaccccccgacccttcccctgcagcagcaccagcaccagccacagcctccgcaatatgccccagcgccccagcagctgcagcagcccccacagcagcgatatctgcagcaccaccatttccaccaggaacgccgaggaggcagccttgacataaatgatgggcattgtggcaccggcttgggcagtgaaatgaatgcggccctcatgcatcggagacacacagacccagtgcagctccaggcggcagggcgagtgcggtgggcccgggcgctgtatgactttgaggccctggaggatgacgagctggggttccacagcggggaggtggtggaggtcctggatagctccaacccatcctggtggaccggccgcctgcacaacaagctgggcctcttccctgccaactacgtggcacccatgacccgataaactcttcaggggacagaagctttttgtctggagctgcccacaagaaagagggcaaggaaaaaaggctggactccatgactatatatacatacatctatctacatctgcctgtgtacacacacaactttttatactagtaatttattggcaattgggctggtaattagttgatgcaaaagggaactcaggtggagaataatattgacacttgcttttctgcccccctcaggggtgtgtggaaggcagtgggggagttgggaggggggcagggaaatgaaatggagttttgtcctggc

SEQ ID NO: 36007 - DNA, 781 bp, Homo sapiens
ggcctgtgcataggtatctgatttaaattgcagcagggtagccgggcatggtggctcacacctgtagttccagctacttgggaggccaaggcaggaggacttcttgaggccaagggttcaaaaccagcctgagcaacatagcaagaccccatctctacaaaaaaagtttttttaagctgcagaggggtcagccttcagggaatgttgctctcaaagacttggatgtggtgggaggagccagcagaccctcccctgcctgcccagcccacagctcagcagagcctcttctgtgcttcccccaacagcgagtgcggtgggcccgggcgctgtatgactttgaggccctggaggatgacgagctggggttccacagcggggaggtggtggaggtcctggatagctccaacccatcctggtggaccggccgcctgcacaacaagctgggcctcttccctgccaactacgtggcacccatgacccgataaactcttcaggggacagaagctttttgtctggagctgcccacaagaaagagggcaaggaaaaaaggctggactccatgactatatatacatacatctatctacatctgcctgtgtacacacacaactttttatactagtaatttattggcaattgggctggtaattagttgatgcaaaagggaactcaggtggagaataatattgacacttgcttttctgcccccctcaggggtgtgtggaaggcagtgggggagttgggaggggggcagggaaatgaaatggagttttgtcctggc

SEQ ID NO: 36008 - DNA, 164 bp, Homo sapiens
agaatggagtctccattatgttctacctgagagtcagtatgaaatgtcaaatataaaagtacataattcagaggtctatttcaaagtaataatcatttgagcataatttctccactgacagagacgactgttattttattttcaatcaaaagtttttatgcata

SEQ ID NO: 36009 - DNA, 223 bp, Homo sapiens
gcaatccaaagcagagtccaaagtagttaaaatgctaaaaagaaaacaatattaggcagcctgtgctaagtgtatcaagttgcccaggcacagttaactgtcctggttagacaacttcagttgcacaaggcctcagggtgaaactgcagctgtgaagaggtcataatggttgtgaaaaagacaggcagtggaaacgatctttgaggaaacaggttgtgtagtt

SEQ ID NO: 36010 - DNA, 358 bp, Homo sapiens
gaggacccagcccggtcccaattctgcattcccctcatccccaaggctggaaactccctatggccactcctgtgggctcagccatcttacactacaagctcctctgataagtcccatccctccgcccagcctgcccactcaccaggaacagccatacaactcatttccctgctgccccatggaaacttcatctctctgtgcctcagagggtctgccaagcccctgtggcccaccactccatcccctgccagtggatgctctggcatggccagcgtcctcacttaggcacctgtcccccagctggcacaccccaggatcagcccacacgagtgacctgcccccacatccaccaatcccc

SEQ ID NO: 36011 - DNA, 674 bp, Homo sapiens
tgagtagctgggactacaggcatgcgccatcacaccgaggtaatttttgtattttttggcagagacagggtttcaccatgttgaccaggctggtcttgaactcctgacctcaagccatctgcccaccttggcctcccaaagttctgggattattttttaagcagttttgataggtgtgtacctagtagtgctctgtggtttaatttgcatttcccagggagtgggggcactgcctgtcttctcacgcctcagttgcttgttgctgtgacggtcgcccactcctcctgccagtgtctgtgctgctcacggtagctgcatcagcttcacgctgtccgcccttcgccacccaccgcgcctgctgctcaggaatgttccaagcaacttggtggtaacagaagctgagaacagcccagatgtccttcggtgcaagagtggatggatcagttgtggtctattcacagaatagaatgtgaccacactggagatgaatgaattgtagctacaatctgcagtgtagacgaatcttaggaacgtaggcgtttcagaagcagatcaagccaggcacgatgctgtgtgcctatagtcccagctactcagagcctgaaggtgggagatcacttcagcctgggagtttgaggccagcctgggcaacatagcaagaccctgtctcaaag

SEQ ID NO: 36012 - DNA, 339 bp, Homo sapiens
tgagtagctgggactacaggcatgcgccatcacaccgaggtaatttttgtattttttggcagagacagggtttcaccatgttgaccaggctggtcttgaactcctgacctcaagccatctgcccaccttggcctcccaaagttctgggattattttttaagcagttttgataggtgtgtacctagtagtgctctgtggtaagaagtgggctagggcatttttaatcttagagcggaagcctataatcactgcgcccgctcataaggggatggccatggctaggtttatagatagttgggtggttgtgtaaatgagttgaggcaggacccgagaactgtg

SEQ ID NO: 36013 - DNA, 1407 bp, Homo sapiens
cgcccggcggccgcaccacgtgggccaggcgccccacgcctggagctcccctctctggagccccgggaaaggaagcggggcagggaggccgggtgggagcaggggggtctccggcgcttcctctcctctgcgggcgccgcgcggctcctgagagtccgccccccgtcctgacgctcagctaggaagcgggtcctcgggcccctcccccgacacacacacacacacacacacacacacacacacacacacactctctctctctctctctctctctctctctctctctctcatcacacacacacacacacagcccgtctcgcgcctgaggtctcgcccgcaggccggtggcgcggggtcagctgctgcctgcggtccaggacagggtcggttccgccgcgcagcgcccaggcccagctcgtccagagtctgcggacagcgcacgtccaggtaacgcgcttcaaggggccgcggctcggagctgggggaccccgggccgccctgcccatacgagtgcgagcgtggagagcgcgggcgggggcgcggtcccgggggccggccagctggagggggcgggagcgctgggcggggcctgcgctgaccccggcgctgagtccctggggccgccgggcggatggcgtggccggacgcgggggccccgggccttccgggcgtgacctagggctcgggggcggggaggcccctccggcggggcggccctgggtggtccggcagaggcggaggccgctccgagcctgtgagccctgggcgcctgcggaggcggggagagggcggggtgtgccgccctggtggggaccgcggggtcggagaggggacattgccccccccgaggcgaacgtccaaccgcgggtccgggtccccgcccaaggccgccccgcgaggtggcctcggcccggccgtccccgagggtggctcggatcctttcaaccagcgcgctggaggcgaaggggctgcgccattccgggtcaggcagccaacgcgggacacgcgcgtctccgagcttgcggcccgcgaaacccgggtgacctaccgcgccggtgccctcaaagcccccacgcccgggccggtggccgctgcagccactgagccacgcggtctccccggcccggtcggcagaaggagctggtccgttactagaaaagtccagatgcaaagtcgggggtcgtgctgccgcttcctgccagcgcaccgcacccacctggggccgccaccgaccgcacaggacgcgcctcctaccccctgttctggcccggccgagagctggtgcccccagcggccgcccgcccccgtccgcagaccccggggcccttgctgctttgcattgggaacaaccggagccaggcccggagctgagggggccagggcctttggaggaagcattggcctcca

SEQ ID NO: 36014 - DNA, 2024 bp, Homo sapiens
cgcccggcggccgcaccacgtgggccaggcgccccacgcctggagctcccctctctggagccccgggaaaggaagcggggcagggaggccgggtgggagcaggggggtctccggcgcttcctctcctctgcgggcgccgcgcggctcctgagagtccgccccccgtcctgacgctcagctaggaagcgggtcctcgggcccctcccccgacacacacacacacacacacacacacacacacacacacacactctctctctctctctctctctctctctctctctctctcatcacacacacacacacacagcccgtctcgcgcctgaggtctcgcccgcaggccggtggcgcggggtcagctgctgcctgcggtccaggacagggtcggttccgccgcgcagcgcccaggcccagctcgtccagagtctgcggacagcgcacgtccagacatcgcccactcgggctcacagtgccatccgggtgaggacctccgtggagagctctctttgccaaagaaaagcagttgcattaggtctgcgagcaggcagggtggcctcttcctggctccccatccaccaaggaagcttcaagtccctgggacacaggcactttcccacacaggatggagccgggccaccctcacagctcctgccctgcagacgctggccttgtggagggaggcaggcagcaggagcagtgctttctgggcctctgtagccagagctggccctgctgcagcttacgtctgcctgcagcccagacgtcctcctggtcctcctgatgcccccgacctccacggaggacgagcatttccagcccagccctccccatcttcacctcgcactcccctgacacactgggagcctcctgatccgtgaacccgcgctggcgggagtagctactgaccgctggggacccctgcccaggctgttcgcatgtggaaaggattcagggagcaggcgatgcccaaagcgtggagaccagcactgctctctccccagtgacaggtgcacgcccagatcacggatgtgtcgggaacagctgtgctcctgctgctcagcgtccgtcactccaggctgggagcgggtccccaagcttctggctgggcctatccgtctccactctcagtgtgggggtggggggcgccaacagcacgcatttgctctctgcacttctcgtctgataatgggcagagggtccttctgcagccccaaaacatccctaggcaggagccctggggccccaagcagccagggaggtgagcaccaaggacctcccagagagcgtcaccttccgtcgagggaggcccagcctgggggcggtgtctgagacttggaatcaacgcttccgttggtggcagtaaatcctgtccctaaccctgcagtacagctgtgccgtgtacaggagggtgctgtctgacgccagacacctggactacagatcgcagcctgattcctggtcattgctccactgaaccccagaccccagcctcgttctgggccctcatcccctagatccagggaccccagccccatttcagcccttgggcccttgtaggatgcgaggccctgggccccagcccccagcccatccgtggcccaggcactggggggctgaggtcctctgagaagggacacagggcctggggggctctctcagcccatcagcaggagaggactgactccagaaaaatcagcgtttgtacccactcaggctgccaagacctgtgtccgtccttccaagctcaaccttcagagttcatgaggccccttgcccagaatgtccacagagttcatgaggccccttgcccggaatgtccacatttgaaacctcccaacaccgagccccatttcaagtataaccaggagggaaaatggtgcttgaaataagcatgccacaaaggaaaacctgctttctcgaaatgggccctggccgcccaggccctgacctccccggccaggatggaacgttccagagacccattagtgccaaaggcaaatgaaaacacaccctgtgaaaatgtc

SEQ ID NO: 36015 - DNA, 2053 bp, Homo sapiens
cgcccggcggccgcaccacgtgggccaggcgccccacgcctggagctcccctctctggagccccgggaaaggaagcggggcagggaggccgggtgggagcaggggggtctccggcgcttcctctcctctgcgggcgccgcgcggctcctgagagtccgccccccgtcctgacgctcagctaggaagcgggtcctcgggcccctcccccgacacacacacacacacacacacacacacacacacacacacactctctctctctctctctctctctctctctctctctctcatcacacacacacacacacagcccgtctcgcgcctgaggtctcgcccgcaggccggtggcgcggggtcagctgctgcctgcggtccaggacagggtcggttccgccgcgcagcgcccaggcccagctcgtccagagtctgcggacagcgcacgtccagacatcgcccactcgggctcacagtgccatccgggtgaggacctccgtggagagctctctttgccaaagaaaagcagttgcattaggtctgcgagcaggcagggtggcctcttcctggctccccatccaccaaggaagcttcaagtccctgggacacaggcactttcccacacaggatggagccgggccaccctcacagctcctgccctgcagacgctggccttgtggagggaggcaggcagcaggagcagtgctttctgggcctctgtagccagagctggccctgctgcagcttacgtctgcctgcagcccagacgtcctcctggtcctcctgatgcccccgacctccacggaggacgagcatttccagcccagccctccccatcttcacctcgcactcccctgacacactgggagcctcctgatccgtgaacccgcgctggcgggagtagctactgaccgctggggacccctgcccaggctgttcgcatgtggaaaggattcagggagcaggcgatgcccaaagcgtggagaccagcactgctctctccccagtgacaggtgcacgcccagatcacggatgtgtcgggaacagctgtgctcctgctgctcagcgtccgtcactccaggctgggagcgggtccccaagcttctggctgggcctatccgtctccactctcagtgtgggggtggggggcgccaacagcacgcatttgctctctgcacttctcgtctgataatgggcagagggtccttctgcagccccaaaacatccctaggcaggagccctggggccccaagcagccagggaggtgagcaccaaggacctcccagagagcgtcaccttccgtcgagggaggcccagcctgggggcggtgtctgagacttggaatcaacgcttccgttggtggcagtaaatcctgtccctaaccctgcagtacagctgtgccgtgtacaggagggtgctgtctgacgccagacacctggactacagatcgcagcctgattcctggtcattgctccactgaaccccagaccccagcctcgttctgggccctcatcccctagatccagggaccccagccccatttcagcccttgggcccttgtaggatgcgaggccctgggccccagcccccagcccatccgtggcccaggcactggggggctgaggtcctctgagaagggacacagggcctggggggctctctcagcccatcagcaggagaggactgactccagaaaaatcagcgtttgtacccactcaggctgccaagacctgtgtccgtccttccaagctcaaccttcagagttcatgaggccccttgcccagaatgtccacagagttcatgaggccccttccttgaatgtccacagagttcatgaggctgcccggaatgtccacatttgaaacctcccaacaccgagccccatttcaagtataaccaggagggaaaatggtgcttgaaataagcatgccacaaaggaaaacctgctttctcgaaatgggccctggccgcccaggccctgacctccccggccaggatggaacgttccagagacccattagtgccaaaggcaaatgaaaacacaccctgtgaaaatgtc

SEQ ID NO: 36016 - DNA, 1999 bp, Homo sapiens
cgcccggcggccgcaccacgtgggccaggcgccccacgcctggagctcccctctctggagccccgggaaaggaagcggggcagggaggccgggtgggagcaggggggtctccggcgcttcctctcctctgcgggcgccgcgcggctcctgagagtccgccccccgtcctgacgctcagctaggaagcgggtcctcgggcccctcccccgacacacacacacacacacacacacacacacacacacacacactctctctctctctctctctctctctctctctctctctcatcacacacacacacacacagcccgtctcgcgcctgaggtctcgcccgcaggccggtggcgcggggtcagctgctgcctgcggtccaggacagggtcggttccgccgcgcagcgcccaggcccagctcgtccagagtctgcggacagcgcacgtccagacatcgcccactcgggctcacagtgccatccgggtgaggacctccgtggagagctctctttgccaaagaaaagcagttgcattaggtctgcgagcaggcagggtggcctcttcctggctccccatccaccaaggaagcttcaagtccctgggacacaggcactttcccacacaggatggagccgggccaccctcacagctcctgccctgcagacgctggccttgtggagggaggcaggcagcaggagcagtgctttctgggcctctgtagccagagctggccctgctgcagcttacgtctgcctgcagcccagacgtcctcctggtcctcctgatgcccccgacctccacggaggacgagcatttccagcccagccctccccatcttcacctcgcactcccctgacacactgggagcctcctgatccgtgaacccgcgctggcgggagtagctactgaccgctggggacccctgcccaggctgttcgcatgtggaaaggattcagggagcaggcgatgcccaaagcgtggagaccagcactgctctctccccagtgacaggtgcacgcccagatcacggatgtgtcgggaacagctgtgctcctgctgctcagcgtccgtcactccaggctgggagcgggtccccaagcttctggctgggcctatccgtctccactctcagtgtgggggtggggggcgccaacagcacgcatttgctctctgcacttctcgtctgataatgggcagagggtccttctgcagccccaaaacatccctaggcaggagccctggggccccaagcagccagggaggtgagcaccaaggacctcccagagagcgtcaccttccgtcgagggaggcccagcctgggggcggtgtctgagacttggaatcaacgcttccgttggtggcagtaaatcctgtccctaaccctgcagtacagctgtgccgtgtacaggagggtgctgtctgacgccagacacctggactacagatcgcagcctgattcctggtcattgctccactgaaccccagaccccagcctcgttctgggccctcatcccctagatccagggaccccagccccatttcagcccttgggcccttgtaggatgcgaggccctgggccccagcccccagcccatccgtggcccaggcactggggggctgaggtcctctgagaagggacacagggcctggggggctctctcagcccatcagcaggagaggactgactccagaaaaatcagcgtttgtacccactcaggctgccaagacctgtgtccgtccttccaagctcaaccttcagagttcatgaggccccttgcccagaatgcccggaatgtccacatttgaaacctcccaacaccgagccccatttcaagtataaccaggagggaaaatggtgcttgaaataagcatgccacaaaggaaaacctgctttctcgaaatgggccctggccgcccaggccctgacctccccggccaggatggaacgttccagagacccattagtgccaaaggcaaatgaaaacacaccctgtgaaaatgtc

SEQ ID NO: 36017 - DNA, 1866 bp, Homo sapiens
cgcccggcggccgcaccacgtgggccaggcgccccacgcctggagctcccctctctggagccccgggaaaggaagcggggcagggaggccgggtgggagcaggggggtctccggcgcttcctctcctctgcgggcgccgcgcggctcctgagagtccgccccccgtcctgacgctcagctaggaagcgggtcctcgggcccctcccccgacacacacacacacacacacacacacacacacacacacacactctctctctctctctctctctctctctctctctctctcatcacacacacacacacacagcccgtctcgcgcctgaggtctcgcccgcaggccggtggcgcggggtcagctgctgcctgcggtccaggacagggtcggttccgccgcgcagcgcccaggcccagctcgtccagagtctgcggacagcgcacgtccaggcactttcccacacaggatggagccgggccaccctcacagctcctgccctgcagacgctggccttgtggagggaggcaggcagcaggagcagtgctttctgggcctctgtagccagagctggccctgctgcagcttacgtctgcctgcagcccagacgtcctcctggtcctcctgatgcccccgacctccacggaggacgagcatttccagcccagccctccccatcttcacctcgcactcccctgacacactgggagcctcctgatccgtgaacccgcgctggcgggagtagctactgaccgctggggacccctgcccaggctgttcgcatgtggaaaggattcagggagcaggcgatgcccaaagcgtggagaccagcactgctctctccccagtgacaggtgcacgcccagatcacggatgtgtcgggaacagctgtgctcctgctgctcagcgtccgtcactccaggctgggagcgggtccccaagcttctggctgggcctatccgtctccactctcagtgtgggggtggggggcgccaacagcacgcatttgctctctgcacttctcgtctgataatgggcagagggtccttctgcagccccaaaacatccctaggcaggagccctggggccccaagcagccagggaggtgagcaccaaggacctcccagagagcgtcaccttccgtcgagggaggcccagcctgggggcggtgtctgagacttggaatcaacgcttccgttggtggcagtaaatcctgtccctaaccctgcagtacagctgtgccgtgtacaggagggtgctgtctgacgccagacacctggactacagatcgcagcctgattcctggtcattgctccactgaaccccagaccccagcctcgttctgggccctcatcccctagatccagggaccccagccccatttcagcccttgggcccttgtaggatgcgaggccctgggccccagcccccagcccatccgtggcccaggcactggggggctgaggtcctctgagaagggacacagggcctggggggctctctcagcccatcagcaggagaggactgactccagaaaaatcagcgtttgtacccactcaggctgccaagacctgtgtccgtccttccaagctcaaccttcagagttcatgaggccccttgcccagaatgtccacagagttcatgaggccccttgcccggaatgtccacatttgaaacctcccaacaccgagccccatttcaagtataaccaggagggaaaatggtgcttgaaataagcatgccacaaaggaaaacctgctttctcgaaatgggccctggccgcccaggccctgacctccccggccaggatggaacgttccagagacccattagtgccaaaggcaaatgaaaacacaccctgtgaaaatgtc

SEQ ID NO: 36018 - DNA, 1686 bp, Homo sapiens
ggggcctaggccagtcagctgaggacgtgttggtgcactcccgggagggcggtatgtgggtgaggatccccatgcagagtggtgcccacaaaccccccttccagagtcatctctggtccaccttgaagtccccaggaaaatgacctcgtcctccgcgggtgtgagccactaggcctgagaggacgccgggacggagctttcagagagggaggtgtcgggatggcttgagggtcaccaggtattaattaagcacttgctgtgtgccaggcactttcccacacaggatggagccgggccaccctcacagctcctgccctgcagacgctggccttgtggagggaggcaggcagcaggagcagtgctttctgggcctctgtagccagagctggccctgctgcagcttacgtctgcctgcagcccagacgtcctcctggtcctcctgatgcccccgacctccacggaggacgagcatttccagcccagccctccccatcttcacctcgcactcccctgacacactgggagcctcctgatccgtgaacccgcgctggcgggagtagctactgaccgctggggacccctgcccaggctgttcgcatgtggaaaggattcagggagcaggcgatgcccaaagcgtggagaccagcactgctctctccccagtgacaggtgcacgcccagatcacggatgtgtcgggaacagctgtgctcctgctgctcagcgtccgtcactccaggctgggagcgggtccccaagcttctggctgggcctatccgtctccactctcagtgtgggggtggggggcgccaacagcacgcatttgctctctgcacttctcgtctgataatgggcagagggtccttctgcagccccaaaacatccctaggcaggagccctggggccccaagcagccagggaggtgagcaccaaggacctcccagagagcgtcaccttccgtcgagggaggcccagcctgggggcggtgtctgagacttggaatcaacgcttccgttggtggcagtaaatcctgtccctaaccctgcagtacagctgtgccgtgtacaggagggtgctgtctgacgccagacacctggactacagatcgcagcctgattcctggtcattgctccactgaaccccagaccccagcctcgttctgggccctcatcccctagatccagggaccccagccccatttcagcccttgggcccttgtaggatgcgaggccctgggccccagcccccagcccatccgtggcccaggcactggggggctgaggtcctctgagaagggacacagggcctggggggctctctcagcccatcagcaggagaggactgactccagaaaaatcagcgtttgtacccactcaggctgccaagacctgtgtccgtccttccaagctcaaccttcagagttcatgaggccccttgcccagaatgtccacagagttcatgaggccccttgcccggaatgtccacatttgaaacctcccaacaccgagccccatttcaagtataaccaggagggaaaatggtgcttgaaataagcatgccacaaaggaaaacctgctttctcgaaatgggccctggccgcccaggccctgacctccccggccaggatggaacgttccagagacccattagtgccaaaggcaaatgaaaacacaccctgtgaaaatgtc

SEQ ID NO: 36019 - DNA, 1647 bp, Homo sapiens
cgcccggcggccgcaccacgtgggccaggcgccccacgcctggagctcccctctctggagccccgggaaaggaagcggggcagggaggccgggtgggagcaggggggtctccggcgcttcctctcctctgcgggcgccgcgcggctcctgagagtccgccccccgtcctgacgctcagctaggaagcgggtcctcgggcccctcccccgacacacacacacacacacacacacacacacacacacacacactctctctctctctctctctctctctctctctctctctcatcacacacacacacacacagcccgtctcgcgcctgaggtctcgcccgcaggccggtggcgcggggtcagctgctgcctgcggtccaggacagggtcggttccgccgcgcagcgcccaggcccagctcgtccagagtctgcggacagcgcacgtccagacatcgcccactcgggctcacagtgccatccgggtgaggacctccgtggagagctctctttgccaaagaaaagcagttgcattaggtctgcgagcaggcagggtggcctcttcctggctccccatccaccaaggaagcttcaagtccctgggacacaggcactttcccacacaggatggagccgggccaccctcacagctcctgccctgcagacgctggccttgtggagggaggcaggcagcaggagcagtgctttctgggcctctgtagccagagctggccctgctgcagcttacgtctgcctgcagcccagacgtcctcctggtcctcctgatgcccccgacctccacggaggacgagcatttccagcccagccctccccatcttcacctcgcactcccctgacacactgggagcctcctgatccgtgaacccgcgctggcgggagtagctactgaccgctggggacccctgcccaggctgttcgcatgtggaaaggattcagggagcaggcgatgcccaaagcgtggagaccagcactgctctctccccagtgacagtacagctgtgccgtgtacaggagggtgctgtctgacgccagacacctggactacagatcgcagcctgattcctggtcattgctccactgaaccccagaccccagcctcgttctgggccctcatcccctagatccagggaccccagccccatttcagcccttgggcccttgtaggatgcgaggccctgggccccagcccccagcccatccgtggcccaggcactggggggctgaggtcctctgagaagggacacagggcctggggggctctctcagcccatcagcaggagaggactgactccagaaaaatcagcgtttgtacccactcaggctgccaagacctgtgtccgtccttccaagctcaaccttcagagttcatgaggccccttgcccagaatgtccacagagttcatgaggccccttgcccggaatgtccacatttgaaacctcccaacaccgagccccatttcaagtataaccaggagggaaaatggtgcttgaaataagcatgccacaaaggaaaacctgctttctcgaaatgggccctggccgcccaggccctgacctccccggccaggatggaacgttccagagacccattagtgccaaaggcaaatgaaaacacaccctgtgaaaatgtc

SEQ ID NO: 36020 - DNA, 779 bp, Homo sapiens
ggggttcgcaggacccctctcaagacccccttcgggagtcagcttcttggccacgcacacttggagctctgggctgggttgcagctccctgtacttcactgtctcgggtgctggcagtgccagctggggcacgagttccggtttgggtcaaggctggcctgttggctggggtggcgtctgcctgagaactggccttgtctgtgccttaagcttcctggcgctcacagggcagtggaaaaccactcagtgagtctttcttggcaccttgcaggagcagtgctttctgggcctctgtagccagagctggccctgctgcagcttacgtctgcctgcagcccagacgtcctcctggtcctcctgatgcccccgacctccacggaggacgagcatttccagcccagccctccccatcttcacctcgcactcccctgacacactgggagcctcctgatccgtgaacccgcgctggcgggagtagctactgaccgctggggacccctgcccaggctgttcgcatgtggaaaggattcagggagcaggcgatgcccaaagcgtggagaccagcactgctctctccccagtgacaggtgcacgcccagatcacggatgtgtcgggaacagctgtgctcctgctgctcagcgtccgtcactccaggctgggagcgggtccccaagcttctggctgggcctatccgtctccactctcagtgtgggggtggggggcgccaacagcacgcatttgctctctgcacttctcgtctgataatgggcagagggtc

SEQ ID NO: 36021 - DNA, 372 bp, Homo sapiens
ttttttttgtaaattcagtaatctcaccagcaacaagctttgctttcaaataagcatatctgccaacttaaacagcatctcctaaggcagcggagtaatgaaagacacatgtaggtacttgcctgtcatcagatgcaagctcacgtctgcctgaaattgggcctgtaattctgctgatcctcgggttcaggacagcatggccgagagtggtctacaatgcggcccttagtctaaacagcagatgaaggatgcaaggggccaacctttttcatccctgctgggctcttgaccagttgttgctctttagttcaagggggagatgtgagggattgctcaaacacttggcagacagaaaggtcttaagacagcaag

SEQ ID NO: 36022 - DNA, 407 bp, Homo sapiens
tctcatttattgattcaacaaatattgattgagttcttactttatacaagacttacatcggagaatctgacttggagcttgcagtccaggagggaagataattaaacagtgacagtgaggaacaaagtgtgctggctcgtgcattgcaccatttcaggggcaccattcacacataatacaatgcaaatttcaccccttggagttgtgcaacttggtgaccaggcactgatgggagcaagcaaattgtggatcaggaaaggcctccctagaagaaaggacatttaagctgagacctgaactatgactgtcagttaattatgtaaagcaagggaggaacagtgtgctgggctgaaagaacagcatgtgaaaaatgtgggggagaaagcaaggggcaggggaagtgacag

SEQ ID NO: 36023 - DNA, 595 bp, Homo sapiens
  misc_feature (69)..(69): n is a, c, g, or t
aagtgaggctttctggggagagagggcttgtactcgagcttgagccaaaggagggtgggctccagcttnttagccctcaaaaacactcgttttcatggtgggagtggagggagggccagccagggcatccaggaggactccctctcccaggggctggaatttatgtgatgagaactccccactcatgacaaaggagggagctgggagcccctgagatgtcttatcagcttgtttgggtgtgggacaaaagggacaagggtataatagggcttgaaagctgtcagtgggcaaacatcaaaaatggagtcagagctgggcacagtggttcacacttgtgatcccagcacttttgggaggccaaggcggcagtatttgcttgagaccgtgagctttaagacctgcctggagaacataggaagaccctatctctacaaaaatttaataattacccaggcatgatggcacgtacttgtagtcgtagctacttgggaggctgaagtgggaggatcgtttaagcccaggagtttgaggctgtagtgagctatggttgccccactgccctccagcctgggtgacagagtaagacctcgtccct

SEQ ID NO: 36024 - DNA, 770 bp, Homo sapiens
tgagatgacatcttgctctgtcacccaggatacatgacattgcttcacaagatatcttcaaaccccttgtctcctaacttagcactaatttggtaatcattcagacgttatcattacaaaaactacaaagcctattctttctttcaggcagtctgccctgagggtataaacaatagtatttattacatattctttaggacccccatgttataccctattaaaccttgataaatattcttctgtgtttctagaacaaacaaactgctttcctgctcattgttccttggctccgctaaaaaaaaaaaaaaaaaaaaaaagtcaagcatatttcaactagaaaaaggaaaccataggcagccagacacagagactatactgtttctcatttcatcagccttgggacttgaacagcaggtcactccatttgaaaactagcagacgtaataaatagaaagaggcatagaaagcaagctgaccacagattgggctgtagcacccagccatttctgtctgtcttggaaaggccaaagagaatgcactgtatactgccattgtatcaaatgttttgggcacctttttcagggcatttatgaaagaaaaaaagaaaagggagggattaaggactggataagccttttcctgcctgagtacctgtttcatgatgtttctttatagtcatcatgactggcaaaataatctttaaggttgcttggcagtgtccaaaaagtagacaaatagaccttgtacctgtggaagaaattttaaaaacc

SEQ ID NO: 36025 - DNA, 243 bp, Homo sapiens
tatgttccttttaggaaaattggaaaatacaagagaagtaaaaaagtaaataaaaatcatcaaggagtgattcctaaaaacatgttggggtacttctttccatcttttctcaatgaatatatctgtatgtgtgtgtgtatgtgtatgtattttttccaatgtatgtgtatacatgtgcacacacatgcgtgcaattacagtcttttagctaacatagggaaaggagtagatagaaaaggatta

SEQ ID NO: 36026 - DNA, 469 bp, Homo sapiens
gttctgtggtgttgactacattcacattgttgtacgaccatcactactgtccatcttgaactttttcatcttcccgactgaagctctgtacccagtgaataataactccccattccctgcccccagcccctggcactgccatttctccatctgtgtctctgaattcagctattatagatacctcatgtaagtccagtcctgtggcattcgtctttttgtgattggcttatttcactgagtgtaatgttaccaatgttcatccatgtgatgggcagaaattgtgtgggattttttttttttaatgggagtttcactctaggctggagtgcagtggcgtgatctctgcttactgcagcctctgcctccccagttcaagcttcaagagtctcctactcaggaggctgaggctaaagaatcacttgaacctgggaggcagaggttgcagtaagccaagatcacaccattgcac

SEQ ID NO: 36027 - DNA, 372 bp, Homo sapiens
accattgggggagcaggtttggggtaaacagacttgaattgggtgttctctgtgcattttgtttatttagttcatgttggcaaattactattttaagtaaagttgtttccctaagcattaaaaagttgttttttttttgtagcctgaatgggttccagggtgctctgccttgaccagctgtgctgtgtggtcctaagtcaattcccttcccttgcctggatctgagtttgcctcatcctccttgtgagccagccatgtgagagtcagtgagtcagtgcctgaactaggatggctgttggggcaggtggatagacacagtttctttgtgaaaaatgaccccttaactgtcacttgcttacactgatgattaga

SEQ ID NO: 36028 - DNA, 439 bp, Homo sapiens
gggaatcttcaaggctctcattgactctgagcataagcttggcccctcttttccttgtgataacacaatccttcctcttatttccacctactgttaattttaatctatagtaccagagagatacttgcatcatttagtcctttactggggtagagttgataattgtgctttctttaaaagaaatagcaatgctcagtgcccgtgtttcccccttcctcttcaatccgatattaacacgtattacagaaactaaatgagttccctgtttaaattacattgatattcagttactatgtggcatcccctcaatagaggtcagccagcttctccctcatcactgctcccgtctgctgtgtcacaaacttccctctagttaaaagaagtaggactcaaatccccacaccccttacacaccctcactgtggtagctttcttcttg

SEQ ID NO: 36029 - DNA, 413 bp, Homo sapiens
atctacttggtggtgagagtgacacatgggccatttgcaggtgtcacaccctgtggacgaatggtcatgctacacggtggtttgtgccaaggcctcatggacacagttcacattcttagtgtcctaggagctcctgccatgattccttagcagtggttatgcttgtttttatgatggcaaggctccccaaactttgtggacaatgcacagataacaactgctgatggaaatcaatggcctggcctgcttccttcataagagcaaaggtaaaggcagcctcttaacatctaatgctccctttgcctttttcagagttggagaatcacagcatttttctgaaatgtggagtgggaaatctaaatgtggagtggggaagctataattacatagcttggaaaaagaaaagtttaaga

SEQ ID NO: 36030 - DNA, 1579 bp, Homo sapiens
  misc_feature (1394)..(1395): n is a, c, g, or t
tgcgtacacgtcacttccgaggcgggaggatgaagttgattgactatggtctctccggctaccaggaagagtctgccgaaggtgaaggccatggacttcatcacctccacagccatcctgcccctgctgttcggctgcctgggcgtcttcggcctcttccggctgctgcagtgggtgcgcgggaaggcctacctgcggaatgctgtggtggtgatcacaggcgccacctcagggctgggcaaagaatgtgcaaaagtcttctatgctgcgggtgctaaactggtgctctgtggccggaatggtggggccctagaagagctcatcagagaactcaccgcttctcatgccaccaaggtgcagacacacaagccttacttggtgaccttcgacctcacagactctggggccatagttgcagcagcagctgagatcctgcagtgctttggctatgtcgacatacttgtcaacaatgctgggatcagctaccgtggtaccatcatggacaccacagtggatgtggacaagagggtcatggagacaaactactttggcccagttgctctaacgaaagcactcctgccctccatgatcaagaggaggcaaggccacattgtcgccatcagcagcatccagggcaagatgagcattccttttcgatcagcatatgcagcctccaagcacgcaacccaggctttctttgactgtctgcgtgccgagatggaacagtatgaaattgaggtgaccgtcatcagccccggctacatccacaccaacctctctgtaaatgccatcaccgcggatggatctaggtatggagttatggacaccaccacagcccagggccgaagccctgtggaggtggcccaggatgttcttgctgctgtggggaagaagaagaaagatgtgatcctggctgacttactgccttccttggctgtttatcttcgaactctggctcctgggctcttcttcagcctcatggcctccagggccagaaaagagcggaaatccaagaactcctagtactctgaccagccagggccagggcagagaagcagcactcttaggcttgcttactctacaagggacagttgcatttgttgagactttaatggagatttgtctcacaagtgggaaagactgaagaaacacatctcgtgcagatctgctggcagaggacaatcaaaaacgacaacaagcttcttcccagggtgaggggaaacacttaaggaataaatatggagctggggtttaacactaaaaactagaaataaacatctcaaacagtaagagttgtagtcttccaggactagaaccttgtgtcctttgaattctcgccctgccagctcctagaaatagtttcaatcttggaatcagatgttatgtcacctganncagttgtttctgtatttgacttaaacctcattgttgtggcagaaagaccacctccagtactgaggggagaaagttgtagtttcaagaagtcagcagtcacgcccatttccaggtccctatgatatctcatccaacttaaaacgtgggccagtatgtaatggcttatttggtgtatcccaaggga

SEQ ID NO: 36031 - DNA, 1050 bp, Homo sapiens
aagctaggtagaggccgggtgtgaatcggcagaggctctccggctacaggaagagtctgccgaaggtgaaggccatggacttcatcacctccacagccatcctgcccctgctgttcggctgcctgggcgtcttcggcctcttccggctgctgcagtgggtgcgcgggaaggcctacctgcggaatgctgtggtggtgatcacaggcgccacctcagggctgggcaaagaatgtgcaaaagtcttctatgctgcgggtgctaaactggtgctctgtggccggaatggtggggccctagaagagctcatcagagaactcaccgcttctcatgccaccaaggtgcagacacacaagccttacttggtgaccttcgacctcacagactctggggccatagttgcagcagcagctgagatcctgcagtgctttggctatgtcgacatacttgtcaacaatgctgggatcagctaccgtggtaccatcatggacaccacagtggatgtggacaagagggtcatggagacaaactactttggcccagttgctctaacgaaagcactcctgccctccatgatcaagaggaggcaaggccacattgtcgccatcagcagcatccagggcaagatgagcattccttttcgatcagcatatgcagcctccaagcacgcaacccaggctttctttgactgtctgcgtgccgagatggaacagtatgaaattgaggtgaccgtcatcagccccggctacatccacaccaacctctctgtaaatgccatcaccgcggatggatctaggtatggagttatggacacaacacagccaggcgaagcctgtggaggtggccgatgtctgctgtgggcggagagcaagaagatgtgtctggtgaattaggctcctggtggtatttcaacctggtcgggtctttacctcaggctcggcgaaaaaggaatcaaacctgtctgccacgcggcggggaaaggccctggggtctccaggcggtttggaggggggccggagaaaactggctggggcaaacccgggggggatgggc

SEQ ID NO: 36032 - DNA, 1723 bp, Homo sapiens
tgcgtacacgtcacttccgaggcgggaggatgaagttgattgactatggtctctccggctaccaggaagagtctgccgaaggtgaaggccatggacttcatcacctccacagccatcctgcccctgctgttcggctgcctgggcgtcttcggcctcttccggctgctgcagtgggtgcgcgggaaggcctacctgcggaatgctgtggtggtgatcacaggcgccacctcagggctgggcaaagaatgtgcaaaagtcttctatgctgcgggtgctaaactggtgctctgtggccggaatggtggggccctagaagagctcatcagagaactcaccgcttctcatgccaccaaggtgcagacacacaagccttacttggtgaccttcgacctcacagactctggggccatagttgcagcagcagctgagatcctgcagtgctttggctatgtcgacatacttgtcaacaatgctgggatcagctaccgtggtaccatcatggacaccacagtggatgtggacaagagggtcatggagacaaactactttggcccagttgctctaacgaaagcactcctgccctccatgatcaagaggaggcaaggccacattgtcgccatcagcagcatccagggcaagatgagcattccttttcgatcagcatatgcagcctccaagcacgcaacccaggctttctttgactgtctgcgtgccgagatggaacagtatgaaattgaggtgaccgtcatcagccccggctacatccacaccaacctctctgtaaatgccatcaccgcggatggatctaggtatggagttatggacaccaccacagcccagggccgaagccctgtggaggtggcccaggatgttcttgctgctgtggggaagaagaagaaagatgtgatcctggctgacttactgccttccttggctgtttatcttcgaactctggctcctgggctcttcttcagcctcatggcctccagggccagaaaagagcggaaatccaagaactcctagtactctgaccagccagggccagggcagagaagcagcactcttaggcttgcttactctacaagggacagttgcatttgttgagactttaatggagatttgtctcacaagtgggaaagactgaagaaacacatctcgtgcagatctgctggcagaggacaatcaaaaacgacaacaagcttcttcccagggtgaggggaaacacttaaggaataaatatggagctggggtttaacactaaaaactaggcacaataaagcatcgcccaaaaaaaaaaaaaaaaaaaaaaaaaaaaaaccgtgtgtgtggggcgcgcgccctgcgcggcccccggagagaagagtttttaagagagaccacacttggggtggggcgcggcggggagcccacgggggcaacacgagggaaacagtgggccaaagagggggttccaccaagggagaacaccggggtcacagcgaacaaagggccggggaacttctcccacacaaataaaaaggccccggggaggaaaacggaagcggtttgggagaaaaataatccaaagaggggaggcatcgcgggggggccacaagggggggagactttacacacagcgggggagtctaaaggggaaagccgcggaatttctccaaattaacgcccccagcgggggaaagcagaaagcagcggaagcaacaagacgagaaaaaaacacacgcgt

SEQ ID NO: 36033 - DNA, 1469 bp, Homo sapiens
  misc_feature (1284)..(1285): n is a, c, g, or t
tgcgtacacgtcacttccgaggcgggaggatgaagttgattgactatggtctctccggctaccaggaagagtctgccgaaggtgaaggccatggacttcatcacctccacagccatcctgcccctgctgttcggctgcctgggcgtcttcggcctcttccggctgctgcagtgggtgcgcgggaaggcctacctgcggaatgctgtggtggtgatcacaggcgccacctcagggctgggcaaaggtgcagacacacaagccttacttggtgaccttcgacctcacagactctggggccatagttgcagcagcagctgagatcctgcagtgctttggctatgtcgacatacttgtcaacaatgctgggatcagctaccgtggtaccatcatggacaccacagtggatgtggacaagagggtcatggagacaaactactttggcccagttgctctaacgaaagcactcctgccctccatgatcaagaggaggcaaggccacattgtcgccatcagcagcatccagggcaagatgagcattccttttcgatcagcatatgcagcctccaagcacgcaacccaggctttctttgactgtctgcgtgccgagatggaacagtatgaaattgaggtgaccgtcatcagccccggctacatccacaccaacctctctgtaaatgccatcaccgcggatggatctaggtatggagttatggacaccaccacagcccagggccgaagccctgtggaggtggcccaggatgttcttgctgctgtggggaagaagaagaaagatgtgatcctggctgacttactgccttccttggctgtttatcttcgaactctggctcctgggctcttcttcagcctcatggcctccagggccagaaaagagcggaaatccaagaactcctagtactctgaccagccagggccagggcagagaagcagcactcttaggcttgcttactctacaagggacagttgcatttgttgagactttaatggagatttgtctcacaagtgggaaagactgaagaaacacatctcgtgcagatctgctggcagaggacaatcaaaaacgacaacaagcttcttcccagggtgaggggaaacacttaaggaataaatatggagctggggtttaacactaaaaactagaaataaacatctcaaacagtaagagttgtagtcttccaggactagaaccttgtgtcctttgaattctcgccctgccagctcctagaaatagtttcaatcttggaatcagatgttatgtcacctganncagttgtttctgtatttgacttaaacctcattgttgtggcagaaagaccacctccagtactgaggggagaaagttgtagtttcaagaagtcagcagtcacgcccatttccaggtccctatgatatctcatccaacttaaaacgtgggccagtatgtaatggcttatttggtgtatcccaaggga

SEQ ID NO: 36034 - DNA, 1495 bp, Homo sapiens
  misc_feature (1310)..(1311): n is a, c, g, or t
tgcgtacacgtcacttccgaggcgggaggatgaagttgattgactatggtctctccggctaccaggaagagtctgccgaaggtgaaggccatggacttcatcacctccacagccatcctgcccctgctgttcggctgcctgggcgtcttcggcctcttccggctgctgcagtgggtgcgcgggaaggcctacctgcggaatgctgtggtggtgatcacaggcgccacctcagggctgggcaaagaatgtgcaaaagtcttctatgctgcgggtgctaaactggtgctctgtggccggaatggtggggccctagaagagctcatcagagaactcaccgcttctcatgccaccaaggtgcagacacacaagccttacttggtgaccttcgacctcacagactctggggccatagttgcagcagcagctgagatcctgcagtgctttggctatgtcgacatacttgtcaacaatgctgggatcagctaccgtggtaccatcatggacaccacagtggatgtggacaagagggtcatggagacaaactactttggcccagttgctctaacgaaagcactcctgccctccatgatcaagaggaggcaaggccacattgtcgccatcagcagcatccagggcaagatgagcattccttttcgatcagcatatgcagcctccaagcacgcaacccaggctttctttgactgtctgcgtgccgagatggaacagtatgaaattgaggtgaccgtcatcacccagggccgaagccctgtggaggtggcccaggatgttcttgctgctgtggggaagaagaagaaagatgtgatcctggctgacttactgccttccttggctgtttatcttcgaactctggctcctgggctcttcttcagcctcatggcctccagggccagaaaagagcggaaatccaagaactcctagtactctgaccagccagggccagggcagagaagcagcactcttaggcttgcttactctacaagggacagttgcatttgttgagactttaatggagatttgtctcacaagtgggaaagactgaagaaacacatctcgtgcagatctgctggcagaggacaatcaaaaacgacaacaagcttcttcccagggtgaggggaaacacttaaggaataaatatggagctggggtttaacactaaaaactagaaataaacatctcaaacagtaagagttgtagtcttccaggactagaaccttgtgtcctttgaattctcgccctgccagctcctagaaatagtttcaatcttggaatcagatgttatgtcacctganncagttgtttctgtatttgacttaaacctcattgttgtggcagaaagaccacctccagtactgaggggagaaagttgtagtttcaagaagtcagcagtcacgcccatttccaggtccctatgatatctcatccaacttaaaacgtgggccagtatgtaatggcttatttggtgtatcccaaggga

SEQ ID NO: 36035 - DNA, 449 bp, Homo sapiens
tgctagggcttagagctggagtccacagagggagatctgggattcatatcagatgagaggaagagcctaggaaagtcccctgaactctgctactttgtcactggtgtgtttggttttggttcttccaggaagagtctgccgaaggtgaaggccatggacttcatcacctccacagccatcctgcccctgctgttcggctgcctgggcgtcttcggcctcttccggctgctgcagtgggtgcgcgggaaggcctacctgcggaatgctgtggtggtgatcacaggcgccacctcagggctgggcaaaggtgggtcctggaggcagtgctgccagggggcgggggtaagtcagccagggatgaggagcggcccagctgcacagggaccaccagcgcaaatgcccgaagcggcagcagaaggccagataagggaagtgggccggatggcact

SEQ ID NO: 36036 - DNA, 852 bp, Homo sapiens
gtgtgaagaaataagaagaatcagtgatactcctagacattggagctcagtgacaggaaacagtaatcatgttgtcgtctactgagaagggcaaggatgaaggaatgagcaggtttgggcaaagaactaagaattgagtttttgaatgtttgtttttagactctaagcagaatccaaatggagatgctcagtaaggagatggatatctaggtcgagagctcaggcaagaggctgagagtaagaacataaatccaggagtcaccagaatacgctaggtatttaaagctaagaaattagatgaggttctttttaaaatcttacttaataaaaagtacagaaatttttctaagtgctttacaaatattaactcaaccctcttaacaactctctgaggtaagaactattattactcttatattccatattaaagataaggaaactgagacacagattatctaagcaactaggcccaaaatcacactaccggtaagcagcaaacctgggactgaatccaagcagtgtggccccagtctgaattcttaacactaagctaaattgcttcctaatactctaagggaaaaaaaaaagtggaaggagagaagaggctccggaactgagccgcagggcactcaacttttagaagttgcaaaaaggggaagcaaaaaaatttaaaaggagctaagtagaaaatgagaaaaagtttggtgtcctgaaatcccatgaataaaatactgtatatcaaagaggaatgcttaagagatcaaaaaagaaatggactagaaagtgaccattggatttggcaaggtggaagtcactagagactttgaatacatacttgatgaaataagttat

SEQ ID NO: 36037 - DNA, 875 bp, Homo sapiens
  misc_feature (812)..(812): n is a, c, g, or t
  misc_feature (815)..(815): n is a, c, g, or t
gtgtgaagaaataagaagaatcagtgatactcctagacattggagctcagtgacaggaaacagtaatcatgttgtcgtctactgagaagggcaaggatgaaggaatgagcaggtttgggcaaagaactaagaattgagtttttgaatgtttgtttttagactctaagcagaatccaaatggagatgctcagtaaggagatggatatctaggtcgagagctcaggcaagaggctgagagtaagaacataaatccaggagtcaccagaatacgctaggtatttaaagctaagaaattagatgaggttctttttaaaatcttacttaataaaaagtacagaaatttttctaagtgctttacaaatattaactcaaccctcttaacaactctctgaggtaagaactattattactcttatattccatattaaagataaggaaactgagacacagattatctaagcaactaggcccaaaatcacactaccggtaagcagcaaacctgggactgaatccaagcagtgtggccccagtctgaattcttaacactaagctaaattgcttcctaatactctaagggaaaaaaaaaagtggaaggagagaagaggctccggaactgagccgcagggcactcaacttttagaagttgcaaaaaggggaagcaaaaaaatttaaaaggagctaagtagaaaatgagaaaaagtttggtgtcctgaaatcccatgaataaaatactgtatatcaaagaggaatgcttaagagatcaaaaaagaaatggactagaaagtgaccattggattgttttgttccaagtnacnagagtagcttatagcaataccaacgttgactgagaatagaatgatctgcacgtttacttc

SEQ ID NO: 36038 - DNA, 861 bp, Homo sapiens
gtgtgaagaaataagaagaatcagtgatactcctagacattggagctcagtgacaggaaacagtaatcatgttgtcgtctactgagaagggcaaggatgaaggaatgagcaggtttgggcaaagaactaagaattgagtttttgaatgtttgtttttagactctaagcagaatccaaatggagatgctcagtaaggagatggatatctaggtcgagagctcaggcaagaggctgagagtaagaacataaatccaggagtcaccagaatacgctaggtatttaaagctaagaaattagatgaggttctttttaaaatcttacttaataaaaagtacagaaatttttctaagtgctttacaaatattaactcaaccctcttaacaactctctgaggtaagaactattattactcttatattccatattaaagataaggaaactgagacacagattatctaagcaactaggcccaaaatcacactaccggtaagcagcaaacctgggactgaatccaagcagtgtggccccagtctgaattcttaacactaagctaaattgcttcctaatactctaagggaaaaaaaaaagtggaaggagagaagaggctccggaactgagccgcagggcactcaacttttagaagttgcaaaaaggggaagcaaaaaaatttaaaaggagctaagtagaaaatgagaaaaagtttggtgtcctgaaatcccatgaataaaatactgtatatcaaagaggaatgcttaagagatcaaaaaagatgtggtatcagtcacgaccgacagaacctttttttccaagtcacaagctgtgcttgatgaaactacgcaacgttcgatgagcatagatatg

SEQ ID NO: 36039 - DNA, 552 bp, Homo sapiens
actgcttattaaattaaatgcaattttccaattcattaagtataatcggtgatctccaaggttctgtccactgctaagattcaggacactcatttaaggtggaacaaaaaaggtagcatctagtaagtgccaaccacataaaggtactgtagcaggccctctagacatattatttaactgcagaatggaatgatgtgttttcccctctttaaagacaagaacactggaactcaaagaatttaacttgcctatgatttcaccgtgagctgagaagtggcagaggtaaggagtgaacttttttctactcttatataaacttccaagtttcagtgacatgctctaaggaagagtttaaaaagaaaaattcaacatccacctttcataattaaaatacacaaagacaagtaaattcataaggttgtccttattcacagtaatgattacattctgccataagggatttggaaatggtatttggcttgctttcattccacacttgtgtgccaaggtagttcctacgtgcgttcaaattaaaccaaaattctctccccg

SEQ ID NO: 36040 - DNA, 613 bp, Homo sapiens
gtgtgaagaaataagaagaatcagtgatactcctagacattggagctcagtgacaggaaacagtaatcatgttgtcgtctactgagaagggcaaggatgaaggaatgagcaggtttgggcaaagaactaagaattgagtttttgaatgtttgtttttagactctaagcagaatccaaatggagatgctcagtaaggagatggatatctaggtcgagagctcaggcaagaggctgagagtaagaacataaatccaggagtcaccagaatacgctagacaagaacactggaactcaaagaatttaacttgcctatgatttcaccgtgagctgagaagtggcagaggtaaggagtgaacttttttctactcttatataaacttccaagtttcagtgacatgctctaaggaagagtttaaaaagaaaaattcaacatccacctttcataattaaaatacacaaagacaagtaaattcataaggttgtccttattcacagtaatgattacattctgccataagggatttggaaatggtatttggcttgctttcattccacacttgtgtgccaaggtagttcctacgtgcgttcaaattaaaccaaaattctctccccg

SEQ ID NO: 36041 - DNA, 802 bp, Homo sapiens
gacaccgggagagccaggagcgtggacacagccagaactcatcacagaggctggcgtccagtcccgggtcacgtgcagcaggaacaagcagccactctgggggcaccaggtggagaggcaagacgacaaagagggtgcccgtgttcttgcgaaagcggggctgctggccacgagtgctggacagaggcccccacgctctgctgcccccatcacgccgttccgtgactgtcacgcagaatccacagacaggaagggaggctcgagcgggactgcggccagcgcctgcctcggccgtcagggaggactcctgggctcactcgaaggaggtgtcaccatttcagctttggcttttcttcttcttttaaattttctaaagctcattaattgtctttgatgtttcttttgtgatgacaataaaatatcctttttaagtcttgtacttcgtgatgggagccgccttcctgtgtccacgcgcctcctgcccccggtgggaagcacggtcaggaggaggctggtccagctgcacctcgggggctccctgcactcgccccccgcctcctgcagccacacgcattgcccgagcggccctccctggcccctgtcgctacatggacccctggggcttctcctcttttctacatggatgcagtttctcctcctgctgggcacggtgctgcctgccctggtcactctgcgggggacagggcctccagggaaagctgggtcgaggctgggagctggctcaggctggccaggcagagccacagggagggccttccagaaccaaccatggtgtgaagcg

SEQ ID NO: 36042 - DNA, 815 bp, Homo sapiens
catttctctagtgacagccaggcttcttgaaaacactgtctgtgtctaacctcccattttttccttactcctctagacctggaatctggcttctcaccctacacccatcacaatcactgaacaataactgctttttacaggactacttctttggtactacatttggtcctcacttctctatttccctccttcatagcttctttggccccacattcaattgtctagttacttatcgtgggcctcctctgtggatcactcttcctccactgcttcttacatgctgatgttccccagcattccatcccctggcttctgatcgctgggcaaatctctcaacatgaccacatgtcctcccctagtttcagcctcactcacatgcagatgactcctagatctgtctcctgaaggcagctctgtgtatccagcaccctactggacacctcacaagtcttaggttaaatgtacaaaactggatccatttttacctattgtttttctacctactcttcttattttctcagaggcagtgaatagcagcaccaacaccaattcttattttctttgtgatccctttgtctcctcccatatccagtttctaaattttatcaagttcactatagccttcatatcctcaaactaaccacttttctctccatcttcattgctgaaatctctcatctgctcttgccttctcccatttggcttgatcttatcattcatacttttacatgctcttattgtcattctagtgaaattttgaagagagaagagataacttgtgatgaattcattgtgtgacacggaagtatgtagtc

SEQ ID NO: 36043 - DNA, 1189 bp, Homo sapiens
ttccaccaccatctctgcccatcactagggctggaggcagagaaaaacttcccctactcaagaaaaagaagctatttttgtcaagttaaatgagcctgaacctgcagagctgaattggcagatgaatattgctaattggtgcagtttcttcggtgcaggaaagagtttccaatcagaccggcaattcattggccacatgaagaacagccagttgtaaggggtaaaataaattggagaagagaacatccacatggattaagtcccaagctcaccctttgttagtgagaatgtagtcacgtggccatacctactacaaggtctatttctggcatctctttccacagcacaggcagccttgcagaatgaaaagtatttctcccacctgccctggcctctgccctggctctgaaagaggcaggctgtgaatgatggttgtcagtgtctggagttttcactgaaaaacagtcccctgaaatggaaagacacacagaggggagtgatctcatcgccactgatttttcccaactttcagttttgtatctccatggtggaactcgatacagcagcatccctcagtggttccagcccagaagtgcaaggggaagccggctgcctgttcatgaattctgtagctcaaaaagcagaggccgagaaagcaaaatttcaaacctttgtcagaaagggtgagaccttgctcagcacgatagctgagaacagcttcctccttcaatgctggtctctctatactgacagttgacagctgatgatcccacattctcagtcatgcgaatgacctcacctgagcaccagtttgtaacggatgtttaagaggaaagcaagggaattaaatgctgcacaggaatttggcacttctgtatagaaatagaaaaactaaatgaaacttatagtaccttccactcaactaagattcttgtgaagcaaagtatatctgggaaaatatagtaatatggttattttgtgttcatagtgtgtgactctacttataagcactttttaatcattataatcaatcactttaaagatcttagagggaacttattaatcaaaatttaagccttctttaaaaaaaaaaaacttcccatatactaattttgcacagaagcaaaagattagattgggattctgcctgttgtggagagacaaagacaagagtgctccagaaaaaaaa

SEQ ID NO: 36044 - DNA, 379 bp, Homo sapiens
aacagccagttgtaaggggtaaaataaattggagaagagaacatccacatggattaagtcccaagctcaccctttgttagtgagaatgtagtcacgtggccatacctactacaaggtaggctagaacatataatctcattggatagccatgatattgctacattaacatataagaaggggagatgaattttggtggacagctagcattctcctcatttaattctcccttctcagtactcaactttgtgttcagatctagcacagcagtcagctctgctaatcagacaagtaagaggggatgctcaaagtgggaggatccatttaatacatttttgtccaaatagacacattatttaaataaaaataaataagttattgt

SEQ ID NO: 36045 - DNA, 327 bp, Homo sapiens
gagggtagcttgcatgtaatgaaataaaatccaggaaaattttcaaatcctcaaaagggctaagaatcttggacccgtttcttttcctttttgtgtgtgtgggttctgttttctgaaagaaggtctccctctgtggcagtgcagcagaggcattatcatagctcactgcagcctcgacctcctggtctcaaacaatcctcccatctcggcctcccaagtaactgggactacaggcatgcaccaccacacctggcttttttttttaaattattttttgtagagatggggtctcaccatgttctcgaggctaatctcgaattagcctca

SEQ ID NO: 36046 - DNA, 447 bp, Homo sapiens
gttctagtttgcctaccacttatttagagcaaaggaatcttgataatatactgtttccaacgaagagtactattttttctctgattttattggcttaagcaagtactatttcaatggtatgactttctttaaatataattaggtagagggaacagcaagtacacaagctccaaggcaggaacaaatttagattgtcctaaagaacagggaaaaaatatcaaacatgggagtaatagaccaagggaagaatattaagaagagatgagaggagtagggcctaggggccataagaagttaagattttaagtgaaataagtgctggccaggcgtggtggctcacacctgtattcctagcactttgggaggctgaggctggccagttgcttgagcccaagaattcaagactggccttggcaacatgatgaaaccccatctgtacaaaaaaaa

SEQ ID NO: 36047 - DNA, 488 bp, Homo sapiens
gccaacatggtgaaaccccgtctctactaaaaatacaaatattaatcgggcgtggtggtgggtgcctgtaatcccagctactcgggaggctgaggcaggagaaccgcttgaagctgggaggtggagattgcggtgagctgagatcacgctactgcactccagcctgggtgacagggcgagactctgtctcaaaaaatagaaaaagaaaaaaatgaaacatactaaaaaacaattcactgtttacctgaaattcaaatgtaactgggcctcttgaatttacatttgctaatcctggtgattccacctctctgttgttcccattttacagaaggggaaacgggcccaggggcagggagtgtggagagcaggcagacgggtggagagaagcaggcaggcagtttgcccagcatggcacagctgctgcctcctattcctgtgcaggaagctgaaagccgagctactccacacccgggtccgggtccctccag

SEQ ID NO: 36048 - DNA, 411 bp, Homo sapiens
tgccaggaattggctaattgaactcgtggcagatttaccatgagacacagagaaatgttttgagacagacattttcatatatattggttagaaatactgtttttcagaaggatatgttttaggttacagaatcaaaatacggtcacgtgcctcataacgacgtttaggtcaaggacagaccgcatttgcaacggtggctccataaggttgtaatggagctgaaaaattcctgccgcctagcgacgtcttgatcttgaccctgtgtaggcctagggtaatgcgtttgtatcttagtttttaacaaaagttaaaaaaaaaatagaaaaaagcttatagaataagaatataaaatttcttttctatagctttaaaatgtgtttgtgttttaagttaaacgttattacaaaagag

SEQ ID NO: 36049 - DNA, 689 bp, Homo sapiens
atgaagtaaaggaaattcttcattgggagcttaaggaataaaatgggtgaaaaggtatggagcaatattgtaaaatccaccttttacatcaccattattaaagatattactaattttaattacaaattataacttttaaaaaatgtaattatgaatgagatgcaactgaatgctgaagaatatctcttgacctcttctgtgttgtccttccacattataaaaattgatttatttttgagaaggaatgactcaaggctgtagagggcagtataagccaactcaagtggactttcctgggttagtgaagtggtacaactgttgttactgtccaagtgtccagttaggtttgataccccaagtatctgaccactggccattagaattgtttcagacttaaaaataaaggaagataaaatggaaagtgttttagaaccaaagaatcacataaacccacaaaaaggtggcaattatgcaacagctgtttccacccttagaaattcttgtggcaaaaccaaagccattacctgggataatcccagcctaaaaacaattcgtctcagtgaactttatggataaagtttcttgttaaagaatttactttcttttacttgtctagttgtataatttcaatttaaaaataggtaaaatcctccaccgtcctccccttttcctctctctaccttcaccaa

SEQ ID NO: 36050 - DNA, 409 bp, Homo sapiens
tttttaaaaattttattttaattgacaaaaattgtatacatttgtggtgtacaacgtgatgttctgaaatatgtattaattgtggaaggaccaatcaacctaattagtcaacacatgcattactgtcagaggcatttgaaccagaacaactccatcttgagtaggggctgggaaaaagacctgataaactgcattcccaggaggttaggcattcttagttacaggatgagataggatgttggcacgagatacaggtcaaaaaccttgctgacaaaacagggtgcagtaaagaagccagacaaaacccaccaaaaccaagatggcggtaagagtgacctctggtcgtctcactgctacactcccaccagtgccatgacagtttacaaatgccatggcaacataagcaagt

SEQ ID NO: 36051 - DNA, 935 bp, Homo sapiens
cgctcagtcagtcaggcccgcgccgccgcctgtcagcgcgtctgaggaggcagcgccgggcgccccagccgcccagcccgcgcacgccccagcggccggccggagcccagacccccgcgaagaccccgcgcgcagccgcgtcccctcccccgccgctgaggagctgccgccgccggcatgagcagagggaggcgggtcccggagagccccctgcctcgcgcgcggcttggagtttgaagggccccgcgccgagccccgccagcgccgccgccgcctgccttcgcccgcctccttccctccctctcgccgctgccggggacgggagccgcgcgccaggccgggcggcgggtggcgggctgcgcgccggggttcatgagcctccgggcggcccgcggccccgggagcctgctgccgtgactcaccccccgcccccgcttgtgtctcgtccctcccggcaggatgccggaccagatctctgtctcggagttcatcgccgagaccaccgaggactacaactcgcccaccacgtccagcttcaccacgcggctgcacaactgcaggaacaccgtcacgctgctggaggaggctctagaccaagatagaacagcccttcagaaagtgaagaagtctgtaaaagcaatatataattctggtcaagatcatgtacaaaatgaagaaaactatgcacaagttcttgataagtttgggagtaattttttaagtcgagacaaccccgaccttggcaccgcgtttgtcaagttttctactcttacaaaggaactgtccacactgctgaaaaatctgctccagggtttgagccacaatgtgatcttcaccttggattctttgttaaaaggagacctaaagggagtcaaaggagatctcaagaagccatttgacaaagcctggaaagattatgagacaaagtttacagt

SEQ ID NO: 36052 - DNA, 232 bp, Homo sapiens
tccgatcttggtctgagacaatgtcttctgcccagtttcaccggatgactcttgtcccctttttgtcctgccccctatccaggtcgttttctgatgtggcggctgagacatgagatcttcagcctccaggctctccagtttttcgtcgagagattcactatggaatcggtgagtgatctctagcccatcctgtccagaaaactcggcgtgggagatacagcgggattcttct

SEQ ID NO: 36053 - DNA, 1552 bp, Homo sapiens
cgctcagtcagtcaggcccgcgccgccgcctgtcagcgcgtctgaggaggcagcgccgggcgccccagccgcccagcccgcgcacgccccagcggccggccggagcccagacccccgcgaagaccccgcgcgcagccgcgtcccctcccccgccgctgaggagctgccgccgccggcatgagcagagggaggcgggtcccggagagccccctgcctcgcgcgcggcttggagtttgaagggccccgcgccgagccccgccagcgccgccgccgcctgccttcgcccgcctccttccctccctctcgccgctgccggggacgggagccgcgcgccaggccgggcggcgggtggcgggctgcgcgccggggttcatgagcctccgggcggcccgcggccccgggagcctgctgccgtgactcaccccccgcccccgcttgtgtctcgtccctcccggcaggatgccggaccagatctctgtctcggagttcatcgccgagaccaccgaggactacaactcgcccaccacgtccagcttcaccacgcggctgcacaactgcaggaacaccgtcacgctgctggaggaggctctagaccaagatagaacagcccttcagaaagtgaagaagtctgtaaaagcaatatataattctggtcaagatcatgtacaaaatgaagaaaactatgcacaagttcttgataagtttgggagtaattttttaagtcgagacaaccccgaccttggcaccgcgtttgtcaagttttctactcttacaaaggaactgtccacactgctgaaaaatctgctccagggtttgagccacaatgtgatcttcaccttggattctttgttaaaaggagacctaaagggagtcaaaggagtaagtgttcagaaatttgattttcactttaacttgaaaggattaattttttttttcctctttcaagatcatagtagtacttgtatttgaaagactctttgaacattttcagcgttaaaaatgctcttggaaaatgatcattggaaaaaatgtgcctcttcacataatggtattgacagaggaatgagattaggcactttcaagaagattgggaaggtcctccatgggtgggagagagaagctaagcccgagtcttggctcccacagtgtgaccactggggacccagcccttctgaacctcgggctcctgcttcatcagcatgaccagggcgcttacccttctttcctctctcaggcttcttgtgtatataacacatggtttgatgttggccaggcacagtggtcatgcctataatctgagcactttgggagaccatggcggcgggtaaattgcttgagcccaggagttcaagaccagcctgggcaacataataagacccccatgtctacagaagaagtacaagaattagccaggggtggtggtgagtgcctgtagttctagctactcaggaagctgaggtgggaagatcaattgagcctgggagttcaaggctacagtgagctgtgattgtggcactgcactccattctaggcaacagagtgagaccctgtc

SEQ ID NO: 36054 - DNA, 352 bp, Homo sapiens
tcttagctcctcactcacatgctttatggttctgcacaaatgactccacctctgttccctcagctgcaaagtagtgataattgtgtcgcctaacctacagaggtgtcatgtaggttcaatgaaataatgcatggaaagcccttcaacagagcctggtgtgtggaaaatgctcagtcaatagtagctggttttattgttcatgtggactttattttttaaccatctcccatcttccctttgctttttcagctccagggtttgagccacaatgtgatcttcaccttggattctttgttaaaaggagacctaaagggagtcaaaggagtaagtgttcagaaatttgattttcact

SEQ ID NO: 36055 - DNA, 395 bp, Homo sapiens
tctttttaagtaccacccaccaagtgagaacccctgagttagtgttatttcccttttgtgtgatatcattcctgttcatattcaattttatggaatttttcacaagatgatgcctttaatttggcaatttaggtttaaaatttatttttatcttccaaaataatcagaaaccctctgacagtaattgcatcaaatcattaagactgagccctataggatacaacatgatcgaagctcctctcattttattaaggtttcttgcagggaaagttactgacttattttgaacctgcttaatagtaataaagttggctggacatggtggctcaggcctgtaatcgcgccactgcagtccagcctgggcgacagagcaagaatccgtctaaaaaaaaaaa

SEQ ID NO: 36056 - DNA, 515 bp, Homo sapiens
ggtgggaggattgcctgaggccaggagttggaggctgcagagagctatgatggtgccactgcactctagcatgggcgacaaaacaatagtcttgtctcaaaaaaactaaaaaagactaaagtgaaattgaaattcagagagtaagtgacttcaaggtagaggcagaaacagaggctggatttgaattcgatcctctggctccagagctcctgggagttatcttgggaatgactgcaaggtctgaggtagatcgttccaggagcaggtgcttatatacagtggaatggcacccactggcacaccactaggaattctgttttcttaccaccaccggagccaggtctctgtcacggtgatgagaagttcccaaagtcatttctcctctctagggtgtcccctctctgtctgctgccactaaatccctaacgacattagagcgaataaatggcatttttaacttcagctttaagcaacaaagaaatactattaagtcaagatgtgtccatctttaccat

SEQ ID NO: 36057 - DNA, 311 bp, Homo sapiens
tccaagtcctggagatacatttcaattaaaatagcagtcatcaagatacccttggaatctctgaattatagctcatctatctagacaaccttacttcaaaatgtggaccacacctgttgctgctttaaagaatgtatgtatattaatacaaaatacttagtaactagatcttttattctaaagctacggtttttaaactttattttagtcttgggaccctgtctttaagcaaaaattaacccagagtcaaacatgcaaaacagataaaagagataaaagaagccccactttggttcagactgtgtatgtgt

SEQ ID NO: 36058 - DNA, 254 bp, Homo sapiens
gagtataattctcaggttgtaatttcccttgtcagttacaaatgatcctcagaagtcagtcctgcaacagcagtgacaaactgattcctggttatttgccaattacctttttaaaacttaggctcagttttataattagatcagccctgaagggaaactccttactagatgtgctgcattagacttaatttgcatggaatattaacagtatctggaggcttactttcccttgtatgcatgtgaccacataactg

SEQ ID NO: 36059 - DNA, 312 bp, Homo sapiens
gacacacaaccaaactctcacacgtgatatgtttaagtaaacaataaatcaccaatcttgttgaaactccaagaatgtgatttgaacccatttgatttctagtgagctgccttgaaacattaaggacatggaaagctgaaaagaggttgacccagtgtttcagcaatttgagttgtggttctttgtagcagtgtgtatgttggggagatgttcacaggctcatatagaaaaaagaccattaggaagaagcatactttccagattgtaggtggtttatggaaaggaaatctaatttctagaattaaaaaaaaa

SEQ ID NO: 36060 - DNA, 346 bp, Homo sapiens
catgaagctggaactgtagccagctctaagttcacttcatgccagatgcataagcaaaggagaaaggatctccaattacacctcgcaaaccgacattcattctgtgcaaatgagaaatatctcaggggaggactcaggcccgacttgggccacacacacacccattggccagtcactgtgaaacaattttgtagactggttgtgagggcagaagtagaatttaacaaccttttctggaaccacataattgaaggaagggggaaaagttccccctaaatgattttggacgcacagttaccagaagaagagataaagataaggagaagaaaaaggaaaaaataaaaac

SEQ ID NO: 36061 - DNA, 505 bp, Homo sapiens
ctaagggacagacctggtgccactggccaactattggccttgttccctaagctctgcaaaccccagtctccaagcatcaaatgggaatgataatgatatctgacctcagagttggtgtgtggaacataaacagagtcacacagctcaggtccttgagcacacaagcaggtgctcagtgagtgtcaggctttatttttgggtaatccaaagctgtctgcaaggggaactccactttgctctgtctgagctacagagaccttgttttcacagatcagggcatcatgaccccaggttctccatttggctgtgcccctgacttctcctctctattacctttgctcagtgctagggatactcatgcaagcgtgcaggtggaagcctaccaggggcgagaagtacacagagaaatctccaccctgctgaagaaagcagcagcattaccacgcaagagctccagagaaacctcttttctcagaactgctggctcagcggagcaaaggtgact

SEQ ID NO: 36062 - DNA, 534 bp, Homo sapiens
ttaaacatagtgatagtgaaactcaatgtcaaatattctacctcattgtttccattagatgaattcatatttgatttggctatgtgccaagatttgggttgtagaaaaaaatgttgaacacaggagagattgtcctgaaaaaagcattgtgactgggtgggttggcccttccaggaagccagggagtgttgactagactgcagcacttcccaaacgttaatgtgtaggaacttcccggagatcttgctaaaatgcagattctgacgcatttctaacaagctccctgtgatgcagaagcagctgatctgtgggtacattatgagtagcaagggactagaggataatagtgtcttaatgctggtggcatttgtcactaataaatgttaacaatagctaccatgtactgcgtgccaactatgagacatgaagtcacagagctagtaaggaaggttgctagaaactgtctctgaaatgtatgctcttgccaccactccaagccggctcactgcagggtactggggtgagtgggaatgc

SEQ ID NO: 36063 - DNA, 375 bp, Homo sapiens
tcgaccaccatgcttaaccacaaaagaggtccttttatgccagagtctcgctctgttggccaggctggagtacagtggcatgatcttggctcactgcaacttccatctcctgggctcaagcaattctcctgcctcagcctcctgagtagctgacattacagattttaaaaaggaagaaaaatcatatcaagttatcagttggcttgcacctgaagatcatcaaagagaatttaaaaagagttttgatttctttctggaagaaactttaggtggcagaggaaaatttgaaaacttattaaatgttctagaatacttggcgttgcagtgcagtcattttttgtggttaagcatggtgacattagtcgacgcggccgc

SEQ ID NO: 36064 - DNA, 620 bp, Homo sapiens
cagctcttttggtagaacattcagctgttaggacaagaagctggtgtcttacctgtcacccacacccagaacagcacctgataattcagttatctccccctaccttttattgttttatcgctctgaaatgggggatctcaataaaataaagcaagggcacccttaaaccattttaaccctatttccatcacaagaatttctctaagacaagtctctgaatattcccatatatggagctcactgtctattgggatagaaaaataaacataagtatgtcccaaatgttacatgggacatacttacactaagaaattgtcatttgtctgaaattcaaatttaactgtatcctatatttttatttgctaaatctgacaaccctacttcaaggacaaggcaagttacacaggagtgacatggggctaagagcagagagtggtgcaagctgtgaaaatgagcacattccccaatagaagggcatttaaatacttttttttttttttaaatcactacacaccaacaaaatacatctgcatctgaatgtggcttgtggaccaccagtttccaatcttggctgtaggacagctctgaatatcagaaattgttttttagattgagccaaa

SEQ ID NO: 36065 - DNA, 463 bp, Homo sapiens
ttcatgaaaaagcctcgattttgctaattttcattgtgtaaatacttcaccatggctgagttccagctatctacatgacacctctaaacagagttgggaatgttgtacacaatcagctctcaggagctggtgtaataaagacattgtatcatttaaccattggaaaacagcactggttactcggaacaagaatgaaaaagacaaatgactttttaaatatttttaaatttgtaattgatacataattgtatggacttttctgtttcttttgattttttgtggagatgggatttccctatgttgcccaggctggtctcaaactcctgggctcaagcaatcctcccacttcagcctcacgcctgtaatcccagcactttgggaggtggaggcgggcggatcacctgaggtcaggagttcgagattagcctggccaacatggtgaaacccgtctctactgaaatac

SEQ ID NO: 36066 - DNA, 676 bp, Homo sapiens
taaacatagtttgtaggttctcatgcatagatactcttaacaaatgaatacttagcattgcttttttcaagcaacaaatatattactttagctttctcagagtaagattacaaaattgtggaacttactgggttttgtaggaaaagctagtttctaattaaactcttaatctatttttagtgctgagtacatattgagaaggtagaatatttccagtggcctggttagaaatacttttcattgcacaaccaacatgaaaggatgacttatttccatgccagctgtcctcagttttcctgaccttaatggaacatattagatccagctgctggaatatttactctaatggaataaagcagttggattctttccttgcctattttccaaagaggacagtgttgaccaaaatatgtacttgttggtagcactagaagatcttcatgatagatacagttgacaacttttaaaataattgtctgtcccaatggggaaaaatgtatataatacacagaacactaggttaatatccagaatgcagacatattttcatatattcttacatctttcttatccccaaatactggacttcaccttcttgtcagtgtaaacctccattacaggaaacactgaggaaaaggaagtacccaccagaaatcatcttacattgcatatattc

SEQ ID NO: 36067 - DNA, 1083 bp, Homo sapiens
aataattaggaagactaagcagccccagagataagacctcatgggatcattgttacttcttatggagtgataaagtgaccttcctcgaattgtatcaatccataaccaatcaagttgctgcaacctatgcactgggcttgaatgaaagctgtcatgattctgctaaagattctctgtctttccctgtgtgtgaaaccttaacgtctctactttggaacgccgatctcatttatttggagttggtgtttccaggtggctttcttcaagctttgtgttcacataaactcagtacttaatcttacattctaaattttattatttactgctgacgtcagtttctgtcggattgtaggcgcctgaccagagagggcacgcgtcgctatgttgtaaaactcacactcgtcaaaaagacatgggttagggttttccccctccctctggatgaagctaattagctgacacagatggtcacctccattaccaaatagagccaggatgaactatgtgtgaccaagagtgttgtcaagtcctcttccctgaggactgattagtgtttatcttgaaaacatgtactcaatgggttgtatagaacagtgaagtttccttgtctcttttcaacctcttagctgtttgcctcaatttcccatcacattctggtttaaggcttacttattaataatgtggtttttatttctttcactattatcatcgtgaagatgatttctcattggggggaagattttttttgttttccattatattttctcaaaatttaaagagtaaagaaatgaatattttttgggccaggaagtgtggcttatgactataatcccagcactttcagaggctgaggcagtcagatcacttgaagtcagaagttcgagaccagcctagccaatatggtgaaacctcgtttgtatcgaaaatacagaaattagccgggcatggttgtgcgcgtctgtaatgtcaactactccggaggctgagacaggaaaatcggttcaacccaggaggcagaggctgcagtgagcccagatctcgccaccgcattccagcctggccaaaaaagaaaactctgcctca

SEQ ID NO: 36068 - DNA, 229 bp, Homo sapiens
gggtttcaccatgttggccaggctggtcttgcactcctgacctcaagtaatctgcccatctcagccttccagagtgctagtattataggcatggttgtgcgcgtctgtaatgtcaactactccggaggctgagacaggaaaatcggttcaacccaggaggcagaggctgcagtgagcccagatctcgccaccgcattccagcctggccaaaaaagaaaactctgcctca

SEQ ID NO: 36069 - DNA, 937 bp, Homo sapiens
ttaggtgtctattactgcaaaacaagttacctcaaactgtgtggtttaaaacaagcttttatcaactcacgtattttcgaagggttaggaattcaggagtatcttagctgggtggcactactacctcagaatctctcaggacatggcagccaaggtgtcaaccagagctaaagtcatttgaagacttgagctaggcctggaagatttgctcctaagatggttcattcaacatggttgttgccaagaggcccctgttccgtcccccatgggcctctctatatggatgcttgagtgtcctcatgacacggtggctaatctccctgcagtattaaacaataagagagaataaagaggaagccacaaagcctgtttgcctcagtctcagaagtcaaacactgtcactttgaccttattctattaggagccactaaatccagtcaagtctcaagggaagtgggaaggggtattgactgaaccccaccttttgaagagactgtcaaaaaatttgtgacatatatttcacctccacagacctttaccatctaaaagtcgatgacacaatttggattattctcatcatatctaactaaatcaggcatcgagggaaccaggggaaaaaagcacttggggcacatagcacccaattcaagaattatcctcaaacccagctactgaaaggggctgctgtaaccttaacaccagttttacctcacggctgttgaagtgacccactatgactctaagagtaattttacctaaagccatcactcactaatcagagcttgccagctcccagaaacttgctaatattaatgagcattttttttcaacacaatacagaacgtttctctttttaataaaactcccaaccttctctttgttctttggacacaacagagaccaccatggtctatgtgtatgccccaaattgcaattc

SEQ ID NO: 36070 - DNA, 773 bp, Homo sapiens
cagcatttaggaaaggggatggcaggagcggctccacagccatctttcaggacacctgcttgctggggtgcagttagaatacagccaccaagttgtgactccctcccttccagcctgccaggtgattggacagtgtggacacgtgtccctgtccagccaggctctcagagcctgtggcactcatttattcctcagaagtgtgtctgtcctttcactcaggaacatttgccaagtgtgtcaaatgggccatgtctgctaggtgctagaaaaccaaacacaattgaggcaccgccctggaggacctcaccaaggacaggggtaagctgggcacgaaggcagacatcttcacaggtcaacccggtgctggtcaggagccatgactataggagctggagggagcgaggaggccaccatgcgcagcccagtggccctccttttccagcctgagccagcactgtcaggcgtagagcgtctcggattctgcaggtgcctgggtgggaacaccttggtatttctctcaccctggggtcttgtaccacttgtcagcttggagcgggagcttggtaacagttgggcaacttcagcactctgggggaaagaagtgcattttcagaagcgtagggacagtcaggagaaatttgctcaaatgttgcttgggcacagtggctcatgcctgtaatcccaatgacttgggaggctaaggcaggaggattgccttttaggccaagaactggagaccagcctggacaacatagtgagatccacctccaaaa

SEQ ID NO: 36071 - DNA, 432 bp, Homo sapiens
tttaggtcctccatataactgcggcacacagcagatgctaacaaacatcacttcctcttataatgagatagattttacatattaaggcttgctttgtgcctaccagaatgtcagctccatgaaagcagaaatttttgcctgtttagttcaccactgtctctccattacttatgtaacagaatctgccacctagatgtttgaaaaacactttttgaataaaccaggtgccatatgagcaattacatttatcatgactgcatcctcatagccacctggtgagtcaggtacacgaattatacccattttacagatgagaaaaacctggcccgggaatttaacttccgtctcagggtctcgcaaccagcaaggggccaagccaagatttaaatccatttaaagtcagtcttaaacctgactctgaatcccatgctc

SEQ ID NO: 36072 - DNA, 296 bp, Homo sapiens
ggaaggctaagagttttacctgtagcccctgaagtgctatgtcttagaggagtaaggatgagatgggattaggcaagtcttttcaaagacaagtccagcttcaaatcagagaatctgctgatcagcttctattctatttgcccaggcagagcaaaatatattcaattttaatatattaaatttttataaatttttaaaaatttaaattgtaaactttcaccaaaggaaagttacactatccaaactctaaaattacttcttcaggttttcatagaagctataaaaacttacatata

SEQ ID NO: 36073 - DNA, 379 bp, Homo sapiens
ttactcaattctttactgattttccgatttttaagctatttctattaacatacacaagtcaggtctgaattgcataaacatcttttttattagaaataaggtagccattctcatctatcttcaagtgctctgaatctgtatttttgctttaaacatgaaaccacaggccaagtttcgtttctcatttaccacttctccacctgagttgtcagttttgcttttgctctaactcaaggccaaatgaaagggcatctcattaaatcactgtgctgggcaaggttcatgtaaagttatctactttgctttgcatacttttttttagtttgtcatttggaaataaatttaaacctaatactgttcaagatgtgttcttgtgttt

SEQ ID NO: 36074 - DNA, 2285 bp, Homo sapiens
attattttgcaggagtctacacccaggcggtggctatacttattaaagttggcgggagctgagcgatcagtcggtcctgggctggctgtggtgtagggcgttgcaggcagcgctcacctcctcaggccggcagaatgcgggtggctgtggctggctgctgccacggcgagctggataagatctatgagacgctggcgctggcagagcggcgcggcccggggcctgtcgacctcttgctgtgctgcggcgacttccaggcggtgcgcaacgaggcggatctacgctgcatggccgtgccgcccaagtatcgtcacatgcaaaccttctacaggtattactctggagagaaaaaggctccagttctcacgctcttcattgggggaaaccatgaagcctcaaatcatttgcaagagttaccctatggtggctgggtggcaccaaacatttattatttaggtttggctggtgtggtaaaataccgaggtgtaaggatcggtggaatctctggtatctttaaatctcatgactatcgaaaaggtcattttgagtgccccccttataattcatctacaatcaggagtatatatcatgtgagaaatattgaagtctataaattaaaacagctgaagcagcctatagatatattcttgtctcatgattggccaagaagtatatatcattatggaaataagaagcaacttcttaagactaaatcttttttccgacaagaagtggaaaataacacattaggaagtccagctgcctcagagcttttagagcatctcaaacctacttattggttttctgcccaccttcatgtgaagtttgccgccttgatgcagcatcaggcaaaggataaaggacagacagccagagcaaccaaatttttagccttggacaaatgcttaccacatagagattttcttcagatattagagatagaacatgaccccagtgctcctgattacttggaatatgatattgaatggctcactattctcagggctacggatgatcttattaatgtgactgggcgcctgtggaatatgccagaaaataatggcctgcatgcaaggtgggattatagtgcaacagaagaaggtatgaaagaagtattggaaaaattgaatcatgatctcaaggttccatgtaactttagtgtaacagctgcttgttatgatcctagcaagccacagacacaaatgcagctgattcataggatcaatcctcagactactgaattttgtgcccaacttggcatcatagacatcaatgttaggcttcagaagtccaaggaagaacatcatgtgtgtggtgaatatgaagaacaggatgatgtggagagtaatgactctggagaagaccagagtgaatataatacagacacatctgctctgtcttctattaatccagatgaaataatgttagatgaagaagaagatgaagatagtattgtaagtgcacatagtggcatgaatacaccatcggtagaaccttctgatcaagcttctgagttttctgcaagtttctctgatgtcaggatcttgccaggctctatgattgtatcttctgatgatacggtggattccacaattgatagagaggggaaacctggtgggactgtggagtcagggaatggagaggacttaaccaaggtgccattgaagaggctgagtgatgaacatgaacctgaacaaagaaagaaaattaagaggaggaatcaagccatttacgctgcagtggatgatgatgatgatgatgcagcttaagatgatttacttgttttgtttttgtgtttgttttgcttttttgagatggagtttcactcttgtcacctagactggagtgcaatggcgtgatctcggctcaccgcaacctccgcctcccaggttcaagcaattctcctgcctcagcctcccaagtaggtgggactacaggtgcccgccaccacacccggctaatttttgcatttttagtaatgacagggtttcaccatgttggccaggctggtctccaactcctgacctcaggcgatccacctgtcttggccttctaaagtgctgggattacaggcgtgagccactgtgcctggccgacaatttacttgtcttagtattatatgtagatatgtgattttttgagactgtatttttagagctgaatttttgactaaagacttaactttataataatgaagatacattagagaattttagttagatattgactttatctttaggcttttgtatgtttcagatgcaaacatattaaagtttcatatattt

SEQ ID NO: 36075 - DNA, 2142 bp, Homo sapiens
tttaagttctgccagtttacttttaagctcttttgtttatctttaatccttgggttatatgctttgatttatgtgtgttcaatgctttgagttaacgtcatcatcatcattagtttttgccttgaattttgtatggaaattgaaggtctgagaagttaaatgccttctcttttatcacacaagtgggtatagaattaacttaattttggaaaagtaacagtcattcctttgacacacaacttaggggtatgtgtgataaagattattttcatcctattccgtgtatgaagaatcacctgtggttgttttaacattctttcttaaatcatgattcatattgtccaggcaaaggataaaggacagacagccagagcaaccaaatttttagccttggacaaatgcttaccacatagagattttcttcagatattagagatagaacatgaccccagtgctcctgattacttggaatatgatattgaatggctcactattctcagggctacggatgatcttattaatgtgactgggcgcctgtggaatatgccagaaaataatggcctgcatgcaaggtgggattatagtgcaacagaagaaggtatgaaagaagtattggaaaaattgaatcatgatctcaaggttccatgtaactttagtgtaacagctgcttgttatgatcctagcaagccacagacacaaatgcagctgattcataggatcaatcctcagactactgaattttgtgcccaacttggcatcatagacatcaatgttaggcttcagaagtccaaggaagaacatcatgtgtgtggtgaatatgaagaacaggatgatgtggagagtaatgactctggagaagaccagagtgaatataatacagacacatctgctctgtcttctattaatccagatgaaataatgttagatgaagaagaagatgaagatagtattgtaagtgcacatagtggcatgaatacaccatcggtagaaccttctgatcaagcttctgagttttctgcaagtttctctgatgtcaggatcttgccaggctctatgattgtatcttctgatgatacggtggattccacaattgatagagaggggaaacctggtgggactgtggagtcagggaatggagaggacttaaccaaggtgccattgaagaggctgagtgatgaacatgaacctgaacaaagaaagaaaattaagaggaggaatcaagccatttacgctgcagtggatgatgatgatgatgatgcagcttaagatgatttacttgttttgtttttgtgtttgttttgcttttttgagatggagtttcactcttgtcacctagactggagtgcaatggcgtgatctcggctcaccgcaacctccgcctcccaggttcaagcaattctcctgcctcagcctcccaagtaggtgggactacaggtgcccgccaccacacccggctaatttttgcatttttagtaatgacagggtttcaccatgttggccaggctggtctccaactcctgacctcaggcgatccacctgtcttggccttctaaagtgctgggattacaggcgtgagccactgtgcctggccgacaatttacttgtcttagtattatatgtagatatgtgattttttgagactgtatttttagagctgaatttttgactaaagacttaactttataataatgaagatacattagagaattttagttagatattgactttatctttaggcttttgtatgtttcagatgcaaacatattaaagtttcatatatttacttgactgggtatcttttttttgaagacatacattattcacttccatttttacaataaacacttacttaacatctactctgtgccaagcactctgctataatatgggaccataaagatgagtaagacaaggatttttgcctccaaggacttgttatcactgtaaacattttgatgtatacaatatggctatattatattttgttttataaaatcaagtctttgtatatattatgatgtatgctttcttttcatttattataaatatttttcctgatcagcttttaatatctgtcaaataaaaattgaaattgaagatggtatataagatttcaggaaataaactactctgaatactaaa

SEQ ID NO: 36076 - DNA, 395 bp, Homo sapiens
gacccaatagcaggcgcacagggtcttacttaacatctactctgtgccaagcactctgctataatatgggaccataaagatgagtaagacaaggatttttgcctccaaggacttgttatcactgtaaacattttgatgtatacaatatggctatattatattttgttttataaaatcaagtctttgtatatattatgatgtatgctttcttttcatttattataaatatttttcctgatcagcttttaatatctgtcaaataaaaattgaaattgaagatggtatataagatttcaggaaataaactactctgaatactaaacattggtaaacgtacaatcttaatttgctgagattagtataaccctgctgacttttgcatattgagttttttt

SEQ ID NO: 36077 - DNA, 2718 bp, Homo sapiens
attattttgcaggagtctacacccaggcggtggctatacttattaaagttggcgggagctgagcgatcagtcggtcctgggctggctgtggtgtagggcgttgcaggcagcgctcacctcctcaggccggcagaatgcgggtggctgtggctggctgctgccacggcgagctggataagatctatgagacgctggcgctggcagagcggcgcggcccggggcctgtcgacctcttgctgtgctgcggcgacttccaggcggtgcgcaacgaggcggatctacgctgcatggccgtgccgcccaagtatcgtcacatgcaaaccttctacaggtattactctggagagaaaaaggctccagttctcacgctcttcattgggggaaaccatgaagcctcaaatcatttgcaagagttaccctatggtggctgggtggcaccaaacatttattatttaggtttggctggtgtggtaaaataccgaggtgtaaggatcggtggaatctctggtatctttaaatctcatgactatcgaaaaggtcattttgagtgccccccttataattcatctacaatcaggagtatatatcatgtgagaaatattgaagtctataaattaaaacagctgaagcagcctatagatatattcttgtctcatgattggccaagaagtatatatcattatggaaataagaagcaacttcttaagactaaatcttttttccgacaagaagtggaaaataacacattaggaagtccagctgcctcagagcttttagagcatctcaaacctacttattggttttctgcccaccttcatgtgaagtttgccgccttgatgcagcatcaggcaaaggataaaggacagacagccagagcaaccaaatttttagccttggacaaatgcttaccacatagagattttcttcagatattagagatagaacatgaccccagtgctcctgattacttggaatatgatattgaatggctcactattctcagggctacggatgatcttattaatgtgactgggcgcctgtggaatatgccagaaaataatggcctgcatgcaaggtgggattatagtgcaacagaagaaggtatgaaagaagtattggaaaaattgaatcatgatctcaaggttccatgtaactttagtgtaacagctgcttgttatgatcctagcaagccacagacacaaatgcagctgattcataggatcaatcctcagactactgaattttgtgcccaacttggcatcatagacatcaatgttaggcttcagaagtccaaggaagaacatcatgtgtgtggtgaatatgaagaacaggatgatgtggagagtaatgactctggagaagaccagagtgaatataatacagacacatctgctctgtcttctattaatccagatgaaataatgttagatgaagaagaagatgaagatagtattgtaagtgcacatagtggcatgaatacaccatcggtagaaccttctgatcaagcttctgagttttctgcaagtttctctgatgtcaggatcttgccaggctctatgattgtatcttctgatgatacggtggattccacaattgatagagaggggaaacctggtgggactgtggagtcagggaatggagaggacttaaccaaggtgccattgaagaggctgagtgatgaacatgaacctgaacaaagaaagaaaattaagaggaggaatcaagccatttacgctgcagtggatgatgatgatgatgatgcagcttaagatgatttacttgttttgtttttgtgtttgttttgcttttttgagatggagtttcactcttgtcacctagactggagtgcaatggcgtgatctcggctcaccgcaacctccgcctcccaggttcaagcaattctcctgcctcagcctcccaagtaggtgggactacaggtgcccgccaccacacccggctaatttttgcatttttagtaatgacagggtttcaccatgttggccaggctggtctccaactcctgacctcaggcgatccacctgtcttggccttctaaagtgctgggattacaggcgtgagccactgtgcctggccgacaatttacttgtcttagtattatatgtagatatgtgattttttgagactgtatttttagagctgaatttttgactaaagacttaactttataataatgaagatacattagagaattttagttagatattgactttatctttaggcttttgtatgtttcagatgcaaacatattaaagtttcatatatttacttgactgggtatcttttttttgaagacatacattattcacttccatttttacaataaacacttacttaacatctactctgtgccaagcactctgctataatatgggaccataaagatgagtaagacaaggatttttgcctccaaggacttgttatcactgtaaacattttgatgtatacaatatggctatattatattttgttttataaaatcaagtctttgtatatattatgatgtatgctttcttttcatttattataaatatttttcctgatcagcttttaatatctgtcaaataaaaattgaaattgaagatggtatataagatttcaggaaataaactactctgaatactaaacattggtaaacgtacaatcttaatttgctgagattagtataaccctgctgacttttgcatattgagttttttt

SEQ ID NO: 36078 - DNA, 2583 bp, Homo sapiens
attattttgcaggagtctacacccaggcggtggctatacttattaaagttggcgggagctgagcgatcagtcggtcctgggctggctgtggtgtagggcgttgcaggcagcgctcacctcctcaggccggcagaatgcgggtggctgtggctggctgctgccacggcgagctggataagatctatgagacgctggcgctggcagagcggcgcggcccggggcctgtcgacctcttgctgtgctgcggcgacttccaggcggtgcgcaacgaggcggatctacgctgcatggccgtgccgcccaagtatcgtcacatgcaaaccttctacagcctcaaatcatttgcaagagttaccctatggtggctgggtggcaccaaacatttattatttaggtttggctggtgtggtaaaataccgaggtgtaaggatcggtggaatctctggtatctttaaatctcatgactatcgaaaaggtcattttgagtgccccccttataattcatctacaatcaggagtatatatcatgtgagaaatattgaagtctataaattaaaacagctgaagcagcctatagatatattcttgtctcatgattggccaagaagtatatatcattatggaaataagaagcaacttcttaagactaaatcttttttccgacaagaagtggaaaataacacattaggaagtccagctgcctcagagcttttagagcatctcaaacctacttattggttttctgcccaccttcatgtgaagtttgccgccttgatgcagcatcaggcaaaggataaaggacagacagccagagcaaccaaatttttagccttggacaaatgcttaccacatagagattttcttcagatattagagatagaacatgaccccagtgctcctgattacttggaatatgatattgaatggctcactattctcagggctacggatgatcttattaatgtgactgggcgcctgtggaatatgccagaaaataatggcctgcatgcaaggtgggattatagtgcaacagaagaaggtatgaaagaagtattggaaaaattgaatcatgatctcaaggttccatgtaactttagtgtaacagctgcttgttatgatcctagcaagccacagacacaaatgcagctgattcataggatcaatcctcagactactgaattttgtgcccaacttggcatcatagacatcaatgttaggcttcagaagtccaaggaagaacatcatgtgtgtggtgaatatgaagaacaggatgatgtggagagtaatgactctggagaagaccagagtgaatataatacagacacatctgctctgtcttctattaatccagatgaaataatgttagatgaagaagaagatgaagatagtattgtaagtgcacatagtggcatgaatacaccatcggtagaaccttctgatcaagcttctgagttttctgcaagtttctctgatgtcaggatcttgccaggctctatgattgtatcttctgatgatacggtggattccacaattgatagagaggggaaacctggtgggactgtggagtcagggaatggagaggacttaaccaaggtgccattgaagaggctgagtgatgaacatgaacctgaacaaagaaagaaaattaagaggaggaatcaagccatttacgctgcagtggatgatgatgatgatgatgcagcttaagatgatttacttgttttgtttttgtgtttgttttgcttttttgagatggagtttcactcttgtcacctagactggagtgcaatggcgtgatctcggctcaccgcaacctccgcctcccaggttcaagcaattctcctgcctcagcctcccaagtaggtgggactacaggtgcccgccaccacacccggctaatttttgcatttttagtaatgacagggtttcaccatgttggccaggctggtctccaactcctgacctcaggcgatccacctgtcttggccttctaaagtgctgggattacaggcgtgagccactgtgcctggccgacaatttacttgtcttagtattatatgtagatatgtgattttttgagactgtatttttagagctgaatttttgactaaagacttaactttataataatgaagatacattagagaattttagttagatattgactttatctttaggcttttgtatgtttcagatgcaaacatattaaagtttcatatatttacttgactgggtatcttttttttgaagacatacattattcacttccatttttacaataaacacttacttaacatctactctgtgccaagcactctgctataatatgggaccataaagatgagtaagacaaggatttttgcctccaaggacttgttatcactgtaaacattttgatgtatacaatatggctatattatattttgttttataaaatcaagtctttgtatatattatgatgtatgctttcttttcatttattataaatatttttcctgatcagcttttaatatctgtcaaataaaaattgaaattgaagatggtatataagatttcaggaaataaactactctgaatactaaa

SEQ ID NO: 36079 - DNA, 2630 bp, Homo sapiens
attattttgcaggagtctacacccaggcggtggctatacttattaaagttggcgggagctgagcgatcagtcggtcctgggctggctgtggtgtagggcgttgcaggcagcgctcacctcctcaggccggcagaatgcgggtggctgtggctggctgctgccacggcgagctggataagatctatgagacgctggcgctggcagagcggcgcggcccggggcctgtcgacctcttgctgtgctgcggcgacttccaggcggtgcgcaacgaggcggatctacgctgcatggccgtgccgcccaagtatcgtcacatgcaaaccttctacaggtattactctggagagaaaaaggctccagttctcacgctcttcattgggggaaaccatgaagcctcaaatcatttgcaagagttaccctatggtggctgggtggcaccaaacatttattatttaggtttggctggtgtggtaaaataccgaggtgtaaggatcggtggaatctctggtatctttaaatctcatgactatcgaaaaggtcattttgagtgccccccttataattcatctacaatcaggagtatatatcatgtgagaaatattgaagtctataaattaaaacagctgaagcagcctatagatatattcttgtctcatgattggccaagaagtatatatcattatggaaataagaagcaacttcttaagactaaatcttttttccgacaagaagtggaaaataacacattaggaagtccagctgcctcagagcttttagagcatctcaaacctacttattggttttctgcccaccttcatgtgaagtttgccgccttgatgcagcatcaggcaaaggataaaggacagacagccagagcaaccaaatttttagccttggacaaatgcttaccacatagagattttcttcagatattagagatagaacatgaccccagtgctcctgattacttggaatatgatattgaatggctcactattctcagggctacggatgatcttattaatgtgactgggcgcctgtggaatatgccagaaaataatggcctgcatgcaaggtgggattatagtgcaacagaagaaggtatgaaagaagtattggaaaaattgaatcatgatctcaaggttccatgtaactttagtgtaacagctgcttgttatgatcctagcaagccacagacacaaatgcagctgattcataggatcaatcctcagactactgaattttgtgcccaacttggcatcatagacatcaatgttaggcttcagaagtccaaggaagaacatcatgtgtgtggtgaatatgaagaacaggatgatgtggagagtaatgactctggagaagaccagagtgaatataatacagacacatctgctctgtcttctattaatccagatgaaataatgttagatgaagaagaagatgaagatagtattgtaagtgcacatagtggcatgaatacaccatcggtagaaccttctgatcaagcttctgagttttctgcaagtttctctgatgtcaggatcttgccaggctctatgattgtatcttctgatgatacggtggattccacaattgatagagaggggaaacctggtgggactgtggagtcagggaatggagaggacttaaccaaggtgccattgaagaggctgagtgatgaacatgaacctgaacaaagaaagaaaattaagaggaggaatcaagccatttacgctgcagtggatgatgatgatgatgatgcagcttaagatgatttacttgttttgtttttgtgtttgttttgcttttttgagatggagtttcactcttgtcacctagactggagtgcaatggcgtgatctcggctcaccgcaacctccgcctcccaggagaatcgtcgaacccgggaggcggaggctgcagtgagccgagatcatgccactgcactcacagcctgggcgaaagagactccatctccaaaaaacaaaaaaaaaaaaagtgaagcgacgggaaaaacagccacaatctcgggaagcctgagacgcacggagaatgggatatgaccccgcgggaaggcagcgacgctagcataggtgcagcacaaaaaactgcactaacgggaaactagggccgtggccaccaagatggagcaaaacctccctcacaaacaacaaacaacacatacaacgagaggcgtgagcgagagcactgatgtaaccacaacaaccagagcagacgtagcaggcaaaaactgcgtgaacccacaagaaggcccaccgtgtgtgaccgagaagactagatgtcacagccgcggagacgtcatgccacgggtgacgcagacacaagaaccgcggcgctccaaacaaaaacagcacacaaaacgagaccgacacaaccaaactgggcggggcagcgaacgataacccgagaggggccagacgacagcgacatcagcgcagcagtctcacaaggaccacaaggcaggcgactacaacacgcggactggcgagacccaggtcaacgcgggcaaaggcgagcgcacttgaaaagcacaaattggcgagaaagggacgccaacaaatgcccggaaagaagatacgaatggacacgagttgagagacgacgcgcat

SEQ ID NO: 36080 - DNA, 702 bp, Homo sapiens
gacgtagctggaaccacagacacaatgctactgacctggcttttgttttttcttatagatttgctggtctccaactcctgacctcaggcgatccacctgtcttggccttctaaagtgctgggattacaggcgtgagccactgtgcctggccgacaatttacttgtcttagtattatatgtagatatgtgattttttgagactgtatttttagagctgaatttttgactaaagacttaactttataataatgaagatacattagagaattttagttagatattgactttatctttaggcttttgtatgtttcagatgcaaacatattaaagtttcatatatttacttgactgggtatcttttttttgaagacatacattattcacttccatttttacaataaacacttacttaacatctactctgtgccaagcactctgctataatatgggaccataaagatgagtaagacaaggatttttgcctccaaggacttgttatcactgtaaacattttgatgtatacaatatggctatattatattttgttttataaaatcaagtctttgtatatattatgatgtatgctttcttttcatttattataaatatttttcctgatcagcttttaatatctgtcaaataaaaattgaaattgaagatggtatataagatttcaggaaataaactactctgaatactaaa

SEQ ID NO: 36081 - DNA, 299 bp, Homo sapiens
tcaacaccaaatttgatcttgggccaactcaaagatgcatgacgctttcattctttttacaaagcccttttctagtcattgtgcctttgggttctgacattaagtcactgctgaggaaggggagagagggtgacagaggctcagttcctgaggcacagtatctccatcctcacctaccattcattcattcatgctcaactaacaagcttctgcaggtcccattccacctttccccaccaacattaatgccaattctacaaataacgacatgtgtagtgtttacaaggtatgagacattc

SEQ ID NO: 36082 - DNA, 330 bp, Homo sapiens
ttttgaaaagtgttttctggtacacaaaaataatattctgaaatatctctctgatatttgattgccggatttaacctacatacctctgaaccttggtttttcagacatgcaaactgcttaacaagttccaatgcattaatcaatgcaccattgcataacttacagtaagaaaagttggtagatatttcagcaatgccataaaatatgcttccatttaacactttgagacaaccaatacactatttatattattgagacaaaacaaacctaagatcacagaaaaatatttattttaatagaatggtatttaagtagatagtttttttgttg

SEQ ID NO: 36083 - DNA, 458 bp, Homo sapiens
cttaactactttcttacgtaaaatggaactcatcaaagcactgacctcatatcacgaggatgaaaataagattaaaaaatacttagttcaatgcctggctcatagtaagtggtaagtgctcaccatattttaatttttacatagaacatgtcttactttttcattagaaaaaaagaaaatagagttatttcagtgggaagtagtggttgaggttaagaggcttaatgacatacaccgggactcaaatgacaccgccaaagggggcacatttgtttaaagggaagagtgtgaacttgtaaagtttaggaaataagaatgtagctgggctcggtggctcacgtgtgaaatcccagcacactgggaggccaaggcagggtggatcccttgagctcaggagttcgagactaccctgagcaatatggtgaaaccctgtccctgcaaaaaatacaaaaaaaaaa

SEQ ID NO: 36084 - DNA, 444 bp, Homo sapiens
ggcctcctgtcagtggcaccaatggacctgctacccacagaatcttgttccgttgtagacaatgaagctgcttagcaatcttgggcaagccatctcttaatattaaagcagacaccacagaatagctttcttcacttacaaatgttgattgggcatttatgatatggcaggaactccttctcacatggagacctgatgttaaaggacacagccatgctcttgaggagcttacaatccaagctggaggcaggggagggtatagtctttaaatatgcttaagtgttgtagggaaggacagagttaccaataaacatgtaactagaaagccaggctcagttcttacctctgggaatcagaactctttatgcaacttgattgatagaatctactatctggaagataattgaagaactttaataaaattgtcaatagaataaaaaaaaa

SEQ ID NO: 36085 - DNA, 351 bp, Homo sapiens
taggtcttcctcgaagatccaagagaaacaaaactaacaataacaattggaactagcaaggtttagaaaggccattgtatacaagataaatatttttagaatctgcagttcccctaatcagtagcagcagtaacctgttagaagatgtaatgaaagtaaagatctgggccaggcacgatgtctcacgcctgtaatccaagcactttgggaggccaaggtgggcagatcatgaggtcaagagattgagaccatcctggccaacatgatgaaaccccatctctactaaaaatacaaaaattagctgggtgtggtggtacgcgcctgtagtcccagctactcgggaagctgggg

SEQ ID NO: 36086 - DNA, 653 bp, Homo sapiens
gctcgaccgaagatggcggaggtgcaggtcctggtgcttgatggtcgaggccatctcctgggccgcctggcggccatcgtggctaaacaggtactgctgggccggaaggtggtggtcgtacgctgtgaaggcatcaacatttctggcaatttctacagaaacaagttgaagtacctggctttcctccgcaagcggatgaacaccaacccttcccgaggcccctaccacttccgggcccccagccgcatcttctggcggaccgtgcgaggtatgctgccccacaaaaccaagcgaggccaggccgctctggaccgtctcaaggtgtttgacggcatcccaccgccctacgacaagaaaaagcggatggtggttcctgctgccctcaaggtcgtgcgtctgaagcctacaagaaagtttgcctatctggggcgcctggctcacgaggttggctggaagtaccaggcagtgacagccaccctggaggagaagaggaaagagaaagccaagatccactaccggaagaagaaacagctcatgaggctacggaaacaggccgagaagaacgtggagaagaaaattgacaaatacacagaggtcctcaagacccacggactcctggtctgagcccaataaagactgttaattccttaaaa

SEQ ID NO: 36087 - DNA, 659 bp, Homo sapiens
taaattcgcggccggtcgacggcggaggtgcaggtcctggtgcttgatggtcgaggccatctcctgggccgcctggcggccatcgtggctaaacaggtactgctgggccggaaggtggtggtcgtacgctgtgaaggcatcaacatttctggcaatttctacagaaacaagttgaagtacctggctttcctccgcaagcggatgaacaccaacccttcccgaggcccctaccacttccgggcccccagccgcatcttctggcggaccgtgcgaggtatgctgccccacaaaaccaagcgaggccaggccgctctggaccgtctcaaggtgtttgacggcatcccaccgccctacgacaagaaaaagcggatggtggttcctgctgccctcaaggtcgtgcgtctgaagcctacaagaaagtttgcctatctggggcgcctggctcacgaggttggctggaagtaccaggcagtgacagccaccctggaggagaagaggaaagagaaagccaagatccactaccggaagaagaaacagctcatgaggctacggaaacaggccgagaagaacgtggagaagaaaattgacaaatacacagaggtcctcaagacccacggactcctggtctgagcccaataaagactgttaattccttaaaa

SEQ ID NO: 36088 - DNA, 699 bp, Homo sapiens
gctcgaccgaagatggcggaggtgcaggtcctggtgcttgatggtcgaggccatctcctgggccgcctggcggccatcgtggctaaacaggtactgctgggccggaaggtggtggtcgtacgctgtgaaggcatcaacatttctggcaatttctacagaaacaagttgaagtacctggctttcctccgcaagcggatgaacaccaacccttcccgaggcccctaccacttccgggcccccagccgcatcttctggcggaccgtgcgaggtatgctgccccacaaaaccaagcgaggccaggccgctctggaccgtctcaaggtgtttgacggcatcccaccgccctacgacaagaaaaagcggatggtggttcctgctgccctcaaggtcgtgcgtctgaagcctacaagaaagtttgcctatctggggcgcctggctcacgaggttggctggaagtaccaggcagtgtctggggcgcctggctcacgaggttggctggaagtaccaggcagtgacagccaccctggaggagaagaggaaagagaaagccaagatccactaccggaagaagaaacagctcatgaggctacggaaacaggccgagaagaacgtggagaagaaaattgacaaatacacagaggtcctcaagacccacggactcctggtctgagcccaataaagactgttaattccttaaaa

SEQ ID NO: 36089 - DNA, 616 bp, Homo sapiens
gctcgaccgaagatggcggaggtgcaggtcctggtgcttgatggtcgaggccatctcctgggccgcctggcggccatcgtggctaaacaggtactgctgggccggaaggtggtggtcgtacgctgtgaaggcatcaacatttctggcaatttctacagaaacaagttgaagtacctggctttcctccgcaagcggatgaacaccaacccttcccgaggcccctaccacttccgggcccccagccgcatcttctggcggaccgtgcgaggtatgctgccccacaaaaccaagcgaggccaggccgctctggaccgtctcaaggtgtttgacggcatcccaccgccctacgacaagaaaaagcggatggtggttcctgctgccctcatctggggcgcctggctcacgaggttggctggaagtaccaggcagtgacagccaccctggaggagaagaggaaagagaaagccaagatccactaccggaagaagaaacagctcatgaggctacggaaacaggccgagaagaacgtggagaagaaaattgacaaatacacagaggtcctcaagacccacggactcctggtctgagcccaataaagactgttaattccttaaaa

SEQ ID NO: 36090 - DNA, 586 bp, Homo sapiens
gctcgaccgaagatggcggaggtgcaggtcctggtgcttgatggtcgaggccatctcctgggccgcctggcggccatcgtggctaaacaggtactgctgggccggaaggtggtggtcgtacgctgtgaaggcatcaacatttctggcaatttctacagaaacaagttgaagtacctggctttcctccgcaagcggatgaacaccaacccttcccgaggcccctaccacttccgggcccccagccgcatcttctggcggaccgtgcgaggtatgctgccccacaaaaccaagcgaggccaggccgctctggaccgtctcaggtcgtgcgtctgaagcctacaagaaagtttgcctatctggggcgcctggctcacgaggttggctggaagtaccaggcagtgacagccaccctggaggagaagaggaaagagaaagccaagatccactaccggaagaagaaacagctcatgaggctacggaaacaggccgagaagaacgtggagaagaaaattgacaaatacacagaggtcctcaagacccacggactcctggtctgagcccaataaagactgttaattccttaaaa

SEQ ID NO: 36091 - DNA, 333 bp, Homo sapiens
aggtcctggtgcttgatggtcgaggccatctcctgggccgcctggcggccatcgtggctaaacaggtactgctgggtaagtcgctgctcgtggcccctctgtcatgggcccccgctggaggtcagtgatgagcaacattcaccatctttcgtttgagtctcacggccatgagatcaaccccatgcaccgctctgagacctgccagccactcttccccagggttggggactccaggctcaagaagtaattatgtattaggctagtttttcatttaaacaggaacttagctctggcaagtactgcgctgtgtctggagggtgactgcataggcag

SEQ ID NO: 36092 - DNA, 468 bp, Homo sapiens
gctagctttgaaacccaactttgccacagaccagcatgttgatggagaggctctcacccacaagcatggagtgggagggtgatttcctgggagaaagaaagccactttctttttggaagccaacgaatgccaagtagatgccaccaaagccagtgatggcttgtgaaagcccagtgtcctgggacaggaaagacaaggggatcccagccaagtctgactgcaatgaggccaaacgttgccccagagcaagacttcatctcccttttcctgacaaaccattgatggctgcgtttcacattaacctagattaaaagtctccttgaaatgtataattgtaattaattattggttcatttgtttgtctcacccccacccccagaatgttacttaatggtatggagggattacctttatctttgtatcatcagagatcaataaatgcatgctgaataaataagtgtgaaataa

SEQ ID NO: 36093 - DNA, 376 bp, Homo sapiens
agagacaagaaggaaagttgggtaaaagcaccctggactatcctgaagtctaatggaagtgcggccaggccactggtgtctttaagccaaagttggcctaaagttgaacaagttctcaggctctcagtgacaggctgccttaggaagcctgcggcacttgataattgtctacaagcggctgttgggaggcttggctctctgccccaattttatgagtgcaaatgaaacaatgcatttcagagtgtggcagctggggccaatagtcaagtagttgaaagtctgcaaggtgcattctcaaggtacacaggagccagtgcgtatgtaatttggcttttcaaaactccatcctagttttgcttagaaaatatttcagaaa

SEQ ID NO: 36094 - DNA, 376 bp, Homo sapiens
ggaggattatgttcagttctttcatcttttttctctgatctatgctgttcttaactaagctcagctctccctgtggcccagccctgatatggatgactggctacctttccctaagagccaactctccagtcaaagggctaaagagttctcttcctctttgggtagttagacagaaatggattcaaattctgccacttccatatgttagctctaagtcacataatctaacatgtatatcctcaattttctgtgaaactaacataacacctaatctgtgggcattaaaatgagataatatgtgaaaaatatgtagcatatacagttaattctcattattttctgtaattatactccataaaaatacctcaaacactga

SEQ ID NO: 36095 - DNA, 404 bp, Homo sapiens
cctcagttgattttctcacttacactcccccacattgaaatgctctcaaagtccagcagcaaattctatcaattacatgtaagtttcattccatacatgtgtccggtgcctggtgggaggttcctatattaaagtcatctaccttccatccattgtctgccttacagccacagtttactcatctgtacaacgaaataacaccactttccttttcctatgcccaaatgagctaaggatgtgaaggtattttgcagaatatagagtgataaagaaaaataaggtgctattacactgtgtgagcatgccgcagaccacaactgcacttgttagactggaggcttatgagaaaaacatctcaccttgtagaaaacatgcatcttactatctctgataacttgtttttc

SEQ ID NO: 36096 - DNA, 372 bp, Homo sapiens
agctccactcgcgtcgacggctgcagaagacagggagtgagaagggtctctgtcccccagggctgcacagaggatggtgtggccaagacagagcaggctacagtggacaggcaagcggcagggctggtgctgagtcactccacagtgtcgaatctactatctgcaggatgccagggacaccagataaagatgtggtccaggccgggcatggtggctcacacctgtaatcccagcactttgggaggttgaggcaggaggatcactcgaggccaggagttcaagaccagcctgggcaatatagcaagccccatctctaattaaaaaaaaaaagtcgacgcggccgcgaatttagtagtagtagtagtagtagta

SEQ ID NO: 36097 - DNA, 301 bp, Homo sapiens
gcaatcatgaaggaagggttggctctgcttagactgaccctgggctacctagtgccaggtgagccttcgcagtcacctagtcgtcttccactggcttactgatgggaaatcaaggccttgatcaggcaagaccctggatacaagagagttccttcccgacccccagctctgagaaacagctgaggcctctaagcatcattaccaagaatgtcttccataagtggggcctcacggaagctgtgaggaggaacaactggatatattctgagcattgattctggaagcatttgtgctggcaaag

SEQ ID NO: 36098 - DNA, 782 bp, Homo sapiens
  misc_feature (712)..(712): n is a, c, g, or t
  misc_feature (771)..(771): n is a, c, g, or t
aagttcggtgggctccaggcgtcgcgatggaggagagcgggtacgagtcggtgctctgtgtcaagcctgacgtccacgtctaccgcatccctccgcgggctaccaaccgtggctacagggctgcggagtggcagctggaccagccatcatggagtggccggctgaggatcactgcaaagggacagatggcctacatcaagctggaggacaggacgtcaggggagctctttgctcaggccccggtggatcagtttcctggcacagctgtggagagtgtgacggattccagcaggtacttcgtgatccgcatcgaagatggaaatgggcgacgggcgtttattggaattggcttcggggaccgaggtgatgcctttgacttcaatgttgcattgcaggaccatttcaagtgggtgaaacagcagtgtgaatttgcaaaacaagcccagaacccagaccaaggccctaaactggacctgggcttcaaggagggccagaccatcaagctcaacatcgcaaacatgaagaagaaggaaggagcagctgggaatccccgagtccggcctgccagcacaggagggctgagcctgcttccccctcccccaggggggaaaacctccaccctgatccctccccctggggagcagttggctgtggggggatccctcgtccagccagcagttgctcccagttcaagattaaacttccaagccanggacccaagccaaggcaacaagggcttggggtcccaagttcctgaaccttgaagcaaangggttttttcc

SEQ ID NO: 36099 - DNA, 260 bp, Homo sapiens
tgtcgaccagggggccagcagttaaccacaaatgagttaagcaggaacgactgggagctacagtgacctggagagatcatgcccaatatacgggcacagccaataatactgagcttaaccaactgctgctcaggaaggtggtctctgaagctgtcagatcttcccactgtcacaaaagccagaaatctggatttttatatgaaacatcttgattttgaactattaacaactaatttaaaagctgataaaacacgtcgacg

SEQ ID NO: 36100 - DNA, 850 bp, Homo sapiens
gtaagataggaagaaaaagtgtggactttggagccagccatactagcttcaaaatctacctcttccacttatcagttgcatgtatttgattttagcgaattattcatagtttcacttttgtttataataggtagataatatagggttgcaatgaggattaaatttgataatacatataaagcttccagctcagttttttatatggagcaactgctcaataaatgttctcatatattgatctgttaatgttaagtcattttgagggttctaatatgtatttaatattctactctataggcatttgcaaatgacagttccctcttcctttatttccttggattgctaaaatagtacaagttttaaatagggttttttgctctagggaggcagcggaatagagttaagaggtgatttgccaagtaaatgaaagatgccttttagtgaaagaagcagaaagcatgactcatggctccagtaataagaacactcactgcttcacgtgagaacccttaagacagggcagttccaggtatggcattatcagggctctggctctctggtgttctcttggctctgccctgctttgtatgctgccccattcctcgggctaattcttcttgtgaccacaagatggcgatagcagttacagatttcactagctcctctcccctgcagaaagctccagaaacaaaaaggggccatctcgcctggtgtgtctttatgagagcaaagaaacctttcccaagagtcccacaactgactttccctcatatcttattggctggaatggttacttgaccatgcctaaagcaatcacagcaaagtgattggcttagaccagttgggaccc

SEQ ID NO: 36101 - DNA, 394 bp, Homo sapiens
gtaatcattccacagcgtaaaaatatatcaaaacttcacattttctcccataaatatatataattattacttgtcaattaaacatttttaaaatgattgtgtttaatcaccaaagatagtgtcttttattcttagtaacaacctccattttggattagaatatttgaattttatagtgaaaataatctacaaaatcagttatgcatttatcagatagtttataacaaaaatggatgcatcacagtcatagctttcttagcacagttttctgaaatgacttaatcccaaagtaatttacaggcagactaaatggatttattatgtataaacatcctcatctcacattatctaagaaaaaaattgatgtttggtaaaaaaaaaaattaattcacaa

SEQ ID NO: 36102 - DNA, 542 bp, Homo sapiens
gatcttggaaaaattggtcacaggtgaatagagtgcaatttatagcatcagaaagaacatagtactccataatatctactccagaacttgttcaggggtatggtagagtatgtttaactaaattcctctgatccctgcttttagccagctttgcctggattggccacatcttagggctgtgtggacctggttcattcccacttagtttataaaagcccatcttattttttggcgtggtgtacatgcttaccaatgaaagttagcttctggattagttctcaagtgaaaaaaattaagatgattcatttgacatgatacttaattttgatgtgactttatttggaactcagatcccaagctaatcaaaaagtaccattaaaagcgacattcttttcccctatcttctagaaagaattaaaaagcagtttcttcttttcctctttagagaagataaagcgaaaaaccaataactgagaaattaacagccacaaaagtttgcaaatggagtctgtgagtttcaaaggctccaaattaaaaaaaaa

SEQ ID NO: 36103 - DNA, 1455 bp, Homo sapiens
actctcatctctgatgtatcatcgtatacgtccgaaatgagctgcactaagtgtactgatggcctgttttgtcagggtgccatcttctgatttctcgtaattccatgatcgggttccgagacagctacttctgcagatcatggagcaattgtcatacccctgtgtgaagttgttctcccacaaaggtaactaaatagtccttgtcagatttgaaatgaagtagccatcgcctttctcatactacattttactctcgtatcgtttctgaccacttgtgttgcactgctggtcagcccagaggaagattgctgaaaatatgccagttgcagggacatctctacacacagaaaacaagaacataatactcaatatataaatacatatgtgtgcacacacatgcaccttatgctttgtggacagctttcataaagaccttgcagtgaagaaatgttttctgtatatttttcatcctactctttgaactcaagatacatgaatttgcctaccatatactattcagtgtaattttaatgagtataatgtaaataatatttgacattttaaccccaatgcatcattaagatgcattaaaatgatgctgtatataattgtcataataggtggttatcctattatttagagaataaatttttatgagagaaaaaaataaagctattgaaactataatatgacttactaatggcaggtcctgtgaaatgaaaagttttgcaatatagaaaaatattgtgttttctcctcatgtttctttgccgaaaggtacactttatcaattgtagtttattactaaagacttggaattccaactccaggaccctttccttctctacagaaatgccagtttgaattgtttatagtttgaattgttttgtgtgcttatagttatgtcagggttttttttgagattattagattttatgtcaaattaatatataatttaagtcctaataaaataactacaaagttacctgtaatcatcacttttggttgcttttattttggataaatacatggtctgatcagttataggtaatattttattttaaattcttattatagatcacatattaactactataccaaaaatataaaaacacaaactctctttaatgcatcaatttaaaaaataaccttcttaagtcccacagggtttatctgatagaaaatactatttagatctaataaacatacaccttggttctaagcgtgtgctgtccactatgatagtcactaactactgtggccgtttagtacctgaagtgtggctagtctaaacggagctgcactgtgagtgtccaacaggcaccaactgtcagacagtgcaaaaaaaaaaggaaaaaacctcaattattaattattttatattaacatgttgaaatgacaatattttggataaattgggcaaaataaaatatattattaatttcacttgcttct

SEQ ID NO: 36104 - DNA, 729 bp, Homo sapiens
ttagtgaggagactgcagagacacacacataggtggctccctgaacgaagaattaacgagtctgctatggcactttttctttatgtatcacttttggccgagtgagctgacaaagtgtttgagggcctgtattgtaggagtgccatcttctgaatacaagtaaataaaaaatcaaagtccaaaaagtttctttcagtcattaagaatttaataaccctttgtaatgtggaagtcgtagtaggtaactaaatagtccttgtcagatttgaaatgaagtagccatcgcctttctcatactacattttactctcgtatcgtttctgaccacttgtgttgcactgctggtcagcccagaggaagattgctgaaaatatgccagttgcagggacatctctacacacagaaaacaagaacataatactcaatatataaatacatatgtgtgcacacacatgcaccttatgctttgtggacagctttcataaagaccttgcagtgaagaaatgttttctgtatatttttcatcctactctttgaactcaagatacatgaatttgcctaccatatactattcagtgtaattttaatgagtataatgtaaataatatttgacattttaaccccaatgcatcattaagatgcattaaaatgatgctgtatataattgtcataataggtggttatcctattatttagagaataaatttttatgagagaaaaaaataaagc

SEQ ID NO: 36105 - DNA, 266 bp, Homo sapiens
tttcttggaatttctgaaggcaggcaagcctgtatagccgggctaactttcacctcatcctcctgcctcgtctcacctctcccttcccttttccttgcctgtggatgctgacctctgcatgggtgcctgcttctctaaagctacgatgtaatctgtagctgtccttcctcgtttgagacccacatgtgaacaccccatatgtgtgcactttttctgcgaatggtgatcatctgattttcaaggggttctttagcttgttttttaaa

SEQ ID NO: 36106 - DNA, 434 bp, Homo sapiens
attttccaggttactcatgaaggcagcagttcctacagcatgattatggtaggattataaagttttgcaactgaaagggatcatgaaaagtatagcctagcccccattttcaggtgtggatagtggagctcagagaggtttgatggcctacagagtcatacagctggattcagtgtgacttagagacagacagctctgtcatctagatccttctggatccttctagatccttcctgtggctgatggtacacacagatcaccggaggtcttgtcagaacgcacgttctgatccaggaagtttggggcaaggcctgagactctgcatttctacagtgatgctgatgctatagcacactttggttttggagtacatttcccaaaattggtttgactttgatatacttatgtaaaagacccttcagtaaaaaaaaaaa

SEQ ID NO: 36107 - DNA, 223 bp, Homo sapiens
agggaagaaatcattcaaagattggaaagacttatgtgtagtattctgtatactaaagggtatcaaatttagttgtcagttgatagcaatttaatttcttgatacatggcatacactggaatcttatgatgaattatttaggggacctgtgccacaaagtctactagaataaacctatcctaaacttaatcctgttagaatttccttcttttgaactctgttt

SEQ ID NO: 36108 - DNA, 851 bp, Homo sapiens
aaaaggccggcggaacagccagaggagcagagaggcaaagaaacattgtgaaatctccaactcttaaccttcaacatgaaagtctctgcagtgcttctgtgcctgctgctcatgacagcagctttcaacccccagggacttgctcagccagatgcactcaacgtcccatctacttgctgcttcacatttagcagtaagaagatctccttgcagaggctgaagagctatgtgatcaccaccagcaggtgtccccagaaggctgtcatcttcagaaccaaactgggcaaggagatctgtgctgacccaaaggagaagtgggtccagaattatatgaaacacctgggccggaaagctcacaccctgaagacttgaactctgctacccctactgaaatcaagctggagtacgtgaaatgacttttccattctcctctggcctcctcttctatgctttggaatacttctaccataattttcaaataggatgcattcggttttgtgattcaaaatgtactatgtgttaagtaatattggctattatttgacttgttgctggtttggagtttatttgagtattgctgatcttttctaaagcaaggccttgagcaagtaggttgctgtctctaagcccccttcccttccactatgagctgctggcagtgggtttgtattcggttcccaggggttgagagcatgcctgtgggagtcatggacatgaagggatgctgcaatgtaggaaggagagctctttgtgaatgtgaggtgttgctaaatatgttattgtggaaagatgaatgcaatagtaggactgctgacattttgcagaaaatacattttatttaaaatctccta

SEQ ID NO: 36109 - DNA, 830 bp, Homo sapiens
aaaaggccggcggaacagccagaggagcagagaggcaaagaaacattgtgaaatctccaactcttaaccttcaacatgaaagtctctgcagtgcttctgtgcctgctgctcatgacagcagctttcaacccccagggacttgctcagccagatgcactcaacgtcccatctacttgctgcttcacatttagcagtaagaagatctccttgcagaggctgaagagctatgtgatcaccaccagcagcttcagaaccaaactgggcaaggagatctgtgctgacccaaaggagaagtgggtccagaattatatgaaacacctgggccggaaagctcacaccctgaagacttgaactctgctacccctactgaaatcaagctggagtacgtgaaatgacttttccattctcctctggcctcctcttctatgctttggaatacttctaccataattttcaaataggatgcattcggttttgtgattcaaaatgtactatgtgttaagtaatattggctattatttgacttgttgctggtttggagtttatttgagtattgctgatcttttctaaagcaaggccttgagcaagtaggttgctgtctctaagcccccttcccttccactatgagctgctggcagtgggtttgtattcggttcccaggggttgagagcatgcctgtgggagtcatggacatgaagggatgctgcaatgtaggaaggagagctctttgtgaatgtgaggtgttgctaaatatgttattgtggaaagatgaatgcaatagtaggactgctgacattttgcagaaaatacattttatttaaaatctccta

SEQ ID NO: 36110 - DNA, 1249 bp, Homo sapiens
aaaaggccggcggaacagccagaggagcagagaggcaaagaaacattgtgaaatctccaactcttaaccttcaacatgaaagtctctgcagtgcttctgtgcctgctgctcatgacagcagctttcaacccccagggacttgctcagccagatgcactcaacgtcccatctacttgctgcttcacatttagcagtaagaagatctccttgcagaggctgaagagctatgtgatcaccaccagcaggtgtccccagaaggctgtcatcttcagaaccaaactgggcaaggagatctgtgctgacccaaaggagaagtgggtccagaattatatgaaacacctgggccggaaagctcacaccctgaagacttgaactctgctacccctactgaaatcaagctggagtacgtgaaatgacttttccattctcctctggcctcctcttctatgctttggaatacttctaccataattttcaaataggatgcattcggttttgtgattcaaaatgtactatgtgttaagtaatattggctattatttgacttgttgctggtttggagtttatttgagtattgctgatcttttctaaagcaaggccttgagcaagtaggttgctgtctctaagcccccttcccttccactatgagctgctggcagtgggtttgtattcggttcccaggggttgagagcatgcctgtgggagtcatggacatgaagggatgctgcaatgtaggaaggagagctctttgtgaatgtgaggtgttgctaaatatgttattgtggaaagatgaatgcaatagtaggactgctgacattttgcagaaaatacattttatttaaaatctcctaaaaaaaaaagttttcttcaggagtaactgccaaccagtaggggctctcagaggtgtgggtggatggcatgccagtggaaggcagatgtacagaggccctggccatggggctagcctggctcatctgagtttcaaggagggcctgcctcaccagcccaggctgttctggaacaatggctccagtccccagcatgggcgctcctggctcgcaactcatccgtttcatattcagttcatttctttctttaaaaccacactcctgccaaaagtaaacccatccctccccctctagtctcccaccccaatctatgcctccccactccaagcagcaagtgattcagacttcatgtgcacctgacactcagagggaaaccagatgaccaagtcctagtgagcctc

SEQ ID NO: 36111 - DNA, 402 bp, Homo sapiens
gaaagctactataaaataacagattagatactttttaaggatcacttatagtaaatctagaaatggaaaaaaaaaatcacagagacagaatttgtttagcgctaagtgcaaatgctgctgagatgttagtggactgaggctcagaatttaagcactgcagctgttctccagcggcctagggctgctgtcttctgcagcgctcccatcctcggccttcctgccctgacctgtcttcagaagtgcctggcgaaggcagcgatggcgaccacctgcaagatggcctccaggccgtggagctccaggagtgtggcgctgagggcccagtccgcccacgacaccagggtctgccaaagcaggaagtgggcagagaggaggacggtgccggccgtgatggccaagctg

SEQ ID NO: 36112 - DNA, 357 bp, Homo sapiens
gagagactaaagaagtttgcatttccccagtattatttttatattatttaaattaattattctgagcttatttaggaaagactagaagctttcactaatagaacgtataagtatctccaaaatgtaagggcttcattaatctgttaaaggaaaacaattataacaatttataacactttgttgttagataaaagaaaacaggatttcacagataacatgactatgttttttgtccgcaactgaaatttgaggcactaaggtattcaataaatcagtaaattagagttttggataatagttgatatagattgaaaattttgagtcaggaaatcaattcaaataggtgtgaataaatta

SEQ ID NO: 36113 - DNA, 375 bp, Homo sapiens
ccttctgtcacccaggctggagtgcagtggcacaatcttggttcaccgcaagctctgcctcctgggttacaccattctcctgcctcagcctcccaagtagctgggactacaggcgcccgccaccacacctggctcattttttttttgcatttttagtagagacggggtttcaccgtgttagccaggatggtcttgatctcctgacctcgtgatccgcccgccttggcctcccaacgtgctgggattacaggcgtgagctagcgtgcccagctgacaagcttgagagtttttaaacaagggccccaagcaaatttactgtcaggcaagtttgtgaaattctattatcacattagataattgatactcagttttaca

SEQ ID NO: 36114 - DNA, 475 bp, Homo sapiens
ttctaaaactgaccagtgctcattagacagatggccactcatgtgaaaattgatttgtgcataaatgtaaggaatatgtgctctcattgggtaatctcatctgcttttgtggttggggaatggcatgccttttaaaaaaactaaaaccaatatagttactttatttggctgattttgaatgattattctgttttgataaaaatatatttaaaacattcagaactgaaaagcacagacaacaaattatgtaaacattaaaaacctgaaaatacacatacttacagttaatatttgaacattaaaaagaaaacttttagcttcaggggtatatgtgcaagtttgttatataggtaaattgcgagtcatagggttttggtgtatggattattttgttacccagataataagcattgtacttgataggtagtttcccggtcctcaccctttttccacgttgtgccctcaggtaggttct

SEQ ID NO: 36115 - DNA, 445 bp, Homo sapiens
actagagtgggaggagagttgctgaagccaaggtttcttctgtgtggccagacatgcagccagagacagctttgggacctggaactggtctgtgagtgtcattgctcagtgttctagtctgctcccttggtcagttgggggacagtgcccaccaggtctgagaggcagaagggaagcacagtccacttacctggagatctactcctcagttcaaaccacaccaaaggaggggatagcacagtctgccaaaggccctcttgggtcaaagaaaacgtgaaactgcaccagctactgaaggtggcaccaccaaaactcaagaatagatgtagagagggggttatctcttgccaaccccctcagtgcattgtcacagacttggtagtgcctcttcccatcagggcctggggagcctgggctaagatggttgagtttgcttttccagctt

SEQ ID NO: 36116 - DNA, 342 bp, Homo sapiens
ctcaagcaagtcacctcacctctctgggcttttcacataaaataacccagagacatgtcgcacatgcttttcagcctgatttacctgtcccatagcaccagtttacagcagagttgagcctaagcccgcggttttgcctggcatagggttggtccgctgaggaactcgggagcattttacatggattacagcgccacctattgggaaaaagtagactatgaaaaatgacaagataaagggatcggtgtgggatttttgctgaaaaaacgagagtaacaacagtatggatctagaaaaatttctgaagttcacgtcatatttatatttattgagaagtgtcca

SEQ ID NO: 36117 - DNA, 405 bp, Homo sapiens
gaaaatgtgagaaatcagaaaggttgcaatttcatggtacaagctccttgagcacaatgacatgattttgcaaactatttctagggtaagaaataatatcttttaaatttgtggcaaaatctgctgtaatgggagattactgcagtgatggacggctttatagaaacacagttatatgtactttattaaaccatgtagcaggaaaaaaacatgatggcactcaagaagttgaattccagccgctttcaatttctgggtacatataacctttttgttagcacctctaagacactgagtttattatcaaaatgacaagagcatttgacaaaacgacctttggttccaagacttctaggatctgtcaaacatcttgtgggtagccagtctccaagatgaccccagtgg

SEQ ID NO: 36118 - DNA, 439 bp, Homo sapiens
taaagcaatttggattctcctattaattttacatagagaaattacgttggtatatcttgagataggaaggtacaaaatcaggacaggcttattctgccaggcccaatgtggcacatctgttttataagtaaacagaagttgaaattttatcttagataaagttcatcaaattttacttttgctaatacatgtaatcacctcagctatatagtttaagtattcaatgacagtaaactagtaagtattcttaataaactataaactgttaagtatttaactataactatctaagaaactcttaagtatttttaagcatggagattgatccccttcagggactatgaataataacttacacatttcatcttcagtccatctccccattatccacctaacactgccttgaacatggaggggaaaaaaaagtgttaatttaaga

SEQ ID NO: 36119 - DNA, 375 bp, Homo sapiens
atttgtttatttcccatttgccttgtattttatgcaggcaggactgttaatgaagtgaattaccaagccagcaatgctttgaattacgatggcgttgcagtattgaattgtgaaactgtgaccagtaggcaccaataggattgtgtctcctatgcctcttcttaaatcagagagggtatctttttaaataaaaactcagaataggtttagttgcgcaaactaaaatcacagaagatacgtggaaacaaatgagaggatctgggatagaagtgaaggtgacggaatgaagtcttggggaccaaacagggtcttcagagtcagcaaggccagtctctgaatctgggctccactctctgactttagctcttgagcttt

SEQ ID NO: 36120 - DNA, 266 bp, Homo sapiens
ggagagagtaagttatcaaggaaataattcaagaaaatttcagaaaactgcaaggacatgcattttatattgaaaaggtccattgaacgctcagcataatagatgcagaaggatctacccatcctgaagcttcctggtgtgacattgcaaaatatttgggataaagagaagattgttaaagctttcagaaaaaaaggggcaaatcaggttacatacccaaagttaagaatcaaaagcatcaaacttcttgccaacactgttgaaac

SEQ ID NO: 36121 - DNA, 494 bp, Homo sapiens
atcaatttcttggtactcacgagaagaaaaaaaagttcatgtttttcccccagtcttgtattttaacataagttctgaattgtctcaaaattcacactagctttttgagtttgattgcccagagtagcagcactccctcatttgctgccttatttaattttttttttccttttctccatccctatttcagaggacagaatagaaagaaaaggagcatgaatatttaacatccctatagatttcatagtgagtgggggaggaagtaacactgcagaatccagagttcccaggccatgctgactgatgctgtggcttcaaacagaattgggaggcttctgttttggatgcctagaaattgcataagggtcaaaaggctgggcgcagtggctcacgcctgtaatcccagcactttgggaggccaaggcaggtggaacacgaggtcaagagaccatcctggccaatgtggtgaaaccccatctctactaaaaatacaa

SEQ ID NO: 36122 - DNA, 319 bp, Homo sapiens
gagctggtgggcatggaatgttaagaaggccaggggtcataatctcacccagccaccgcagcacaacaatgactggcttaaacaacgaaaaactgcatctatgatcttagcaacaacattcagtaacattaggtatcaccagggaggaggacgccacctccctggtgatagctgattggaccagagggaagccccagtcccagggcagccaatcagcagcctgcaagcagccaatgagatggcctggagggggagttctgcccaatcacaataccaataaataagaggtccaggctggatctctgtcttggagatttga

SEQ ID NO: 36123 - DNA, 100 bp, Homo sapiens
ttcatcatccccaaaagaaaccattagcatcagtactcattagcagtcactctcccatctgctctgccttccctctaatccccagccctaggccaccatt

SEQ ID NO: 36124 - DNA, 474 bp, Homo sapiens
ttttaaagtgctgttcaaggcatatgcctctagtaggttcaccttgattgcttagacacaagagctcctgagacattaaacactggagtagatcttgggagagctcagaaccacatataagtgagtataagtttccccttcctcattctccagtgaacattcatggcagtgttcattggctcaaaccggcatgtgtgtgatgacttaggattcagtgacgtttgatgatgtggctgtggagttcaccccagaggagtgggctttactggacacaactgagaaatgcctctacagagatgtgatgttggagaactatgtgaacctggcctctgtgggtaagagtaacatcattttgcttggcatggtgccctgcacctgtagtcccagatacttgggaggctgaggtgggagaagtgcttgagtgtgggagtttgatattagcatggacagtattgtgagaccgcatctctaaaa

SEQ ID NO: 36125 - DNA, 544 bp, Homo sapiens
taaaaatgatctgaaatttattctcttggggataaaatttattgtatatattatatatataatataattcttgttatgtatgtgtatatatataattatttgtgtatatatgtgtatatatataattatttttattgcgtgctactattccaagccagatgctaagtgctggggacacatgtaagcaagttaaactggcccctcgccagatgaaacttagtttgcagttggtgaaacagacattacagagataattgtgcagttgcttatttagttacaaccatgaagaatactctgaagggcaaagacaatgtgtaacagagtcctgtcctaatcctggcggttagagatagtgtagttaaggagatgatatttaagcttaaaaacagaacttagggaagctggtcagcccagggcttgggcttgaggaagagaagggcatttcacatagaaggagctgtgtgggcaaaggctctggaaccattttgtactatgagaaatccaaaaagaaaaagatttaaaaaggaaggggtggtcagtagca

SEQ ID NO: 36126 - DNA, 566 bp, Homo sapiens
gcaccctctccaaaggctgccacctccaggaaggacacctggacaattcaccagctcactgctctgcccctccccgctctgcccctcccccaaatgcctggccctccccatgcaggacccgcacagactgggtccccttcccggggctctgagtggtgggggtgacgagagtggaggagctgctggggccctgtgtgtgtgggctggggacaggggagggcatcctggggatggggatccttgggccaggctgctagtcagtggccccaaggcagcccctccccactgcttccccataggcagaggcagccgggaacctggcagtggtggcctttctacagagcctggagggtgcggttggtgcccaggccccatgcccagaagtgctgcctggtgtctaacctgaaggcgtcctgctgcagtataagccattccttcctcccatgacctgctggaggggtctcaggcatgaccccactgctggggctgcttcccagcctgctctcatgtaaagcctgaaggcctttgttgggcaggacggcaataaagtctctgacatcccctca

SEQ ID NO: 36127 - DNA, 1154 bp, Homo sapiens
cccaccccaccgccccacaggttcgggccttcttgcagcctcccctgaagggcgtggtcatggagaccttcggttcagggaacggacccaccaagcccgacctgctgcaggagctgcgggtggccaccgagcgcggcctggtcatcgtcaactgtacccactgcctccagggggctgtgaccacagactatgcagctggcatggccatggcgggagccggcgtcatctcaggcttcgacatgacatcggaggccgccctggccaagctatcgtatgtgctgggccagccagggctgagcctggatgtcaggaaggagctgctgaccaaggaccttcggggggagatgacgccaccctcggtggaagagcgccggccctcactgcagggcaacacgctgggcggtggggtctcctggctcctcagtctgagcggcagccaggaggcagatgccctgcggaatgccctggtgcccagcctggcctgtgctgctgcccacgccggtgacgtggaggcgctgcaggcgcttgtggagctgggcagtgacctgggcctggtggactttaacggccaaaccccactgcacgcggccgcccggggaggccacacagaggcagtcaccatgctgctgcagagaggtgtggacgtgaacacccgggacacggatggcttcagcccgctgctgctggccgtgcggggcaggcatccgggtgtcattgggttgctgcgggaagccggggcctccctgtccacccaggagctggaggaagcagggacggagctgtgcaggctggcatacagggccgacctcgaaggcctgcaggtgtggtggcaggcaggggctgacctggggcagccgggctatgacgggcacagcgccctgcacgtcgcagaggcagccgggaacctggcagtggtggcctttctacagagcctggagggtgcggttggtgcccaggccccatgcccagaagtgctgcctggtgtctaacctgaaggcgtcctgctgcagtataagccattccttcctcccatgacctgctggaggggtctcaggcatgaccccactgctggggctgcttcccagcctgctctcatgtaaagcctgaaggcctttgttgggcaggacggcaataaagtctctgacatcccctca

SEQ ID NO: 36128 - DNA, 920 bp, Homo sapiens
tgccttctcagactgcatggagacctgaggctcccctaactgtcgccaggaaatcctctcctgctctccactcttcctcgaggctgctgaccaaggaccttcggggggagatgacgccaccctcggtggaagagcgccggccctcactgcagggcaacacgctgggcggtggggtctcctggctcctcagtctgagcggcagccaggaggcagatgccctgcggaatgccctggtgcccagcctggcctgtgctgctgcccacgccggtgacgtggaggcgctgcaggcgcttgtggagctgggcagtgacctgggcctggtggactttaacggccaaaccccactgcacgcggccgcccggggaggccacacagaggcagtcaccatgctgctgcagagaggtgtggacgtgaacacccgggacacggatggcttcagcccgctgctgctggccgtgcggggcaggcatccgggtgtcattgggttgctgcgggaagccggggcctccctgtccacccaggagctggaggaagcagggacggagctgtgcaggctggcatacagggccgacctcgaaggcctgcaggtgtggtggcaggcaggggctgacctggggcagccgggctatgacgggcacagcgccctgcacgtcgcagaggcagccgggaacctggcagtggtggcctttctacagagcctggagggtgcggttggtgcccaggccccatgcccagaagtgctgcctggtgtctaacctgaaggcgtcctgctgcagtataagccattccttcctcccatgacctgctggaggggtctcaggcatgaccccactgctggggctgcttcccagcctgctctcatgtaaagcctgaaggcctttgttgggcaggacggcaataaagtctctgacatcccctca

SEQ ID NO: 36129 - DNA, 824 bp, Homo sapiens
tgccttctcagactgcatggagacctgaggctcccctaactgtcgccaggaaatcctctcctgctctccactcttcctcgaggctgctgaccaaggaccttcggggggagatgacgccaccctcggtggaagagcgccggccctcactgcagggcaacacgctgggcggtggggtctcctggctcctcagtctgagcggcagccagggcagtgacctgggcctggtggactttaacggccaaaccccactgcacgcggccgcccggggaggccacacagaggcagtcaccatgctgctgcagagaggtgtggacgtgaacacccgggacacggatggcttcagcccgctgctgctggccgtgcggggcaggcatccgggtgtcattgggttgctgcgggaagccggggcctccctgtccacccaggagctggaggaagcagggacggagctgtgcaggctggcatacagggccgacctcgaaggcctgcaggtgtggtggcaggcaggggctgacctggggcagccgggctatgacgggcacagcgccctgcacgtcgcagaggcagccgggaacctggcagtggtggcctttctacagagcctggagggtgcggttggtgcccaggccccatgcccagaagtgctgcctggtgtctaacctgaaggcgtcctgctgcagtataagccattccttcctcccatgacctgctggaggggtctcaggcatgaccccactgctggggctgcttcccagcctgctctcatgtaaagcctgaaggcctttgttgggcaggacggcaataaagtctctgacatcccctca

SEQ ID NO: 36130 - DNA, 1172 bp, Homo sapiens
cccaccccaccgccccacaggttcgggccttcttgcagcctcccctgaagggcgtggtcatggagaccttcggttcagggaacggacccaccaagcccgacctgctgcaggagctgcgggtggccaccgagcgcggcctggtcatcgtcaactgtacccactgcctccagggggctgtgaccacagactatgcagctggcatggccatggcgggagccggcgtcatctcaggcttcgacatgacatcggaggccgccctggccaagctatcgtatgtgctgggccagccagggctgagcctggatgtcaggaaggagctgctgaccaaggaccttcggggggagatgacgccaccctcggtggaagagcgccggccctcactgcagggcaacacgctgggcggtggggtctcctggctcctcagtctgagcggcagccaggaggcagatgccctgcggaatgccctggtgcccagcctggcctgtgctgctgcccacgccggtgacgtggaggcgctgcaggcgcttgtggagctgggcagtgacctgggcctggtggactttaacggccaaaccccactgcacgcggccgcccggggaggccacacagaggcagtcaccatgctgctgcagagaggtgtggacgtgaacacccgggacacggatggcttcagcccgctgctgctggccgtgcggggcaggcatccgggtgtcattgggttgctgcgggaagccggggcctccctgtccacccaggagctggaggaagcagggacggagctgtgcaggctggcatacagggccgacctcgaaggcctgcaggtgtggtggcaggcaggggctgacctggggcagccgggctatgacgggcacagcgccctgcacgtcgcagaggcagccgggaacctggcagtggtggcctttctacagagcctggagggtgcggttggtgcccaggccccatgcccagagccctcatgttttcaggaagtgctgcctggtgtctaacctgaaggcgtcctgctgcagtataagccattccttcctcccatgacctgctggaggggtctcaggcatgaccccactgctggggctgcttcccagcctgctctcatgtaaagcctgaaggcctttgttgggcaggacggcaataaagtctctgacatcccctca

SEQ ID NO: 36131 - DNA, 1054 bp, Homo sapiens
cccaccccaccgccccacaggttcgggccttcttgcagcctcccctgaagggcgtggtcatggagaccttcggttcagggaacggacccaccaagcccgacctgctgcaggagctgcgggtggccaccgagcgcggcctggtcatcgtcaactgtacccactgcctccagggggctgtgaccacagactatgcagctggcatggccatggcgggagccggcgtcatctcaggcttcgacatgacatcggaggccgccctggccaagctatcgtatgtgctgggccagccagggctgagcctggatgtcaggaaggagctgctgaccaaggaccttcggggggagatgacgccaccctcggtggaagagcgccggccctcactgcagggcaacacgctgggcggtggggtctcctggctcctcagtctgagcggcagccaggaggcagatgccctgcggaatgccctggtgcccagcctggcctgtgctgctgcccacgccggtgacgtggaggcgctgcaggcgcttgtggagctgggcagtgacctgggcctggtggactttaacggccaaaccccactgcacgcggccgcccggggaggccacacagaggcagtcaccatgctgctgcagagaggtgtggacgtgaacacccgggacacggatggcttcagcccgctgctgctggccgtgcggggcaggcatccgggtgtcattgggttgctgcgggaagccggggcctccctgtccacccaggagctggaggaagcagggacggagctgtgcaggcagaggcagccgggaacctggcagtggtggcctttctacagagcctggagggtgcggttggtgcccaggccccatgcccagaagtgctgcctggtgtctaacctgaaggcgtcctgctgcagtataagccattccttcctcccatgacctgctggaggggtctcaggcatgaccccactgctggggctgcttcccagcctgctctcatgtaaagcctgaaggcctttgttgggcaggacggcaataaagtctctgacatcccctca

SEQ ID NO: 36132 - DNA, 170 bp, Homo sapiens
agacctgaggctcccctaactgtcgccaggaaatcctctcctgctctccactcttcctcgagggtggggttcagacacagctggccccagacccttgggttgccagcctctggggctggacggaggcttttggggcccctggagaccctgagctggtagggccagggagt

SEQ ID NO: 36133 - DNA, 673 bp, Homo sapiens
actgcgctcggcctcattttatttctcttctctggacattttccatcttaatactttcatcttgagatttgacacttaggactgcacagggcattttaggtgtggacagctttgattttgtactaaaaatgattacacttggcttgatttccatttctcttccttctgttgcttgcctttctacatggtttagactgaagcaacagtgtactaatatcactagtaaaccatctacagtgcctgctattctagggtgtaactgagagctcagaactcattctcacatcaggatttgtgctcctagcatttgtaggtgacgtgttgatctaggtctgccttttttgtgttcatgttagtcactaacaaggggggtttctagtgcttatggaccacatggcaattaaatgcccatatattgccctgaaaccatctggtttaacttgtccctcaatcctagaagaaacctgacaatgggattttcacatttctctaaggaatatgttagtaagttattccttaagcacatagattccatccagattattagtgcctttttccccccagctcaattttagagataaaaagagctttagacatggtattgtacactcaccaaacctctgttttatccctaaatagaccaagagagattaccaagtctcccaaggttaca

SEQ ID NO: 36134 - DNA, 4485 bp, Homo sapiens
cccggccggactgagttcgctgctgtcccggttcctctcgagtcggctccaactgccagcccgggttggcgccatgtacgccgtgtacaaacaggcgcatccgcccaccggtctggagttctccatgtactgcaacttcttcaacaacagcgagcgcaacctggtagtggccgggacctcgcagctctacgtgtaccgcctcaaccgcgacgccgaggctctgaccaagaatgacaggagcacagaggggaaggcccaccgggagaagctcgagcttgctgcctccttctccttctttggcaacgtcatgtccatggccagcgtgcagctggcaggagccaagcgggatgccctgctcctaagcttcaaggatgccaagctgtctgtggtggagtacgacccgggcacccatgacctgaagaccctgtcactgcactactttgaggagcctgagcttcgggacgggtttgtgcagaatgtacacacgccgcgagtgcgggtggaccccgacgggcgctgtgcagccatgcttgtctacggcacgcggctggtggtcctgcccttccgcagggagagcctggctgaggagcacgaggggctcgtgggtgaggggcagaggtccagcttcctgcccagctacatcatcgacgtgcgggccctagacgagaagctgctcaacatcatcgacctgcagttcctgcatggctactacgagcctaccctcctcatcctgtttgagcccaaccagacctggcctgggcgcgtggccgtgcggcaggacacgtgctccattgtggccatctcactgaacatcacgcagaaggtgcaccccgtcatctggtccctcaccagcctgccctttgactgcacccaggctctggctgtgcccaagcccataggtggggtggtggtgtttgccgtcaactcgctgttgtacctgaaccagagcgtccccccgtatggcgtggctctcaacagcctcaccacaggaaccacggctttcccgcttcgcacccaggagggtgtgcggatcaccctggactgcgcccaggccaccttcatctcctacgacaagatggtcatctccctcaagggcggcgagatctacgtgctgaccctcatcaccgacggcatgcgcagtgtccgagcgttccactttgacaaggcggccgccagcgtcctcaccaccagcatggtcaccatggagcccgggtacctgttcctgggttctcgcctgggcaattccctcctcctcaagtacacggagaagctgcaggagcccccggccagtgctgtccgtgaggctgccgacaaggaagagcctccctcaaagaagaagcgagtggatgcgacggccggctggtcagctgcgggtaagtcggtgccgcaggatgaggtggacgagattgaagtgtacggcagcgaggcccagtcgggaacacagctggccacctactcctttgaggtgtgtgacagcatcctgaacattggaccctgtgccaatgccgccgtgggcgagcctgccttcctctctgaagagtttcagaacagccccgagccggacctggagattgtggtttgctccggccacgggaagaacggggctttgtcggtgctgcagaagagcatccggccccaggtggtgacaacctttgagcttcccggctgctatgacatgtggacagtcatcgccccggtgcgtaaggaggaggaggacaatcccaagggggagggcacagagcaggaacccagcaccacccctgaagcagacgacgacggccgcagacacggattcctgattctgagccgggaagactccaccatgatcctgcagacggggcaggagatcatggagctggacaccagtggcttcgccactcagggccccacggtctttgctgggaacatcggggacaaccgctacattgtccaagtgtcaccactgggcatccgcctgctggaaggagtgaatcagctgcacttcatccccgtggacctgggcgcccccatcgtgcagtgcgccgtggccgacccctatgtggtcatcatgagtgccgagggccacgtcaccatgttcctgctgaagagtgactcctacggtggccgccaccaccgcctggcgctgcacaagcccccgctgcaccatcagtccaaggtgattacgctgtgcctgtaccgagacctcagcggcatgttcaccactgagagccgcctgggtggggcccgtgacgagctcgggggccgcagtggcccggaggccgagggcctgggctcagagactagccccacagtggatgacgaggaggagatgctgtatggggattcgggctccctcttcagccccagcaaggaggaggcccgaagaagcagccagccccctgctgaccgggaccctgcacccttccgggcagagcctacccactggtgcctgctggtgcgggagaatggcaccatggagatctaccagcttcccgactggcggctggtgttcctggtgaagaacttccctgtggggcagcgggtccttgtggacagctcctttggacagcccactacacagggcgaggcccgcagggaggaggccacgcgccagggggagctgcccctcgtcaaggaggtgctgctggtggcgctgggcagccgccagagcaggccctacctgctggtgcatgtggaccaagagctgcttatctacgaggccttcccccacgactctcagctcggccagggcaatctcaaagtccgctttaagaaggtccctcacaacatcaacttccgtgagaagaagccaaagccatccaagaagaaagcagaaggtggcggcgcagaggagggggctggggcccggggccgcgtggcgcgtttccgctacttcgaggatatttatggctactcaggggtcttcatctgcggcccctcccctcactggctcttggtgaccggccgaggggctctgcggctacaccccatggccatcgacggcccggtcgactctttcgctccattccacaatgtcaactgtccccgcggcttcctgtacttcaacagacagggcgagctgaggatcagtgtcctgcctgcctacctgtcctatgatgccccatggcctgtcaggaagatcccgctgcgctgcacggcccactatgtggcttaccacgtggagtctaaggtgtatgctgtggccaccagcaccaacacgccgtgtgcccgcatcccacgcatgactggcgaggagaaggagtttgagaccatcgagagagatgagcggtacatccacccccagcaggaggccttctccatccagctcatctccccggtcagctgggaggctattcccaatgccaggatcgagctgcaggagtgggagcatgtgacctgcatgaagacagtgtctctgcgcagtgaggagaccgtgtcgggcctcaaaggctacgtggccgccgggacctgcctcatgcagggggaggaggtcacgtgccgagggcggatcttgatcatggatgtgattgaggtggtgcccgagcctggccagcccttgaccaagaacaagttcaaagtcctttacgagaaggagcagaaggggcccgtgaccgccctgtgccactgcaatggccacctggtgtcggccatcggccagaagattttcctgtggagcctgcgggccagcgagctgacgggcatggccttcatcgacacgcagctctacatacaccagatgatcagcgtcaagaacttcatcctggcagccgacgtcatgaagagcatttcgctgctgcgctaccaggaggaaagcaagacgctgagcctggtgtcgcgggatgccaagcccctggaggtgtacagcgtggacttcatggtggacaatgcccagctgggttttctggtgtctgaccgcgaccgcaacctcatggtgtacatgtacctgcccgaagccaaggagagtttcgggggcatgcgcctgctgcgtcgggcagacttccacgtgggtgcccacgtgaacacgttctggaggaccccgtgccgggccactgaagggctcagcaaaaagtcggtcgtgtgggagaataagcacatcacgtggtttgccaccctggacggcggcatcgggctgctgctgcccatgcaggagaagacctaccggcggctgctgatgctgcagaacgcgctgaccaccatgctgccacaccacgccggcctcaacccccgcgccttccggatgctgcacgtggaccgccgcaccctccagaatgccgtgcgcaacgtgctggatggggagctgctcaaccgctacctgtacctgagcaccatggagcgcagcgagctagccaagaagatcggcaccacaccagacataatcctggacgacttgctggagacggaccgcgtcaccgcccacttctagccccgtggatgccgtcaccaccagcacacggaactacctcccaccccctttttgtacaaaacacaaggaaaaacattttttgc

SEQ ID NO: 36135 - DNA, 4555 bp, Homo sapiens
cccggccggactgagttcgctgctgtcccggttcctctcgagtcggctccaactgccagcccgggttggcgccatgtacgccgtgtacaaacaggcgcatccgcccaccggtctggagttctccatgtactgcaacttcttcaacaacagcgagcgcaacctggtagtggccgggacctcgcagctctacgtgtaccgcctcaaccgcgacgccgaggctctgaccaagaatgacaggagcacagaggggaaggcccaccgggagaagctcgagcttgctgcctccttctccttctttggcaacgtcatgtccatggccagcgtgcagctggcaggagccaagcgggatgccctgctcctaagcttcaaggatgccaagctgtctgtggtggagtacgacccgggcacccatgacctgaagaccctgtcactgcactactttgaggagcctgagcttcgggacgggtttgtgcagaatgtacacacgccgcgagtgcgggtggaccccgacgggcgctgtgcagccatgcttgtctacggcacgcggctggtggtcctgcccttccgcagggagagcctggctgaggagcacgaggggctcgtgggtgaggggcagaggtccagcttcctgcccagctacatcatcgacgtgcgggccctagacgagaagctgctcaacatcatcgacctgcagttcctgcatggctactacgagcctaccctcctcatcctgtttgagcccaaccagacctggcctgggcgcgtggccgtgcggcaggacacgtgctccattgtggccatctcactgaacatcacgcagaaggtgcaccccgtcatctggtccctcaccagcctgccctttgactgcacccaggctctggctgtgcccaagcccataggtggggtggtggtgtttgccgtcaactcgctgttgtacctgaaccagagcgtccccccgtatggcgtggctctcaacagcctcaccacaggaaccacggctttcccgcttcgcacccaggagggtgtgcggatcaccctggactgcgcccaggccaccttcatctcctacgacaagatggtcatctccctcaagggcggcgagatctacgtgctgaccctcatcaccgacggcatgcgcagtgtccgagcgttccactttgacaaggcggccgccagcgtcctcaccaccagcgtgagttgggactaggggttgggtctgggtccagacccggcccagccatcacacacctgccctccctcagatggtcaccatggagcccgggtacctgttcctgggttctcgcctgggcaattccctcctcctcaagtacacggagaagctgcaggagcccccggccagtgctgtccgtgaggctgccgacaaggaagagcctccctcaaagaagaagcgagtggatgcgacggccggctggtcagctgcgggtaagtcggtgccgcaggatgaggtggacgagattgaagtgtacggcagcgaggcccagtcgggaacacagctggccacctactcctttgaggtgtgtgacagcatcctgaacattggaccctgtgccaatgccgccgtgggcgagcctgccttcctctctgaagagtttcagaacagccccgagccggacctggagattgtggtttgctccggccacgggaagaacggggctttgtcggtgctgcagaagagcatccggccccaggtggtgacaacctttgagcttcccggctgctatgacatgtggacagtcatcgccccggtgcgtaaggaggaggaggacaatcccaagggggagggcacagagcaggaacccagcaccacccctgaagcagacgacgacggccgcagacacggattcctgattctgagccgggaagactccaccatgatcctgcagacggggcaggagatcatggagctggacaccagtggcttcgccactcagggccccacggtctttgctgggaacatcggggacaaccgctacattgtccaagtgtcaccactgggcatccgcctgctggaaggagtgaatcagctgcacttcatccccgtggacctgggcgcccccatcgtgcagtgcgccgtggccgacccctatgtggtcatcatgagtgccgagggccacgtcaccatgttcctgctgaagagtgactcctacggtggccgccaccaccgcctggcgctgcacaagcccccgctgcaccatcagtccaaggtgattacgctgtgcctgtaccgagacctcagcggcatgttcaccactgagagccgcctgggtggggcccgtgacgagctcgggggccgcagtggcccggaggccgagggcctgggctcagagactagccccacagtggatgacgaggaggagatgctgtatggggattcgggctccctcttcagccccagcaaggaggaggcccgaagaagcagccagccccctgctgaccgggaccctgcacccttccgggcagagcctacccactggtgcctgctggtgcgggagaatggcaccatggagatctaccagcttcccgactggcggctggtgttcctggtgaagaacttccctgtggggcagcgggtccttgtggacagctcctttggacagcccactacacagggcgaggcccgcagggaggaggccacgcgccagggggagctgcccctcgtcaaggaggtgctgctggtggcgctgggcagccgccagagcaggccctacctgctggtgcatgtggaccaagagctgcttatctacgaggccttcccccacgactctcagctcggccagggcaatctcaaagtccgctttaagaaggtccctcacaacatcaacttccgtgagaagaagccaaagccatccaagaagaaagcagaaggtggcggcgcagaggagggggctggggcccggggccgcgtggcgcgtttccgctacttcgaggatatttatggctactcaggggtcttcatctgcggcccctcccctcactggctcttggtgaccggccgaggggctctgcggctacaccccatggccatcgacggcccggtcgactctttcgctccattccacaatgtcaactgtccccgcggcttcctgtacttcaacagacagggcgagctgaggatcagtgtcctgcctgcctacctgtcctatgatgccccatggcctgtcaggaagatcccgctgcgctgcacggcccactatgtggcttaccacgtggagtctaaggtgtatgctgtggccaccagcaccaacacgccgtgtgcccgcatcccacgcatgactggcgaggagaaggagtttgagaccatcgagagagatgagcggtacatccacccccagcaggaggccttctccatccagctcatctccccggtcagctgggaggctattcccaatgccaggatcgagctgcaggagtgggagcatgtgacctgcatgaagacagtgtctctgcgcagtgaggagaccgtgtcgggcctcaaaggctacgtggccgccgggacctgcctcatgcagggggaggaggtcacgtgccgagggcggatcttgatcatggatgtgattgaggtggtgcccgagcctggccagcccttgaccaagaacaagttcaaagtcctttacgagaaggagcagaaggggcccgtgaccgccctgtgccactgcaatggccacctggtgtcggccatcggccagaagattttcctgtggagcctgcgggccagcgagctgacgggcatggccttcatcgacacgcagctctacatacaccagatgatcagcgtcaagaacttcatcctggcagccgacgtcatgaagagcatttcgctgctgcgctaccaggaggaaagcaagacgctgagcctggtgtcgcgggatgccaagcccctggaggtgtacagcgtggacttcatggtggacaatgcccagctgggttttctggtgtctgaccgcgaccgcaacctcatggtgtacatgtacctgcccgaagccaaggagagtttcgggggcatgcgcctgctgcgtcgggcagacttccacgtgggtgcccacgtgaacacgttctggaggaccccgtgccgggccactgaagggctcagcaaaaagtcggtcgtgtgggagaataagcacatcacgtggtttgccaccctggacggcggcatcgggctgctgctgcccatgcaggagaagacctaccggcggctgctgatgctgcagaacgcgctgaccaccatgctgccacaccacgccggcctcaacccccgcgccttccggatgctgcacgtggaccgccgcaccctccagaatgccgtgcgcaacgtgctggatggggagctgctcaaccgctacctgtacctgagcaccatggagcgcagcgagctagccaagaagatcggcaccacaccagacataatcctggacgacttgctggagacggaccgcgtcaccgcccacttctagccccgtggatgccgtcaccaccagcacacggaactacctcccaccccctttttgtacaaaacacaaggaaaaacattttttgc

SEQ ID NO: 36136 - DNA, 1288 bp, Homo sapiens
cccggccggactgagttcgctgctgtcccggttcctctcgagtcggctccaactgccagcccgggttggcgccatgtacgccgtgtacaaacaggcgcatccgcccaccggtctggagttctccatgtactgcaacttcttcaacaacagcgagcgcaacctggtagtggccgggacctcgcagctctacgtgtaccgcctcaaccgcgacgccgaggctctgaccaagaatgacaggagcacagaggggaaggcccaccgggagaagctcgagcttgctgcctccttctccttctttggcaacgtcatgtccatggccagcgtgcagctggcaggagccaagcgggatgccctgctcctaagcttcaaggatgccaagctgtctgtggtggagtacgacccgggcacccatgacctgaagaccctgtcactgcactactttgaggagcctgagcttcgggacgggtttgtgcagaatgtacacacgccgcgagtgcgggtggaccccgacgggcgctgtgcagccatgcttgtctacggcacgcggctggtggtcctgcccttccgcagggagagcctggctgaggagcacgaggggctcgtgggtgaggggcagaggtccagcttcctgcccagctacatcatcgacgtgcgggccctagacgagaagctgctcaacatcatcgacctgcagttcctgcatggctactacgagcctaccctcctcatcctgtttgagcccaaccagacctggcctgggcgcgtggccgtgcggcaggacacgtgctccattgtggccatctcactgaacatcacgcagaaggtgcaccccgtcatctggtccctcaccagcctgccctttgactgcacccaggctctggctgtgcccaagcccataggtggggtggtggtgtttgccgtcaactcgctgttgtacctgaaccagagcgtccccccgtatggcgtggctctcaacagcctcaccacaggaaccacggctttcccgcttcgcacccaggagggtgtgcggatcaccctggactgcgcccaggccaccttcatctcctacgacaagatggtcatctccctcaagggcggcgagatctacgtgctgaccctcatcaccgacggcatgcgcagtgtccgagcgttccactttgacaaggcggccgccagcgtcctcaccaccagcatggtcaccatggagcccgggtacctgttcctgggttctcgcctgggcaattccctcctcctcaagtacaacctgccgtggtgagatcctctagaa

SEQ ID NO: 36137 - DNA, 4601 bp, Homo sapiens
cccggccggactgagttcgctgctgtcccggttcctctcgagtcggctccaactgccaggtgggcggccgggcgggcggccgaggcggcagcgcgaggccggggaggggcgcggtgcggggccgggctcctgcgtgggcgaccccgctcacccttcctctcccggccttgcgcagcccgggttggcgccatgtacgccgtgtacaaacaggcgcatccgcccaccggtctggagttctccatgtactgcaacttcttcaacaacagcgagcgcaacctggtagtggccgggacctcgcagctctacgtgtaccgcctcaaccgcgacgccgaggctctgaccaagaatgacaggagcacagaggggaaggcccaccgggagaagctcgagcttgctgcctccttctccttctttggcaacgtcatgtccatggccagcgtgcagctggcaggagccaagcgggatgccctgctcctaagcttcaaggatgccaagctgtctgtggtggagtacgacccgggcacccatgacctgaagaccctgtcactgcactactttgaggagcctgagcttcgggacgggtttgtgcagaatgtacacacgccgcgagtgcgggtggaccccgacgggcgctgtgcagccatgcttgtctacggcacgcggctggtggtcctgcccttccgcagggagagcctggctgaggagcacgaggggctcgtgggtgaggggcagaggtccagcttcctgcccagctacatcatcgacgtgcgggccctagacgagaagctgctcaacatcatcgacctgcagttcctgcatggctactacgagcctaccctcctcatcctgtttgagcccaaccagacctggcctgggcgcgtggccgtgcggcaggacacgtgctccattgtggccatctcactgaacatcacgcagaaggtgcaccccgtcatctggtccctcaccagcctgccctttgactgcacccaggctctggctgtgcccaagcccataggtggggtggtggtgtttgccgtcaactcgctgttgtacctgaaccagagcgtccccccgtatggcgtggctctcaacagcctcaccacaggaaccacggctttcccgcttcgcacccaggagggtgtgcggatcaccctggactgcgcccaggccaccttcatctcctacgacaagatggtcatctccctcaagggcggcgagatctacgtgctgaccctcatcaccgacggcatgcgcagtgtccgagcgttccactttgacaaggcggccgccagcgtcctcaccaccagcatggtcaccatggagcccgggtacctgttcctgggttctcgcctgggcaattccctcctcctcaagtacacggagaagctgcaggagcccccggccagtgctgtccgtgaggctgccgacaaggaagagcctccctcaaagaagaagcgagtggatgcgacggccggctggtcagctgcgggtaagtcggtgccgcaggatgaggtggacgagattgaagtgtacggcagcgaggcccagtcgggaacacagctggccacctactcctttgaggtgtgtgacagcatcctgaacattggaccctgtgccaatgccgccgtgggcgagcctgccttcctctctgaagagtttcagaacagccccgagccggacctggagattgtggtttgctccggccacgggaagaacggggctttgtcggtgctgcagaagagcatccggccccaggtggtgacaacctttgagcttcccggctgctatgacatgtggacagtcatcgccccggtgcgtaaggaggaggaggacaatcccaagggggagggcacagagcaggaacccagcaccacccctgaagcagacgacgacggccgcagacacggattcctgattctgagccgggaagactccaccatgatcctgcagacggggcaggagatcatggagctggacaccagtggcttcgccactcagggccccacggtctttgctgggaacatcggggacaaccgctacattgtccaagtgtcaccactgggcatccgcctgctggaaggagtgaatcagctgcacttcatccccgtggacctgggcgcccccatcgtgcagtgcgccgtggccgacccctatgtggtcatcatgagtgccgagggccacgtcaccatgttcctgctgaagagtgactcctacggtggccgccaccaccgcctggcgctgcacaagcccccgctgcaccatcagtccaaggtgattacgctgtgcctgtaccgagacctcagcggcatgttcaccactgagagccgcctgggtggggcccgtgacgagctcgggggccgcagtggcccggaggccgagggcctgggctcagagactagccccacagtggatgacgaggaggagatgctgtatggggattcgggctccctcttcagccccagcaaggaggaggcccgaagaagcagccagccccctgctgaccgggaccctgcacccttccgggcagagcctacccactggtgcctgctggtgcgggagaatggcaccatggagatctaccagcttcccgactggcggctggtgttcctggtgaagaacttccctgtggggcagcgggtccttgtggacagctcctttggacagcccactacacagggcgaggcccgcagggaggaggccacgcgccagggggagctgcccctcgtcaaggaggtgctgctggtggcgctgggcagccgccagagcaggccctacctgctggtgcatgtggaccaagagctgcttatctacgaggccttcccccacgactctcagctcggccagggcaatctcaaagtccgctttaagaaggtccctcacaacatcaacttccgtgagaagaagccaaagccatccaagaagaaagcagaaggtggcggcgcagaggagggggctggggcccggggccgcgtggcgcgtttccgctacttcgaggatatttatggctactcaggggtcttcatctgcggcccctcccctcactggctcttggtgaccggccgaggggctctgcggctacaccccatggccatcgacggcccggtcgactctttcgctccattccacaatgtcaactgtccccgcggcttcctgtacttcaacagacagggcgagctgaggatcagtgtcctgcctgcctacctgtcctatgatgccccatggcctgtcaggaagatcccgctgcgctgcacggcccactatgtggcttaccacgtggagtctaaggtgtatgctgtggccaccagcaccaacacgccgtgtgcccgcatcccacgcatgactggcgaggagaaggagtttgagaccatcgagagagatgagcggtacatccacccccagcaggaggccttctccatccagctcatctccccggtcagctgggaggctattcccaatgccaggatcgagctgcaggagtgggagcatgtgacctgcatgaagacagtgtctctgcgcagtgaggagaccgtgtcgggcctcaaaggctacgtggccgccgggacctgcctcatgcagggggaggaggtcacgtgccgagggcggatcttgatcatggatgtgattgaggtggtgcccgagcctggccagcccttgaccaagaacaagttcaaagtcctttacgagaaggagcagaaggggcccgtgaccgccctgtgccactgcaatggccacctggtgtcggccatcggccagaagattttcctgtggagcctgcgggccagcgagctgacgggcatggccttcatcgacacgcagctctacatacaccagatgatcagcgtcaagaacttcatcctggcagccgacgtcatgaagagcatttcgctgctgcgctaccaggaggaaagcaagacgctgagcctggtgtcgcgggatgccaagcccctggaggtgtacagcgtggacttcatggtggacaatgcccagctgggttttctggtgtctgaccgcgaccgcaacctcatggtgtacatgtacctgcccgaagccaaggagagtttcgggggcatgcgcctgctgcgtcgggcagacttccacgtgggtgcccacgtgaacacgttctggaggaccccgtgccgggccactgaagggctcagcaaaaagtcggtcgtgtgggagaataagcacatcacgtggtttgccaccctggacggcggcatcgggctgctgctgcccatgcaggagaagacctaccggcggctgctgatgctgcagaacgcgctgaccaccatgctgccacaccacgccggcctcaacccccgcgccttccggatgctgcacgtggaccgccgcaccctccagaatgccgtgcgcaacgtgctggatggggagctgctcaaccgctacctgtacctgagcaccatggagcgcagcgagctagccaagaagatcggcaccacaccagacataatcctggacgacttgctggagacggaccgcgtcaccgcccacttctagccccgtggatgccgtcaccaccagcacacggaactacctcccaccccctttttgtacaaaacacaaggaaaaacattttttgc

SEQ ID NO: 36138 - DNA, 4740 bp, Homo sapiens
cccggccggactgagttcgctgctgtcccggttcctctcgagtcggctccaactgccagcccgggttggcgccatgtacgccgtgtacaaacaggcgcatccgcccaccggtctggagttctccatgtactgcaacttcttcaacaacagcgagcgcaacctggtagtggccgggacctcgcagctctacgtgtaccgcctcaaccgcgacgccgaggaacaccacagaagaggcaaacagcagccccatcagctttcaggaggcggcggaggcctttgcctcatgactggatgctgatgctttgatgcttggttgggtagtgttggcctggattcccccactgtaagcatggtaagtttagcgatggctgttcttgcggaaatctagttttgcgttcctggaataactcaacccagttgtgttacaatacccctgcttgtcactgggctcatctgcaggcgttttgaggaggctctgaccaagaatgacaggagcacagaggggaaggcccaccgggagaagctcgagcttgctgcctccttctccttctttggcaacgtcatgtccatggccagcgtgcagctggcaggagccaagcgggatgccctgctcctaagcttcaaggatgccaagctgtctgtggtggagtacgacccgggcacccatgacctgaagaccctgtcactgcactactttgaggagcctgagcttcgggacgggtttgtgcagaatgtacacacgccgcgagtgcgggtggaccccgacgggcgctgtgcagccatgcttgtctacggcacgcggctggtggtcctgcccttccgcagggagagcctggctgaggagcacgaggggctcgtgggtgaggggcagaggtccagcttcctgcccagctacatcatcgacgtgcgggccctagacgagaagctgctcaacatcatcgacctgcagttcctgcatggctactacgagcctaccctcctcatcctgtttgagcccaaccagacctggcctgggcgcgtggccgtgcggcaggacacgtgctccattgtggccatctcactgaacatcacgcagaaggtgcaccccgtcatctggtccctcaccagcctgccctttgactgcacccaggctctggctgtgcccaagcccataggtggggtggtggtgtttgccgtcaactcgctgttgtacctgaaccagagcgtccccccgtatggcgtggctctcaacagcctcaccacaggaaccacggctttcccgcttcgcacccaggagggtgtgcggatcaccctggactgcgcccaggccaccttcatctcctacgacaagatggtcatctccctcaagggcggcgagatctacgtgctgaccctcatcaccgacggcatgcgcagtgtccgagcgttccactttgacaaggcggccgccagcgtcctcaccaccagcatggtcaccatggagcccgggtacctgttcctgggttctcgcctgggcaattccctcctcctcaagtacacggagaagctgcaggagcccccggccagtgctgtccgtgaggctgccgacaaggaagagcctccctcaaagaagaagcgagtggatgcgacggccggctggtcagctgcgggtaagtcggtgccgcaggatgaggtggacgagattgaagtgtacggcagcgaggcccagtcgggaacacagctggccacctactcctttgaggtgtgtgacagcatcctgaacattggaccctgtgccaatgccgccgtgggcgagcctgccttcctctctgaagagtttcagaacagccccgagccggacctggagattgtggtttgctccggccacgggaagaacggggctttgtcggtgctgcagaagagcatccggccccaggtggtgacaacctttgagcttcccggctgctatgacatgtggacagtcatcgccccggtgcgtaaggaggaggaggacaatcccaagggggagggcacagagcaggaacccagcaccacccctgaagcagacgacgacggccgcagacacggattcctgattctgagccgggaagactccaccatgatcctgcagacggggcaggagatcatggagctggacaccagtggcttcgccactcagggccccacggtctttgctgggaacatcggggacaaccgctacattgtccaagtgtcaccactgggcatccgcctgctggaaggagtgaatcagctgcacttcatccccgtggacctgggcgcccccatcgtgcagtgcgccgtggccgacccctatgtggtcatcatgagtgccgagggccacgtcaccatgttcctgctgaagagtgactcctacggtggccgccaccaccgcctggcgctgcacaagcccccgctgcaccatcagtccaaggtgattacgctgtgcctgtaccgagacctcagcggcatgttcaccactgagagccgcctgggtggggcccgtgacgagctcgggggccgcagtggcccggaggccgagggcctgggctcagagactagccccacagtggatgacgaggaggagatgctgtatggggattcgggctccctcttcagccccagcaaggaggaggcccgaagaagcagccagccccctgctgaccgggaccctgcacccttccgggcagagcctacccactggtgcctgctggtgcgggagaatggcaccatggagatctaccagcttcccgactggcggctggtgttcctggtgaagaacttccctgtggggcagcgggtccttgtggacagctcctttggacagcccactacacagggcgaggcccgcagggaggaggccacgcgccagggggagctgcccctcgtcaaggaggtgctgctggtggcgctgggcagccgccagagcaggccctacctgctggtgcatgtggaccaagagctgcttatctacgaggccttcccccacgactctcagctcggccagggcaatctcaaagtccgctttaagaaggtccctcacaacatcaacttccgtgagaagaagccaaagccatccaagaagaaagcagaaggtggcggcgcagaggagggggctggggcccggggccgcgtggcgcgtttccgctacttcgaggatatttatggctactcaggggtcttcatctgcggcccctcccctcactggctcttggtgaccggccgaggggctctgcggctacaccccatggccatcgacggcccggtcgactctttcgctccattccacaatgtcaactgtccccgcggcttcctgtacttcaacagacagggcgagctgaggatcagtgtcctgcctgcctacctgtcctatgatgccccatggcctgtcaggaagatcccgctgcgctgcacggcccactatgtggcttaccacgtggagtctaaggtgtatgctgtggccaccagcaccaacacgccgtgtgcccgcatcccacgcatgactggcgaggagaaggagtttgagaccatcgagagagatgagcggtacatccacccccagcaggaggccttctccatccagctcatctccccggtcagctgggaggctattcccaatgccaggatcgagctgcaggagtgggagcatgtgacctgcatgaagacagtgtctctgcgcagtgaggagaccgtgtcgggcctcaaaggctacgtggccgccgggacctgcctcatgcagggggaggaggtcacgtgccgagggcggatcttgatcatggatgtgattgaggtggtgcccgagcctggccagcccttgaccaagaacaagttcaaagtcctttacgagaaggagcagaaggggcccgtgaccgccctgtgccactgcaatggccacctggtgtcggccatcggccagaagattttcctgtggagcctgcgggccagcgagctgacgggcatggccttcatcgacacgcagctctacatacaccagatgatcagcgtcaagaacttcatcctggcagccgacgtcatgaagagcatttcgctgctgcgctaccaggaggaaagcaagacgctgagcctggtgtcgcgggatgccaagcccctggaggtgtacagcgtggacttcatggtggacaatgcccagctgggttttctggtgtctgaccgcgaccgcaacctcatggtgtacatgtacctgcccgaagccaaggagagtttcgggggcatgcgcctgctgcgtcgggcagacttccacgtgggtgcccacgtgaacacgttctggaggaccccgtgccgggccactgaagggctcagcaaaaagtcggtcgtgtgggagaataagcacatcacgtggtttgccaccctggacggcggcatcgggctgctgctgcccatgcaggagaagacctaccggcggctgctgatgctgcagaacgcgctgaccaccatgctgccacaccacgccggcctcaacccccgcgccttccggatgctgcacgtggaccgccgcaccctccagaatgccgtgcgcaacgtgctggatggggagctgctcaaccgctacctgtacctgagcaccatggagcgcagcgagctagccaagaagatcggcaccacaccagacataatcctggacgacttgctggagacggaccgcgtcaccgcccacttctagccccgtggatgccgtcaccaccagcacacggaactacctcccaccccctttttgtacaaaacacaaggaaaaacattttttgc

SEQ ID NO: 36139 - DNA, 5314 bp, Homo sapiens
cccggccggactgagttcgctgctgtcccggttcctctcgagtcggctccaactgccaggtgggcggccgggcgggcggccgaggcggcagcgcgaggccggggaggggcgcggtgcggggccgggctcctgcgtgggcgaccccgctcacccttcctctcccggccttgcgcagcccgggttggcgccatgtacgccgtgtacaaacaggcgcatccgcccaccggtctggagttctccatgtactgcaacttcttcaacaacagcgagcgcaacctggtagtggccgggacctcgcagctctacgtgtaccgcctcaaccgcgacgccgaggaacaccacagaagaggcaaacagcagccccatcagctttcaggaggcggcggaggcctttgcctcatgactggatgctgatgctttgatgcttggttgggtagtgttggcctggattcccccactgtaaggttatttcttccttttgtaactaaaagtatcttgtagggacttattttgaaaccctgtaaacgtcctcttattcagattttcaaggtttttttttctttctttctttctctttttttttttagacggagtctcgctctatcacccaggctggagtgcagtggcacaatctcggctcactgcaagctccacctcctgggttcaagcgattcccctgcctcagctactgaggaggctgagacaggagaatcgcttgaacctggaaggcagaggttgcagtgagccaaaatcacaccattgcactccagcctgggcaacaaagtgagactccatctcaaaaaaaaaaaaaaaattttcctcctatttttgctttactaggagtttttatcacgaatgcctttatcagatgctttttttgtatccactaaaatgacatgatttttctccttaattttgacagcatggtaagtttagcgatggctgttcttgcggaaatctagttttgcgttcctggaataactcaacccagttgtgttacaatacccctgcttgtcactgggctcatctgcaggcgttttgaggaggctctgaccaagaatgacaggagcacagaggggaaggcccaccgggagaagctcgagcttgctgcctccttctccttctttggcaacgtcatgtccatggccagcgtgcagctggcaggagccaagcgggatgccctgctcctaagcttcaaggatgccaagctgtctgtggtggagtacgacccgggcacccatgacctgaagaccctgtcactgcactactttgaggagcctgagcttcgggacgggtttgtgcagaatgtacacacgccgcgagtgcgggtggaccccgacgggcgctgtgcagccatgcttgtctacggcacgcggctggtggtcctgcccttccgcagggagagcctggctgaggagcacgaggggctcgtgggtgaggggcagaggtccagcttcctgcccagctacatcatcgacgtgcgggccctagacgagaagctgctcaacatcatcgacctgcagttcctgcatggctactacgagcctaccctcctcatcctgtttgagcccaaccagacctggcctgggcgcgtggccgtgcggcaggacacgtgctccattgtggccatctcactgaacatcacgcagaaggtgcaccccgtcatctggtccctcaccagcctgccctttgactgcacccaggctctggctgtgcccaagcccataggtggggtggtggtgtttgccgtcaactcgctgttgtacctgaaccagagcgtccccccgtatggcgtggctctcaacagcctcaccacaggaaccacggctttcccgcttcgcacccaggagggtgtgcggatcaccctggactgcgcccaggccaccttcatctcctacgacaagatggtcatctccctcaagggcggcgagatctacgtgctgaccctcatcaccgacggcatgcgcagtgtccgagcgttccactttgacaaggcggccgccagcgtcctcaccaccagcatggtcaccatggagcccgggtacctgttcctgggttctcgcctgggcaattccctcctcctcaagtacacggagaagctgcaggagcccccggccagtgctgtccgtgaggctgccgacaaggaagagcctccctcaaagaagaagcgagtggatgcgacggccggctggtcagctgcgggtaagtcggtgccgcaggatgaggtggacgagattgaagtgtacggcagcgaggcccagtcgggaacacagctggccacctactcctttgaggtgtgtgacagcatcctgaacattggaccctgtgccaatgccgccgtgggcgagcctgccttcctctctgaagagtttcagaacagccccgagccggacctggagattgtggtttgctccggccacgggaagaacggggctttgtcggtgctgcagaagagcatccggccccaggtggtgacaacctttgagcttcccggctgctatgacatgtggacagtcatcgccccggtgcgtaaggaggaggaggacaatcccaagggggagggcacagagcaggaacccagcaccacccctgaagcagacgacgacggccgcagacacggattcctgattctgagccgggaagactccaccatgatcctgcagacggggcaggagatcatggagctggacaccagtggcttcgccactcagggccccacggtctttgctgggaacatcggggacaaccgctacattgtccaagtgtcaccactgggcatccgcctgctggaaggagtgaatcagctgcacttcatccccgtggacctgggcgcccccatcgtgcagtgcgccgtggccgacccctatgtggtcatcatgagtgccgagggccacgtcaccatgttcctgctgaagagtgactcctacggtggccgccaccaccgcctggcgctgcacaagcccccgctgcaccatcagtccaaggtgattacgctgtgcctgtaccgagacctcagcggcatgttcaccactgagagccgcctgggtggggcccgtgacgagctcgggggccgcagtggcccggaggccgagggcctgggctcagagactagccccacagtggatgacgaggaggagatgctgtatggggattcgggctccctcttcagccccagcaaggaggaggcccgaagaagcagccagccccctgctgaccgggaccctgcacccttccgggcagagcctacccactggtgcctgctggtgcgggagaatggcaccatggagatctaccagcttcccgactggcggctggtgttcctggtgaagaacttccctgtggggcagcgggtccttgtggacagctcctttggacagcccactacacagggcgaggcccgcagggaggaggccacgcgccagggggagctgcccctcgtcaaggaggtgctgctggtggcgctgggcagccgccagagcaggccctacctgctggtgcatgtggaccaagagctgcttatctacgaggccttcccccacgactctcagctcggccagggcaatctcaaagtccgctttaagaaggtccctcacaacatcaacttccgtgagaagaagccaaagccatccaagaagaaagcagaaggtggcggcgcagaggagggggctggggcccggggccgcgtggcgcgtttccgctacttcgaggatatttatggctactcaggggtcttcatctgcggcccctcccctcactggctcttggtgaccggccgaggggctctgcggctacaccccatggccatcgacggcccggtcgactctttcgctccattccacaatgtcaactgtccccgcggcttcctgtacttcaacagacagggcgagctgaggatcagtgtcctgcctgcctacctgtcctatgatgccccatggcctgtcaggaagatcccgctgcgctgcacggcccactatgtggcttaccacgtggagtctaaggtgtatgctgtggccaccagcaccaacacgccgtgtgcccgcatcccacgcatgactggcgaggagaaggagtttgagaccatcgagagagatgagcggtacatccacccccagcaggaggccttctccatccagctcatctccccggtcagctgggaggctattcccaatgccaggatcgagctgcaggagtgggagcatgtgacctgcatgaagacagtgtctctgcgcagtgaggagaccgtgtcgggcctcaaaggctacgtggccgccgggacctgcctcatgcagggggaggaggtcacgtgccgagggcggatcttgatcatggatgtgattgaggtggtgcccgagcctggccagcccttgaccaagaacaagttcaaagtcctttacgagaaggagcagaaggggcccgtgaccgccctgtgccactgcaatggccacctggtgtcggccatcggccagaagattttcctgtggagcctgcgggccagcgagctgacgggcatggccttcatcgacacgcagctctacatacaccagatgatcagcgtcaagaacttcatcctggcagccgacgtcatgaagagcatttcgctgctgcgctaccaggaggaaagcaagacgctgagcctggtgtcgcgggatgccaagcccctggaggtgtacagcgtggacttcatggtggacaatgcccagctgggttttctggtgtctgaccgcgaccgcaacctcatggtgtacatgtacctgcccgaagccaaggagagtttcgggggcatgcgcctgctgcgtcgggcagacttccacgtgggtgcccacgtgaacacgttctggaggaccccgtgccgggccactgaagggctcagcaaaaagtcggtcgtgtgggagaataagcacatcacgtggtttgccaccctggacggcggcatcgggctgctgctgcccatgcaggagaagacctaccggcggctgctgatgctgcagaacgcgctgaccaccatgctgccacaccacgccggcctcaacccccgcgccttccggatgctgcacgtggaccgccgcaccctccagaatgccgtgcgcaacgtgctggatggggagctgctcaaccgctacctgtacctgagcaccatggagcgcagcgagctagccaagaagatcggcaccacaccagacataatcctggacgacttgctggagacggaccgcgtcaccgcccacttctagccccgtggatgccgtcaccaccagcacacggaactacctcccaccccctttttgtacaaaacacaaggaaaaacattttttgc

SEQ ID NO: 36140 - DNA, 4725 bp, Homo sapiens
cccggccggactgagttcgctgctgtcccggttcctctcgagtcggctccaactgccaggtgggcggccgggcgggcggccgaggcggcagcgcgaggccggggaggggcgcggtgcggggccgggctcctgcgtgggcgaccccgctcacccttcctctcccggccttgcgcagcccgggttggcgccatgtacgccgtgtacaaacaggcgcatccgcccaccggtctggagttctccatgtactgcaacttcttcaacaacagcgagcgcaacctggtagtggccgggacctcgcagctctacgtgtaccgcctcaaccgcgacgccgagcatggtaagtttagcgatggctgttcttgcggaaatctagttttgcgttcctggaataactcaacccagttgtgttacaatacccctgcttgtcactgggctcatctgcaggcgttttgaggaggctctgaccaagaatgacaggagcacagaggggaaggcccaccgggagaagctcgagcttgctgcctccttctccttctttggcaacgtcatgtccatggccagcgtgcagctggcaggagccaagcgggatgccctgctcctaagcttcaaggatgccaagctgtctgtggtggagtacgacccgggcacccatgacctgaagaccctgtcactgcactactttgaggagcctgagcttcgggacgggtttgtgcagaatgtacacacgccgcgagtgcgggtggaccccgacgggcgctgtgcagccatgcttgtctacggcacgcggctggtggtcctgcccttccgcagggagagcctggctgaggagcacgaggggctcgtgggtgaggggcagaggtccagcttcctgcccagctacatcatcgacgtgcgggccctagacgagaagctgctcaacatcatcgacctgcagttcctgcatggctactacgagcctaccctcctcatcctgtttgagcccaaccagacctggcctgggcgcgtggccgtgcggcaggacacgtgctccattgtggccatctcactgaacatcacgcagaaggtgcaccccgtcatctggtccctcaccagcctgccctttgactgcacccaggctctggctgtgcccaagcccataggtggggtggtggtgtttgccgtcaactcgctgttgtacctgaaccagagcgtccccccgtatggcgtggctctcaacagcctcaccacaggaaccacggctttcccgcttcgcacccaggagggtgtgcggatcaccctggactgcgcccaggccaccttcatctcctacgacaagatggtcatctccctcaagggcggcgagatctacgtgctgaccctcatcaccgacggcatgcgcagtgtccgagcgttccactttgacaaggcggccgccagcgtcctcaccaccagcatggtcaccatggagcccgggtacctgttcctgggttctcgcctgggcaattccctcctcctcaagtacacggagaagctgcaggagcccccggccagtgctgtccgtgaggctgccgacaaggaagagcctccctcaaagaagaagcgagtggatgcgacggccggctggtcagctgcgggtaagtcggtgccgcaggatgaggtggacgagattgaagtgtacggcagcgaggcccagtcgggaacacagctggccacctactcctttgaggtgtgtgacagcatcctgaacattggaccctgtgccaatgccgccgtgggcgagcctgccttcctctctgaagagtttcagaacagccccgagccggacctggagattgtggtttgctccggccacgggaagaacggggctttgtcggtgctgcagaagagcatccggccccaggtggtgacaacctttgagcttcccggctgctatgacatgtggacagtcatcgccccggtgcgtaaggaggaggaggacaatcccaagggggagggcacagagcaggaacccagcaccacccctgaagcagacgacgacggccgcagacacggattcctgattctgagccgggaagactccaccatgatcctgcagacggggcaggagatcatggagctggacaccagtggcttcgccactcagggccccacggtctttgctgggaacatcggggacaaccgctacattgtccaagtgtcaccactgggcatccgcctgctggaaggagtgaatcagctgcacttcatccccgtggacctgggcgcccccatcgtgcagtgcgccgtggccgacccctatgtggtcatcatgagtgccgagggccacgtcaccatgttcctgctgaagagtgactcctacggtggccgccaccaccgcctggcgctgcacaagcccccgctgcaccatcagtccaaggtgattacgctgtgcctgtaccgagacctcagcggcatgttcaccactgagagccgcctgggtggggcccgtgacgagctcgggggccgcagtggcccggaggccgagggcctgggctcagagactagccccacagtggatgacgaggaggagatgctgtatggggattcgggctccctcttcagccccagcaaggaggaggcccgaagaagcagccagccccctgctgaccgggaccctgcacccttccgggcagagcctacccactggtgcctgctggtgcgggagaatggcaccatggagatctaccagcttcccgactggcggctggtgttcctggtgaagaacttccctgtggggcagcgggtccttgtggacagctcctttggacagcccactacacagggcgaggcccgcagggaggaggccacgcgccagggggagctgcccctcgtcaaggaggtgctgctggtggcgctgggcagccgccagagcaggccctacctgctggtgcatgtggaccaagagctgcttatctacgaggccttcccccacgactctcagctcggccagggcaatctcaaagtccgctttaagaaggtccctcacaacatcaacttccgtgagaagaagccaaagccatccaagaagaaagcagaaggtggcggcgcagaggagggggctggggcccggggccgcgtggcgcgtttccgctacttcgaggatatttatggctactcaggggtcttcatctgcggcccctcccctcactggctcttggtgaccggccgaggggctctgcggctacaccccatggccatcgacggcccggtcgactctttcgctccattccacaatgtcaactgtccccgcggcttcctgtacttcaacagacagggcgagctgaggatcagtgtcctgcctgcctacctgtcctatgatgccccatggcctgtcaggaagatcccgctgcgctgcacggcccactatgtggcttaccacgtggagtctaaggtgtatgctgtggccaccagcaccaacacgccgtgtgcccgcatcccacgcatgactggcgaggagaaggagtttgagaccatcgagagagatgagcggtacatccacccccagcaggaggccttctccatccagctcatctccccggtcagctgggaggctattcccaatgccaggatcgagctgcaggagtgggagcatgtgacctgcatgaagacagtgtctctgcgcagtgaggagaccgtgtcgggcctcaaaggctacgtggccgccgggacctgcctcatgcagggggaggaggtcacgtgccgagggcggatcttgatcatggatgtgattgaggtggtgcccgagcctggccagcccttgaccaagaacaagttcaaagtcctttacgagaaggagcagaaggggcccgtgaccgccctgtgccactgcaatggccacctggtgtcggccatcggccagaagattttcctgtggagcctgcgggccagcgagctgacgggcatggccttcatcgacacgcagctctacatacaccagatgatcagcgtcaagaacttcatcctggcagccgacgtcatgaagagcatttcgctgctgcgctaccaggaggaaagcaagacgctgagcctggtgtcgcgggatgccaagcccctggaggtgtacagcgtggacttcatggtggacaatgcccagctgggttttctggtgtctgaccgcgaccgcaacctcatggtgtacatgtacctgcccgaagccaaggagagtttcgggggcatgcgcctgctgcgtcgggcagacttccacgtgggtgcccacgtgaacacgttctggaggaccccgtgccgggccactgaagggctcagcaaaaagtcggtcgtgtgggagaataagcacatcacgtggtttgccaccctggacggcggcatcgggctgctgctgcccatgcaggagaagacctaccggcggctgctgatgctgcagaacgcgctgaccaccatgctgccacaccacgccggcctcaacccccgcgccttccggatgctgcacgtggaccgccgcaccctccagaatgccgtgcgcaacgtgctggatggggagctgctcaaccgctacctgtacctgagcaccatggagcgcagcgagctagccaagaagatcggcaccacaccagacataatcctggacgacttgctggagacggaccgcgtcaccgcccacttctagccccgtggatgccgtcaccaccagcacacggaactacctcccaccccctttttgtacaaaacacaaggaaaaacattttttgc

SEQ ID NO: 36141 - DNA, 4478 bp, Homo sapiens
gcagggcttcctcttctctaacaggcacgcagatcagtagctacagataccccttggctctggcttcctgccctgtgacatttggacccaggggccggggctgggctgctgtaggtgtgcaaccaggcaggtttgggggtgtgcagacacagagtgcactctaaccctgagtgcttgccgcacagggcctggctgctagggagccgtgaggctctgaccaagaatgacaggagcacagaggggaaggcccaccgggagaagctcgagcttgctgcctccttctccttctttggcaacgtcatgtccatggccagcgtgcagctggcaggagccaagcgggatgccctgctcctaagcttcaaggatgccaagctgtctgtggtggagtacgacccgggcacccatgacctgaagaccctgtcactgcactactttgaggagcctgagcttcgggacgggtttgtgcagaatgtacacacgccgcgagtgcgggtggaccccgacgggcgctgtgcagccatgcttgtctacggcacgcggctggtggtcctgcccttccgcagggagagcctggctgaggagcacgaggggctcgtgggtgaggggcagaggtccagcttcctgcccagctacatcatcgacgtgcgggccctagacgagaagctgctcaacatcatcgacctgcagttcctgcatggctactacgagcctaccctcctcatcctgtttgagcccaaccagacctggcctgggcgcgtggccgtgcggcaggacacgtgctccattgtggccatctcactgaacatcacgcagaaggtgcaccccgtcatctggtccctcaccagcctgccctttgactgcacccaggctctggctgtgcccaagcccataggtggggtggtggtgtttgccgtcaactcgctgttgtacctgaaccagagcgtccccccgtatggcgtggctctcaacagcctcaccacaggaaccacggctttcccgcttcgcacccaggagggtgtgcggatcaccctggactgcgcccaggccaccttcatctcctacgacaagatggtcatctccctcaagggcggcgagatctacgtgctgaccctcatcaccgacggcatgcgcagtgtccgagcgttccactttgacaaggcggccgccagcgtcctcaccaccagcatggtcaccatggagcccgggtacctgttcctgggttctcgcctgggcaattccctcctcctcaagtacacggagaagctgcaggagcccccggccagtgctgtccgtgaggctgccgacaaggaagagcctccctcaaagaagaagcgagtggatgcgacggccggctggtcagctgcgggtaagtcggtgccgcaggatgaggtggacgagattgaagtgtacggcagcgaggcccagtcgggaacacagctggccacctactcctttgaggtgtgtgacagcatcctgaacattggaccctgtgccaatgccgccgtgggcgagcctgccttcctctctgaagagtttcagaacagccccgagccggacctggagattgtggtttgctccggccacgggaagaacggggctttgtcggtgctgcagaagagcatccggccccaggtggtgacaacctttgagcttcccggctgctatgacatgtggacagtcatcgccccggtgcgtaaggaggaggaggacaatcccaagggggagggcacagagcaggaacccagcaccacccctgaagcagacgacgacggccgcagacacggattcctgattctgagccgggaagactccaccatgatcctgcagacggggcaggagatcatggagctggacaccagtggcttcgccactcagggccccacggtctttgctgggaacatcggggacaaccgctacattgtccaagtgtcaccactgggcatccgcctgctggaaggagtgaatcagctgcacttcatccccgtggacctgggcgcccccatcgtgcagtgcgccgtggccgacccctatgtggtcatcatgagtgccgagggccacgtcaccatgttcctgctgaagagtgactcctacggtggccgccaccaccgcctggcgctgcacaagcccccgctgcaccatcagtccaaggtgattacgctgtgcctgtaccgagacctcagcggcatgttcaccactgagagccgcctgggtggggcccgtgacgagctcgggggccgcagtggcccggaggccgagggcctgggctcagagactagccccacagtggatgacgaggaggagatgctgtatggggattcgggctccctcttcagccccagcaaggaggaggcccgaagaagcagccagccccctgctgaccgggaccctgcacccttccgggcagagcctacccactggtgcctgctggtgcgggagaatggcaccatggagatctaccagcttcccgactggcggctggtgttcctggtgaagaacttccctgtggggcagcgggtccttgtggacagctcctttggacagcccactacacagggcgaggcccgcagggaggaggccacgcgccagggggagctgcccctcgtcaaggaggtgctgctggtggcgctgggcagccgccagagcaggccctacctgctggtgcatgtggaccaagagctgcttatctacgaggccttcccccacgactctcagctcggccagggcaatctcaaagtccgctttaagaaggtccctcacaacatcaacttccgtgagaagaagccaaagccatccaagaagaaagcagaaggtggcggcgcagaggagggggctggggcccggggccgcgtggcgcgtttccgctacttcgaggatatttatggctactcaggggtcttcatctgcggcccctcccctcactggctcttggtgaccggccgaggggctctgcggctacaccccatggccatcgacggcccggtcgactctttcgctccattccacaatgtcaactgtccccgcggcttcctgtacttcaacagacagggcgagctgaggatcagtgtcctgcctgcctacctgtcctatgatgccccatggcctgtcaggaagatcccgctgcgctgcacggcccactatgtggcttaccacgtggagtctaaggtgtatgctgtggccaccagcaccaacacgccgtgtgcccgcatcccacgcatgactggcgaggagaaggagtttgagaccatcgagagagatgagcggtacatccacccccagcaggaggccttctccatccagctcatctccccggtcagctgggaggctattcccaatgccaggatcgagctgcaggagtgggagcatgtgacctgcatgaagacagtgtctctgcgcagtgaggagaccgtgtcgggcctcaaaggctacgtggccgccgggacctgcctcatgcagggggaggaggtcacgtgccgagggcggatcttgatcatggatgtgattgaggtggtgcccgagcctggccagcccttgaccaagaacaagttcaaagtcctttacgagaaggagcagaaggggcccgtgaccgccctgtgccactgcaatggccacctggtgtcggccatcggccagaagattttcctgtggagcctgcgggccagcgagctgacgggcatggccttcatcgacacgcagctctacatacaccagatgatcagcgtcaagaacttcatcctggcagccgacgtcatgaagagcatttcgctgctgcgctaccaggaggaaagcaagacgctgagcctggtgtcgcgggatgccaagcccctggaggtgtacagcgtggacttcatggtggacaatgcccagctgggttttctggtgtctgaccgcgaccgcaacctcatggtgtacatgtacctgcccgaagccaaggagagtttcgggggcatgcgcctgctgcgtcgggcagacttccacgtgggtgcccacgtgaacacgttctggaggaccccgtgccgggccactgaagggctcagcaaaaagtcggtcgtgtgggagaataagcacatcacgtggtttgccaccctggacggcggcatcgggctgctgctgcccatgcaggagaagacctaccggcggctgctgatgctgcagaacgcgctgaccaccatgctgccacaccacgccggcctcaacccccgcgccttccggatgctgcacgtggaccgccgcaccctccagaatgccgtgcgcaacgtgctggatggggagctgctcaaccgctacctgtacctgagcaccatggagcgcagcgagctagccaagaagatcggcaccacaccagacataatcctggacgacttgctggagacggaccgcgtcaccgcccacttctagccccgtggatgccgtcaccaccagcacacggaactacctcccaccccctttttgtacaaaacacaaggaaaaacattttttgc

SEQ ID NO: 36142 - DNA, 4189 bp, Homo sapiens
tcagctcggtaccagttctactccacaaacagctggcaggagccaagcgggatgccctgctcctaagcttcaaggatgccaagctgtctgtggtggagtacgacccgggcacccatgacctgaagaccctgtcactgcactactttgaggagcctgagcttcgggacgggtttgtgcagaatgtacacacgccgcgagtgcgggtggaccccgacgggcgctgtgcagccatgcttgtctacggcacgcggctggtggtcctgcccttccgcagggagagcctggctgaggagcacgaggggctcgtgggtgaggggcagaggtccagcttcctgcccagctacatcatcgacgtgcgggccctagacgagaagctgctcaacatcatcgacctgcagttcctgcatggctactacgagcctaccctcctcatcctgtttgagcccaaccagacctggcctgggcgcgtggccgtgcggcaggacacgtgctccattgtggccatctcactgaacatcacgcagaaggtgcaccccgtcatctggtccctcaccagcctgccctttgactgcacccaggctctggctgtgcccaagcccataggtggggtggtggtgtttgccgtcaactcgctgttgtacctgaaccagagcgtccccccgtatggcgtggctctcaacagcctcaccacaggaaccacggctttcccgcttcgcacccaggagggtgtgcggatcaccctggactgcgcccaggccaccttcatctcctacgacaagatggtcatctccctcaagggcggcgagatctacgtgctgaccctcatcaccgacggcatgcgcagtgtccgagcgttccactttgacaaggcggccgccagcgtcctcaccaccagcatggtcaccatggagcccgggtacctgttcctgggttctcgcctgggcaattccctcctcctcaagtacacggagaagctgcaggagcccccggccagtgctgtccgtgaggctgccgacaaggaagagcctccctcaaagaagaagcgagtggatgcgacggccggctggtcagctgcgggtaagtcggtgccgcaggatgaggtggacgagattgaagtgtacggcagcgaggcccagtcgggaacacagctggccacctactcctttgaggtgtgtgacagcatcctgaacattggaccctgtgccaatgccgccgtgggcgagcctgccttcctctctgaagagtttcagaacagccccgagccggacctggagattgtggtttgctccggccacgggaagaacggggctttgtcggtgctgcagaagagcatccggccccaggtggtgacaacctttgagcttcccggctgctatgacatgtggacagtcatcgccccggtgcgtaaggaggaggaggacaatcccaagggggagggcacagagcaggaacccagcaccacccctgaagcagacgacgacggccgcagacacggattcctgattctgagccgggaagactccaccatgatcctgcagacggggcaggagatcatggagctggacaccagtggcttcgccactcagggccccacggtctttgctgggaacatcggggacaaccgctacattgtccaagtgtcaccactgggcatccgcctgctggaaggagtgaatcagctgcacttcatccccgtggacctgggcgcccccatcgtgcagtgcgccgtggccgacccctatgtggtcatcatgagtgccgagggccacgtcaccatgttcctgctgaagagtgactcctacggtggccgccaccaccgcctggcgctgcacaagcccccgctgcaccatcagtccaaggtgattacgctgtgcctgtaccgagacctcagcggcatgttcaccactgagagccgcctgggtggggcccgtgacgagctcgggggccgcagtggcccggaggccgagggcctgggctcagagactagccccacagtggatgacgaggaggagatgctgtatggggattcgggctccctcttcagccccagcaaggaggaggcccgaagaagcagccagccccctgctgaccgggaccctgcacccttccgggcagagcctacccactggtgcctgctggtgcgggagaatggcaccatggagatctaccagcttcccgactggcggctggtgttcctggtgaagaacttccctgtggggcagcgggtccttgtggacagctcctttggacagcccactacacagggcgaggcccgcagggaggaggccacgcgccagggggagctgcccctcgtcaaggaggtgctgctggtggcgctgggcagccgccagagcaggccctacctgctggtgcatgtggaccaagagctgcttatctacgaggccttcccccacgactctcagctcggccagggcaatctcaaagtccgctttaagaaggtccctcacaacatcaacttccgtgagaagaagccaaagccatccaagaagaaagcagaaggtggcggcgcagaggagggggctggggcccggggccgcgtggcgcgtttccgctacttcgaggatatttatggctactcaggggtcttcatctgcggcccctcccctcactggctcttggtgaccggccgaggggctctgcggctacaccccatggccatcgacggcccggtcgactctttcgctccattccacaatgtcaactgtccccgcggcttcctgtacttcaacagacagggcgagctgaggatcagtgtcctgcctgcctacctgtcctatgatgccccatggcctgtcaggaagatcccgctgcgctgcacggcccactatgtggcttaccacgtggagtctaaggtgtatgctgtggccaccagcaccaacacgccgtgtgcccgcatcccacgcatgactggcgaggagaaggagtttgagaccatcgagagagatgagcggtacatccacccccagcaggaggccttctccatccagctcatctccccggtcagctgggaggctattcccaatgccaggatcgagctgcaggagtgggagcatgtgacctgcatgaagacagtgtctctgcgcagtgaggagaccgtgtcgggcctcaaaggctacgtggccgccgggacctgcctcatgcagggggaggaggtcacgtgccgagggcggatcttgatcatggatgtgattgaggtggtgcccgagcctggccagcccttgaccaagaacaagttcaaagtcctttacgagaaggagcagaaggggcccgtgaccgccctgtgccactgcaatggccacctggtgtcggccatcggccagaagattttcctgtggagcctgcgggccagcgagctgacgggcatggccttcatcgacacgcagctctacatacaccagatgatcagcgtcaagaacttcatcctggcagccgacgtcatgaagagcatttcgctgctgcgctaccaggaggaaagcaagacgctgagcctggtgtcgcgggatgccaagcccctggaggtgtacagcgtggacttcatggtggacaatgcccagctgggttttctggtgtctgaccgcgaccgcaacctcatggtgtacatgtacctgcccgaagccaaggagagtttcgggggcatgcgcctgctgcgtcgggcagacttccacgtgggtgcccacgtgaacacgttctggaggaccccgtgccgggccactgaagggctcagcaaaaagtcggtcgtgtgggagaataagcacatcacgtggtttgccaccctggacggcggcatcgggctgctgctgcccatgcaggagaagacctaccggcggctgctgatgctgcagaacgcgctgaccaccatgctgccacaccacgccggcctcaacccccgcgccttccggatgctgcacgtggaccgccgcaccctccagaatgccgtgcgcaacgtgctggatggggagctgctcaaccgctacctgtacctgagcaccatggagcgcagcgagctagccaagaagatcggcaccacaccagacataatcctggacgacttgctggagacggaccgcgtcaccgcccacttctagccccgtggatgccgtcaccaccagcacacggaactacctcccaccccctttttgtacaaaacacaaggaaaaacattttttgc

SEQ ID NO: 36143 - DNA, 3561 bp, Homo sapiens
ctcattgcaaattcccggactgctaggcgaggagagggaagggggcggaggagacagggctactgcaggcgcagagctgggggcagccgggggcccgagtggctgaggctggtcccgcagcggccgcttgccggcgttctggctcctgtggcctcaccaggaagcgtcagagtcccgacactggggaagctcggagcgccgcctccgctgccgccgcctcctgcctggctctgggtccccgagccccctcccctggcccagcccgactccctcctccttcccgaaccatccggctcgggctccttccctggcgatggctggccgctgagccatggctcagtacggccaccccagtccgctcggcatggctgcgagagaggagctgtacagcaaagtcaccccccggaggaaccgccaacagcgccccggcaccatcaagcatggatcggcgctggacgtgctcctctccatggggttccccagagcccgcgcacaaaaagccttggcatccacgggaggaagaagtgttcaggcagcatgtgactggttattctcccatgtcggtgaccccttcctggatgaccccctgccccgggagtacgtcctctacctccgtcccaccggccccttagcacagaagctttccgacttttggcagcagtcgaagcagatctgcgggaagaacaaggcacacaacatcttcccccacatcacactctgccagttctttatgtgcgaggacagcaaggtggatgccctgggggaagccctgcagaccacggtcagtcgctggaaatgtaagttctcggccccgctgcccctggagctctatacgtcgtccaacttcatcggcctctttgtaaaggaagacagtgcggaggtcctcaagaagtttgctgctgactttgctgcagaggctgcatccaaaaccgaagtgcatgtggaacctcataagaagcagctacatgtgaccctggcttaccacttccaagccagccacctacccaccctagagaaactggcccagaacattgacgtcaagctagggtgtgactgggtggctaccatattttctcgggatatccgatttgctaaccatgagacattacaggtcatctacccctataccccacaaaatgacgatgagctggagctggtccccggggacttcatcttcatgtctccaatggagcagaccagcaccagcgagggttggatctatggcacgtccttaaccaccggctgctctggactcctgcctgagaattacattaccaaggctgatgaatgcagcacctggatatttcatggttcttattcaatcttaaatacatcgtcatccaactctctcacgtttggggatggagtattggagaggcggccttatgaggaccaggggctcggggagacgactcctcttactatcatctgccagcccatgcagccgctgagggtcaacagccagcccggcccccagaagcgatgcctttttgtgtgtcggcatggtgagaggatggatgttgtgtttgggaagtactggctgtcccagtgcttcgatgccaaaggccgctacatacgcaccaacctgaacatgcctcatagtttacctcagcggagtggtggtttccgagattacgagaaagatgctcccatcactgtgtttggatgcatgcaagcaagactagtgggtgaagccttattagagagcaataccattatcgatcatgtctattgctccccgtcccttcgctgcgttcagactgcacacaatatcttgaaaggtttacaacaagaaaatcacttgaagatccgtgtagagcccggcttatttgagtggacaaaatgggttgctgggagcacattacctgcatggatacctccatcagagttagctgcagccaacctgagtgttgatacaacctacagacctcacattccaatcagcaaattagttgtttcagaatcctatgatacttatatcagtagaagtttccaagtaacaaaagaaataataagtgaatgtaaaagtaaaggaaataacatcctgattgtggcccacgcatcttcccttgaagcgtgtacctgccaacttcagggcctgtcacctcagaactccaaggacttcgtacaaatggtccgaaagatcccatatctgggattttgttcctgtgaagaattaggagaaactggaatatggcagctgacagatccaccaatccttcctcttacccatggaccaactgggggcttcaactggagagagaccttgcttcaagaataaaccacaccagtgaacaagaaggaaaggccttttggagtgtgtctttctgtgtgtttaaaaacagtgggaaaatccacaccacactctaagtggacagctcagaataatttagcatatttcctttcacacttaaagttcttaagatgagactgtgtaaatgagagaaagacttgattcagaggaaaaaaatgtgttctctctggactcttgcctagctcacaaggctttggagaattgtcttcctaaatcggggcacctgctacagaagagaatgtttcgttccctctgggtatgcacagctaaggggcctcatttctcccagagggagctgctggcccgctctaaggggtgcaagaggaaggagtgtgcccagaccagctgggggagcattgaaaggacagcttggggatggaatttttttttttttatctccattttccagttaggtagagccaagctgaggaatccttttaagattattagaaaacatgccctgaagagagttgttcttaggttacacatgaaatcctaccgtcactagcccccatacaccagtgttgctggctgaagatacccgcttaaggatgctaacatttaccctggtactgccacattttctctagagcagctggcccttcttgctacagccctatcccccctccttgcttctgtgaaatggggagacaaagcacttttgctctccaaagcacttttggatactcaggaggaaagataagatacatgtttgaagtattcaatcataggagcaaagaacttgcaaaatatgaagtgacttggaattaaccatgttgtagcctaacgtgctactgcatttctaaatcatcaatatttgcttgtctttgcccctagactctagactatgttaactagttaaggatgttacattttgaaaggatgtatgttagatatattatttgcagcaagaagttcattctgtgcaatatggacatgtttgcaaaccataccaagggtcaggttgttgtacacttacagtacgtgtcaaccataatggaacatccacaaatgcatcaattataccagggatgtatagtaagtcagggaactaatataaatgatgacagtcatggctgcactgctacttgtgctgtcgttttgtttgtttttctatgataatttaaaatacataggtagggctactgaggaaatttggagagccacattctgtggtttctcattatacttacttcctgcatttagagggagtttatttaaaagaaataaatgacaatcaaaccaaa

SEQ ID NO: 36144 - DNA, 1016 bp, Homo sapiens
ctcattgcaaattcccggactgctaggcgaggagagggaagggggcggaggagacagggctactgcaggcgcagagctgggggcagccgggggcccgagtggctgaggctggtcccgcagcggccgcttgccggcgttctggctcctgtggcctcaccaggaagcgtcagagtcccgacactggggaagctcggagcgccgcctccgctgccgccgcctcctgcctggctctgggtccccgagccccctcccctggcccagcccgactccctcctccttcccgaaccatccggctcgggctccttccctggcgatggctggccgctgagccatggctcagtacggccaccccagtccgctcggcatggctgcgagagaggagctgtacagcaaagtcaccccccggaggaaccgccaacagcgccccggcaccatcaagcatggatcggcgctggacgtgctcctctccatggggttccccagagcccgcgcgtaagtggccgggctcgcagccctcggcgacccctcccgcgcgcgcggccggccctcggcttcgctccggctcgcctcccagcgcctgcgggacaggcagcgcgctccccgctgcccgagacctgttgggggcgggatgggcgcgctggcaacccgggactcggctccgggcgggggtgcgggggaagacgcggcgcgggggcgttgggccagggctcgccgtgggatgcctaaagctgggggacgagggcgcggggttcgagtcccgggtatagtgctcagcctccgccccagccgggtggagctcagcgtttctctcgcgcgctcccctaggtctccagcgccgagcgcctagggaggcggggccctgcggaggactcgggcaccctctccgtctggaatactgggctggtctgggatcctccggtgtctgggaaagggcgggagactgcggggcagggaggccggcgcccccgttgcagcggcttccagctccggatgtcgctctcgggttcggtctcccc

SEQ ID NO: 36145 - DNA, 6873 bp, Homo sapiens
ctcattgcaaattcccggactgctaggcgaggagagggaagggggcggaggagacagggctactgcaggcgcagagctgggggcagccgggggcccgagtggctgaggctggtcccgcagcggccgcttgccggcgttctggctcctgtggcctcaccaggaagcgtcagagtcccgacactggggaagctcggagcgccgcctccgctgccgccgcctcctgcctggctctgggtccccgagccccctcccctggcccagcccgactccctcctccttcccgaaccatccggctcgggctccttccctggcgatggctggccgctgagccatggctcagtacggccaccccagtccgctcggcatggctgcgagagaggagctgtacagcaaagtcaccccccggaggaaccgccaacagcgccccggcaccatcaagcatggatcggcgctggacgtgctcctctccatggggttccccagagcccgcgcacaaaaagccttggcatccacgggaggaagaagtgttcaggcagcatgtgactggttattctcccatgtcggtgaccccttcctggatgaccccctgccccgggagtacgtcctctacctccgtcccaccggccccttagcacagaagctttccgacttttggcagcagtcgaagcagatctgcgggaagaacaaggcacacaacatcttcccccacatcacactctgccagttctttatgtgcgaggacagcaaggtggatgccctgggggaagccctgcagaccacggtcagtcgctggaaatgtaagttctcggccccgctgcccctggagctctatacgtcgtccaacttcatcggcctctttgtaaaggaagacagtgcggaggtcctcaagaagtttgctgctgactttgctgcagaggctgcatccaaaaccgaagtgcatgtggaacctcataagaagcagctacatgtgaccctggcttaccacttccaagccagccacctacccaccctagagaaactggcccagaacattgacgtcaagctagggtgtgactgggtggctaccatattttctcgggatatccgatttgctaaccatgagacattacaggtcatctacccctataccccacaaaatgacgatgagctggagctggtccccggggacttcatcttcatgtctccaatggagcagaccagcaccagcgagggttggatctatggcacgtccttaaccaccggctgctctggactcctgcctgagaattacattaccaaggctgatgaatgcagcacctggatatttcatggttcttattcaatcttaaatacatcgtcatccaactctctcacgtttggggatggagtattggagaggcggccttatgaggaccaggggctcggggagacgactcctcttactatcatctgccagcccatgcagccgctgagggtcaacagccagcccggcccccagaagcgatgcctttttgtgtgtcggcatggtgagaggatggatgttgtgtttgggaagtactggctgtcccagtgcttcgatgccaaaggccgctacatacgcaccaacctgaacatgcctcatagtttacctcagcggagtggtggtttccgagattacgagaaagatgctcccatcactgtgtttggatgcatgcaagcaagactagtgggtgaagccttattagagagcaataccattatcgatcatgtctattgctccccgtcccttcgctgcgttcagactgcacacaatatcttgaaaggtttacaacaagaaaatcacttgaagatccgtgtagagcccggcttatttgagtggacaaaatgggttgctgggagcacattacctgcatggatacctccatcagagttagctgcagccaacctgagtgttgatacaacctacagacctcacattccaatcagcaaattagttgtttcagaatcctatgatacttatatcagtagaagtttccaagtaacaaaagaaataataagtgaatgtaaaagtaaaggaaataacatcctgattgtggcccacgcatcttcccttgaagcgtgtacctgccaacttcagggcctgtcacctcagaactccaaggacttcgtacaaatggtccgaaagatcccatatctgggattttgttcctgtgaagaattaggagaaactggaatatggcagctgacagatccaccaatccttcctcttacccatggaccaactgggggcttcaactggagagagaccttgcttcaagaataaaccacaccagtgaacaagaaggaaaggccttttggagtgtgtctttctgtgtgtttaaaaacagtgggaaaatccacaccacactctaagtggacagctcagaataatttagcatatttcctttcacacttaaagttcttaagatgagactgtgtaaatgagagaaagacttgattcagaggaaaaaaatgtgttctctctggactcttgcctagctcacaaggctttggagaattgtcttcctaaatcggggcacctgctacagaagagaatgtttcgttccctctgggtatgcacagctaaggggcctcatttctcccagagggagctgctggcccgctctaaggggtgcaagaggaaggagtgtgcccagaccagctgggggagcattgaaaggacagcttggggatggaatttttttttttttatctccattttccagttaggtagagccaagctgaggaatccttttaagattattagaaaacatgccctgaagagagttgttcttaggttacacatgaaatcctaccgtcactagcccccatacaccagtgttgctggctgaagatacccgcttaaggatgctaacatttaccctggtactgccacattttctctagagcagctggcccttcttgctacagccctatcccccctccttgcttctgtgaaatggggagacaaagcacttttgctctccaaagcacttttggatactcaggaggaaagataagatacatgtttgaagtattcaatcataggagcaaagaacttgcaaaatatgaagtgacttggaattaaccatgttgtagcctaacgtgctactgcatttctaaatcatcaatatttgcttgtctttgcccctagactctagactatgttaactagttaaggatgttacattttgaaaggatgtatgttagatatattatttgcagcaagaagttcattctgtgcaatatggacatgtttgcaaaccataccaagggtcaggttgttgtacacttacagtacgtgtcaaccataatggaacatccacaaatgcatcaattataccagggatgtatagtaagtcagggaactaatataaatgatgacagtcatggctgcactgctacttgtgctgtcgttttgtttgtttttctatgataatttaaaatacataggtagggctactgaggaaatttggagagccacattctgtggtttctcattatacttacttcctgcatttagagggagtttatttaaaagaaataaatgacaatcaaaccaaatcatcagttatcaatgtctgtttaattgtgtgactatctgactgttgatggccacagatgatggtctcctatggtatagttcactctgtagaagatgtatgcaaagtgaaatgccagccctttaaagagacattagttagtgtaaaatggatctttacatgttgcagtaacattgactatgtttcaaaactcagatgcataaaacgtaaggtatataaaaatacatctatgcttgcgtttgaaactacaacttgataacccctagaaagaagaggacatgagaggatgctggctatatatgttaatgagcaaaaggattatagttgttttgttttgtttttagagacagggtctcactataatgcttagactggtcttgaactcctgggctcaagcgatcctcctgcccctgtctcccaaagtgctaggattacaggtgtgagccaccacacctggcccatagttgtattttttttaggtcacttagaaaaatatgtcatgtattttacattttgagaaacaaatcaatcatggtttcttctagcgttgcgcaaacactgacccagcttctgggtatggaaataaccctgtgatgatgtgttaatataaaatgttgggagggaatattcccaataaaggtcttaagagaaaagtcacattacaagtaatgtaatggctctaccattcattcttctggtatttgtaatgaagtgaatccactgtttaatcagatccataatctttaacagattcaccacaaattttcatgggcgttgagtgctcagaataatgcttgaacacctcaccttgaaactgtagcagtgtgttctgggcagtatctgtaatgtatgaaatagagtctggaataggttatccactccatcttctaggttatcttagttgtatgacgaactgataaatctgtctgactgggctacaatccattgttcttagtccaatatggacactgccttaggcaatggtctatataagcaaaaggagatagagatctgaaataattttccgaataattcaggtggaaaacaagaaagattgtatttctctgctttcatttcaatttcattatttcaaattgcttgtcaaaatggcccaaaagatctgaattcacattaagttccccttgcacacttacctatttaaaaaactaaacttgcactgcaactgagaaattatttgtaaatcatgtggcatctatgtataataaaagaaagagacaactatattactcaatttcatatacatccaaaaagtataggctaatatatataacctgaagttgcagctggttctttttgatctgaagctgatgcttattaaaacaaatgatgtatggggagaggagaaggaagggcaaggaaggaattgacagataagaagcaaatggtttcttgtacagaggaattttgttttaatgtagaaagttatttgaaataaactaggtgaaatgaaattaactaaaggttttaatctgggattgaaagcctgatagcatttcctgcttctacaagtgtgccacatcaatccggtaatgccccagtgttattcacagacagaactttgtttcctgtgattttaaaataccgcgtctgttcctccatggaccagagtaattggcacattttaatgcataagctgggggtttcattttcccaggctctcttcaccatcactgcattggtagctaggagcttattgcttcaccccagtatggagttcagattacagtgttttccattacatttagattcatagaatctgaatggctgattaaatggccatctgatggctgaaagaggggcgtatttttcactctgtagtgaaaggcttggaggagtttctactttttattttaattatactttaaccaaagaattattttaaagtaaccttatatttaaaagatgattttgcaaaaaataaaaaataaaaaatatgccttctggagtgatgtctgtttggtaaatcattgttgataatttccttgttagtggtatttggaatgcatatagattgtcttgtcattgtgcttaacattaccataagtgtgtcttttccactcaactagctgtattcgtattaaaatgaagtctcttatttcaattacctagtgttgttgggaactaattgaacagctacagtaaaagaagttcctatctcattgcctttgtggaaaggcttccctatgtggtaaaagaaaggcattcctccgtaacctaggcactctgcaagtccagtgtttaatttcaaagcagtgatgaattgctcttttgaaattactctaagtaatccatgtgttagaatacagatgaacctccgtttgatttcacagccttcagcacaggcaactgttactgagtctgcacgaacttagataatgaggtgcagggttatttgcatttaaattgcaatccagcacacgtgtgagaaagaagaggcactagtctaaaaggctgcattgcggggagagatgagacaggcagaggagggtggggtaaagagcgatttaacatctatttaggttaatgttcactttacaaaggtgatgggggatattttgttaggtgatagcagatgcttttcatttttaaacatagaattaaaattggatttgcttctctttaatacttcaacatattgaatttccctaggaaagtgactagctataatgaaaattcaagcgaaaagggaaaaagattgtaaatgcagatgaaataacttcatttttaagtacaaataatagtaggattggtgtatgtaggtttaaaattatagtgatgactagtcgaacttaatatacaatcagttcttgcaaatactttacacttagctgccattacacaacaaattggaattttccagctgttcaactatcatggactctgtacaggatagatgtgtataatggaaaatatgtactgcttctttctttgattgccactcaagatggaaacaccatgccaaggcattttggttatacacagatcattctaaacctgttattttggagaggtgtattggtttctttctcatttataaggctattgtatttttttttgtatgtgattcaggtgtatttatttgaagactatttgtagttataggaaaaccacacctacctgtattgccaaattctttgtaaactctccgtggcacttgtgctttcctggctgagagctctcccctgttgatacagctatggcaccattgtaattacagatgcacctttcaggagcatctccattaaatggttcatagatgatttaataaaaagaaacttctcagttgatccag

SEQ ID NO: 36146 - DNA, 6260 bp, Homo sapiens
ggttaagtaattgcattatcagcctcctccagtctctggggagaggatgccaatgttaagtagcagcagacttccatctccccttgtctctgagtgaagactgcctgttttccctgccagtgcgaggacagcaaggtggatgccctgggggaagccctgcagaccacggtcagtcgctggaaatgtaagttctcggccccgctgcccctggagctctatacgtcgtccaacttcatcggcctctttgtaaaggaagacagtgcggaggtcctcaagaagtttgctgctgactttgctgcagaggctgcatccaaaaccgaagtgcatgtggaacctcataagaagcagctacatgtgaccctggcttaccacttccaagccagccacctacccaccctagagaaactggcccagaacattgacgtcaagctagggtgtgactgggtggctaccatattttctcgggatatccgatttgctaaccatgagacattacaggtcatctacccctataccccacaaaatgacgatgagctggagctggtccccggggacttcatcttcatgtctccaatggagcagaccagcaccagcgagggttggatctatggcacgtccttaaccaccggctgctctggactcctgcctgagaattacattaccaaggctgatgaatgcagcacctggatatttcatggttcttattcaatcttaaatacatcgtcatccaactctctcacgtttggggatggagtattggagaggcggccttatgaggaccaggggctcggggagacgactcctcttactatcatctgccagcccatgcagccgctgagggtcaacagccagcccggcccccagaagcgatgcctttttgtgtgtcggcatggtgagaggatggatgttgtgtttgggaagtactggctgtcccagtgcttcgatgccaaaggccgctacatacgcaccaacctgaacatgcctcatagtttacctcagcggagtggtggtttccgagattacgagaaagatgctcccatcactgtgtttggatgcatgcaagcaagactagtgggtgaagccttattagagagcaataccattatcgatcatgtctattgctccccgtcccttcgctgcgttcagactgcacacaatatcttgaaaggtttacaacaagaaaatcacttgaagatccgtgtagagcccggcttatttgagtggacaaaatgggttgctgggagcacattacctgcatggatacctccatcagagttagctgcagccaacctgagtgttgatacaacctacagacctcacattccaatcagcaaattagttgtttcagaatcctatgatacttatatcagtagaagtttccaagtaacaaaagaaataataagtgaatgtaaaagtaaaggaaataacatcctgattgtggcccacgcatcttcccttgaagcgtgtacctgccaacttcagggcctgtcacctcagaactccaaggacttcgtacaaatggtccgaaagatcccatatctgggattttgttcctgtgaagaattaggagaaactggaatatggcagctgacagatccaccaatccttcctcttacccatggaccaactgggggcttcaactggagagagaccttgcttcaagaataaaccacaccagtgaacaagaaggaaaggccttttggagtgtgtctttctgtgtgtttaaaaacagtgggaaaatccacaccacactctaagtggacagctcagaataatttagcatatttcctttcacacttaaagttcttaagatgagactgtgtaaatgagagaaagacttgattcagaggaaaaaaatgtgttctctctggactcttgcctagctcacaaggctttggagaattgtcttcctaaatcggggcacctgctacagaagagaatgtttcgttccctctgggtatgcacagctaaggggcctcatttctcccagagggagctgctggcccgctctaaggggtgcaagaggaaggagtgtgcccagaccagctgggggagcattgaaaggacagcttggggatggaatttttttttttttatctccattttccagttaggtagagccaagctgaggaatccttttaagattattagaaaacatgccctgaagagagttgttcttaggttacacatgaaatcctaccgtcactagcccccatacaccagtgttgctggctgaagatacccgcttaaggatgctaacatttaccctggtactgccacattttctctagagcagctggcccttcttgctacagccctatcccccctccttgcttctgtgaaatggggagacaaagcacttttgctctccaaagcacttttggatactcaggaggaaagataagatacatgtttgaagtattcaatcataggagcaaagaacttgcaaaatatgaagtgacttggaattaaccatgttgtagcctaacgtgctactgcatttctaaatcatcaatatttgcttgtctttgcccctagactctagactatgttaactagttaaggatgttacattttgaaaggatgtatgttagatatattatttgcagcaagaagttcattctgtgcaatatggacatgtttgcaaaccataccaagggtcaggttgttgtacacttacagtacgtgtcaaccataatggaacatccacaaatgcatcaattataccagggatgtatagtaagtcagggaactaatataaatgatgacagtcatggctgcactgctacttgtgctgtcgttttgtttgtttttctatgataatttaaaatacataggtagggctactgaggaaatttggagagccacattctgtggtttctcattatacttacttcctgcatttagagggagtttatttaaaagaaataaatgacaatcaaaccaaatcatcagttatcaatgtctgtttaattgtgtgactatctgactgttgatggccacagatgatggtctcctatggtatagttcactctgtagaagatgtatgcaaagtgaaatgccagccctttaaagagacattagttagtgtaaaatggatctttacatgttgcagtaacattgactatgtttcaaaactcagatgcataaaacgtaaggtatataaaaatacatctatgcttgcgtttgaaactacaacttgataacccctagaaagaagaggacatgagaggatgctggctatatatgttaatgagcaaaaggattatagttgttttgttttgtttttagagacagggtctcactataatgcttagactggtcttgaactcctgggctcaagcgatcctcctgcccctgtctcccaaagtgctaggattacaggtgtgagccaccacacctggcccatagttgtattttttttaggtcacttagaaaaatatgtcatgtattttacattttgagaaacaaatcaatcatggtttcttctagcgttgcgcaaacactgacccagcttctgggtatggaaataaccctgtgatgatgtgttaatataaaatgttgggagggaatattcccaataaaggtcttaagagaaaagtcacattacaagtaatgtaatggctctaccattcattcttctggtatttgtaatgaagtgaatccactgtttaatcagatccataatctttaacagattcaccacaaattttcatgggcgttgagtgctcagaataatgcttgaacacctcaccttgaaactgtagcagtgtgttctgggcagtatctgtaatgtatgaaatagagtctggaataggttatccactccatcttctaggttatcttagttgtatgacgaactgataaatctgtctgactgggctacaatccattgttcttagtccaatatggacactgccttaggcaatggtctatataagcaaaaggagatagagatctgaaataattttccgaataattcaggtggaaaacaagaaagattgtatttctctgctttcatttcaatttcattatttcaaattgcttgtcaaaatggcccaaaagatctgaattcacattaagttccccttgcacacttacctatttaaaaaactaaacttgcactgcaactgagaaattatttgtaaatcatgtggcatctatgtataataaaagaaagagacaactatattactcaatttcatatacatccaaaaagtataggctaatatatataacctgaagttgcagctggttctttttgatctgaagctgatgcttattaaaacaaatgatgtatggggagaggagaaggaagggcaaggaaggaattgacagataagaagcaaatggtttcttgtacagaggaattttgttttaatgtagaaagttatttgaaataaactaggtgaaatgaaattaactaaaggttttaatctgggattgaaagcctgatagcatttcctgcttctacaagtgtgccacatcaatccggtaatgccccagtgttattcacagacagaactttgtttcctgtgattttaaaataccgcgtctgttcctccatggaccagagtaattggcacattttaatgcataagctgggggtttcattttcccaggctctcttcaccatcactgcattggtagctaggagcttattgcttcaccccagtatggagttcagattacagtgttttccattacatttagattcatagaatctgaatggctgattaaatggccatctgatggctgaaagaggggcgtatttttcactctgtagtgaaaggcttggaggagtttctactttttattttaattatactttaaccaaagaattattttaaagtaaccttatatttaaaagatgattttgcaaaaaataaaaaataaaaaatatgccttctggagtgatgtctgtttggtaaatcattgttgataatttccttgttagtggtatttggaatgcatatagattgtcttgtcattgtgcttaacattaccataagtgtgtcttttccactcaactagctgtattcgtattaaaatgaagtctcttatttcaattacctagtgttgttgggaactaattgaacagctacagtaaaagaagttcctatctcattgcctttgtggaaaggcttccctatgtggtaaaagaaaggcattcctccgtaacctaggcactctgcaagtccagtgtttaatttcaaagcagtgatgaattgctcttttgaaattactctaagtaatccatgtgttagaatacagatgaacctccgtttgatttcacagccttcagcacaggcaactgttactgagtctgcacgaacttagataatgaggtgcagggttatttgcatttaaattgcaatccagcacacgtgtgagaaagaagaggcactagtctaaaaggctgcattgcggggagagatgagacaggcagaggagggtggggtaaagagcgatttaacatctatttaggttaatgttcactttacaaaggtgatgggggatattttgttaggtgatagcagatgcttttcatttttaaacatagaattaaaattggatttgcttctctttaatacttcaacatattgaatttccctaggaaagtgactagctataatgaaaattcaagcgaaaagggaaaaagattgtaaatgcagatgaaataacttcatttttaagtacaaataatagtaggattggtgtatgtaggtttaaaattatagtgatgactagtcgaacttaatatacaatcagttcttgcaaatactttacacttagctgccattacacaacaaattggaattttccagctgttcaactatcatggactctgtacaggatagatgtgtataatggaaaatatgtactgcttctttctttgattgccactcaagatggaaacaccatgccaaggcattttggttatacacagatcattctaaacctgttattttggagaggtgtattggtttctttctcatttataaggctattgtatttttttttgtatgtgattcaggtgtatttatttgaagactatttgtagttataggaaaaccacacctacctgtattgccaaattctttgtaaactctccgtggcacttgtgctttcctggctgagagctctcccctgttgatacagctatggcaccattgtaattacagatgcacctttcaggagcatctccattaaatggttcatagatgatttaataaaaagaaacttctcagttgatccag

SEQ ID NO: 36147 - DNA, 6975 bp, Homo sapiens
attagctaggcatggtggcgggcgcctgtagtcccagctactcgggaggctgaggcaggagaatggcgtgaacccgggaggcagagcttgcagtgagccgagatggatcactgcactccagcctgggtgacagagtaagactctctcaaaaaaatagaaaaaagaaaaaagaaaaccatcagcaccacttctaatactttctgccaaaggggctgaaaacaagaatctgctctgtcagggatctgggtcactaagaatgagtgggtgaagaggaaggaggaaaaaccaagacatgacaacctttagagaagcaaaaataaaactctaatgtggaaactgctgaaaatagactgcctgggctgtcagactgcatgcaaatctgatgctaatcacatggaaattaattacaagtcctaacttccatatgtcttgatatgacccttgggggaaaacctgctgcaggtgtctactccccaccacagaggattgagtggaacacaggctttgatgtcgcctccttcacactcagctcttgccactgcagggagaggaggctaaaaatattaacaatagaaatttgatttcttctttcagacaaaaagccttggcatccacgggaggaagaagtgttcaggcagcatgtgactggttattctcccatgtcggtgaccccttcctggatgaccccctgccccgggagtacgtcctctacctccgtcccaccggccccttagcacagaagctttccgacttttggcagcagtcgaagcagatctgcgggaagaacaaggcacacaacatcttcccccacatcacactctgccagttctttatgtgcgaggacagcaaggtggatgccctgggggaagccctgcagaccacggtcagtcgctggaaatgtaagttctcggccccgctgcccctggagctctatacgtcgtccaacttcatcggcctctttgtaaaggaagacagtgcggaggtcctcaagaagtttgctgctgactttgctgcagaggctgcatccaaaaccgaagtgcatgtggaacctcataagaagcagctacatgtgaccctggcttaccacttccaagccagccacctacccaccctagagaaactggcccagaacattgacgtcaagctagggtgtgactgggtggctaccatattttctcgggatatccgatttgctaaccatgagacattacaggtcatctacccctataccccacaaaatgacgatgagctggagctggtccccggggacttcatcttcatgtctccaatggagcagaccagcaccagcgagggttggatctatggcacgtccttaaccaccggctgctctggactcctgcctgagaattacattaccaaggctgatgaatgcagcacctggatatttcatggttcttattcaatcttaaatacatcgtcatccaactctctcacgtttggggatggagtattggagaggcggccttatgaggaccaggggctcggggagacgactcctcttactatcatctgccagcccatgcagccgctgagggtcaacagccagcccggcccccagaagcgatgcctttttgtgtgtcggcatggtgagaggatggatgttgtgtttgggaagtactggctgtcccagtgcttcgatgccaaaggccgctacatacgcaccaacctgaacatgcctcatagtttacctcagcggagtggtggtttccgagattacgagaaagatgctcccatcactgtgtttggatgcatgcaagcaagactagtgggtgaagccttattagagagcaataccattatcgatcatgtctattgctccccgtcccttcgctgcgttcagactgcacacaatatcttgaaaggtttacaacaagaaaatcacttgaagatccgtgtagagcccggcttatttgagtggacaaaatgggttgctgggagcacattacctgcatggatacctccatcagagttagctgcagccaacctgagtgttgatacaacctacagacctcacattccaatcagcaaattagttgtttcagaatcctatgatacttatatcagtagaagtttccaagtaacaaaagaaataataagtgaatgtaaaagtaaaggaaataacatcctgattgtggcccacgcatcttcccttgaagcgtgtacctgccaacttcagggcctgtcacctcagaactccaaggacttcgtacaaatggtccgaaagatcccatatctgggattttgttcctgtgaagaattaggagaaactggaatatggcagctgacagatccaccaatccttcctcttacccatggaccaactgggggcttcaactggagagagaccttgcttcaagaataaaccacaccagtgaacaagaaggaaaggccttttggagtgtgtctttctgtgtgtttaaaaacagtgggaaaatccacaccacactctaagtggacagctcagaataatttagcatatttcctttcacacttaaagttcttaagatgagactgtgtaaatgagagaaagacttgattcagaggaaaaaaatgtgttctctctggactcttgcctagctcacaaggctttggagaattgtcttcctaaatcggggcacctgctacagaagagaatgtttcgttccctctgggtatgcacagctaaggggcctcatttctcccagagggagctgctggcccgctctaaggggtgcaagaggaaggagtgtgcccagaccagctgggggagcattgaaaggacagcttggggatggaatttttttttttttatctccattttccagttaggtagagccaagctgaggaatccttttaagattattagaaaacatgccctgaagagagttgttcttaggttacacatgaaatcctaccgtcactagcccccatacaccagtgttgctggctgaagatacccgcttaaggatgctaacatttaccctggtactgccacattttctctagagcagctggcccttcttgctacagccctatcccccctccttgcttctgtgaaatggggagacaaagcacttttgctctccaaagcacttttggatactcaggaggaaagataagatacatgtttgaagtattcaatcataggagcaaagaacttgcaaaatatgaagtgacttggaattaaccatgttgtagcctaacgtgctactgcatttctaaatcatcaatatttgcttgtctttgcccctagactctagactatgttaactagttaaggatgttacattttgaaaggatgtatgttagatatattatttgcagcaagaagttcattctgtgcaatatggacatgtttgcaaaccataccaagggtcaggttgttgtacacttacagtacgtgtcaaccataatggaacatccacaaatgcatcaattataccagggatgtatagtaagtcagggaactaatataaatgatgacagtcatggctgcactgctacttgtgctgtcgttttgtttgtttttctatgataatttaaaatacataggtagggctactgaggaaatttggagagccacattctgtggtttctcattatacttacttcctgcatttagagggagtttatttaaaagaaataaatgacaatcaaaccaaatcatcagttatcaatgtctgtttaattgtgtgactatctgactgttgatggccacagatgatggtctcctatggtatagttcactctgtagaagatgtatgcaaagtgaaatgccagccctttaaagagacattagttagtgtaaaatggatctttacatgttgcagtaacattgactatgtttcaaaactcagatgcataaaacgtaaggtatataaaaatacatctatgcttgcgtttgaaactacaacttgataacccctagaaagaagaggacatgagaggatgctggctatatatgttaatgagcaaaaggattatagttgttttgttttgtttttagagacagggtctcactataatgcttagactggtcttgaactcctgggctcaagcgatcctcctgcccctgtctcccaaagtgctaggattacaggtgtgagccaccacacctggcccatagttgtattttttttaggtcacttagaaaaatatgtcatgtattttacattttgagaaacaaatcaatcatggtttcttctagcgttgcgcaaacactgacccagcttctgggtatggaaataaccctgtgatgatgtgttaatataaaatgttgggagggaatattcccaataaaggtcttaagagaaaagtcacattacaagtaatgtaatggctctaccattcattcttctggtatttgtaatgaagtgaatccactgtttaatcagatccataatctttaacagattcaccacaaattttcatgggcgttgagtgctcagaataatgcttgaacacctcaccttgaaactgtagcagtgtgttctgggcagtatctgtaatgtatgaaatagagtctggaataggttatccactccatcttctaggttatcttagttgtatgacgaactgataaatctgtctgactgggctacaatccattgttcttagtccaatatggacactgccttaggcaatggtctatataagcaaaaggagatagagatctgaaataattttccgaataattcaggtggaaaacaagaaagattgtatttctctgctttcatttcaatttcattatttcaaattgcttgtcaaaatggcccaaaagatctgaattcacattaagttccccttgcacacttacctatttaaaaaactaaacttgcactgcaactgagaaattatttgtaaatcatgtggcatctatgtataataaaagaaagagacaactatattactcaatttcatatacatccaaaaagtataggctaatatatataacctgaagttgcagctggttctttttgatctgaagctgatgcttattaaaacaaatgatgtatggggagaggagaaggaagggcaaggaaggaattgacagataagaagcaaatggtttcttgtacagaggaattttgttttaatgtagaaagttatttgaaataaactaggtgaaatgaaattaactaaaggttttaatctgggattgaaagcctgatagcatttcctgcttctacaagtgtgccacatcaatccggtaatgccccagtgttattcacagacagaactttgtttcctgtgattttaaaataccgcgtctgttcctccatggaccagagtaattggcacattttaatgcataagctgggggtttcattttcccaggctctcttcaccatcactgcattggtagctaggagcttattgcttcaccccagtatggagttcagattacagtgttttccattacatttagattcatagaatctgaatggctgattaaatggccatctgatggctgaaagaggggcgtatttttcactctgtagtgaaaggcttggaggagtttctactttttattttaattatactttaaccaaagaattattttaaagtaaccttatatttaaaagatgattttgcaaaaaataaaaaataaaaaatatgccttctggagtgatgtctgtttggtaaatcattgttgataatttccttgttagtggtatttggaatgcatatagattgtcttgtcattgtgcttaacattaccataagtgtgtcttttccactcaactagctgtattcgtattaaaatgaagtctcttatttcaattacctagtgttgttgggaactaattgaacagctacagtaaaagaagttcctatctcattgcctttgtggaaaggcttccctatgtggtaaaagaaaggcattcctccgtaacctaggcactctgcaagtccagtgtttaatttcaaagcagtgatgaattgctcttttgaaattactctaagtaatccatgtgttagaatacagatgaacctccgtttgatttcacagccttcagcacaggcaactgttactgagtctgcacgaacttagataatgaggtgcagggttatttgcatttaaattgcaatccagcacacgtgtgagaaagaagaggcactagtctaaaaggctgcattgcggggagagatgagacaggcagaggagggtggggtaaagagcgatttaacatctatttaggttaatgttcactttacaaaggtgatgggggatattttgttaggtgatagcagatgcttttcatttttaaacatagaattaaaattggatttgcttctctttaatacttcaacatattgaatttccctaggaaagtgactagctataatgaaaattcaagcgaaaagggaaaaagattgtaaatgcagatgaaataacttcatttttaagtacaaataatagtaggattggtgtatgtaggtttaaaattatagtgatgactagtcgaacttaatatacaatcagttcttgcaaatactttacacttagctgccattacacaacaaattggaattttccagctgttcaactatcatggactctgtacaggatagatgtgtataatggaaaatatgtactgcttctttctttgattgccactcaagatggaaacaccatgccaaggcattttggttatacacagatcattctaaacctgttattttggagaggtgtattggtttctttctcatttataaggctattgtatttttttttgtatgtgattcaggtgtatttatttgaagactatttgtagttataggaaaaccacacctacctgtattgccaaattctttgtaaactctccgtggcacttgtgctttcctggctgagagctctcccctgttgatacagctatggcaccattgtaattacagatgcacctttcaggagcatctccattaaatggttcatagatgatttaataaaaagaaacttctcagttgatccag

SEQ ID NO: 36148 - DNA, 4996 bp, Homo sapiens
ttatcagtaacaaagcactttcaaaatattgcttaggcaaattgtcttcttgagtgtgtttgctcccctgcagagcatttagttagcttccagtatttgcaaagtttccatgtctttatagaaacagtcttcccataccttgccattttcccccaggaaataacatcctgattgtggcccacgcatcttcccttgaagcgtgtacctgccaacttcagggcctgtcacctcagaactccaaggacttcgtacaaatggtccgaaagatcccatatctgggattttgttcctgtgaagaattaggagaaactggaatatggcagctgacagatccaccaatccttcctcttacccatggaccaactgggggcttcaactggagagagaccttgcttcaagaataaaccacaccagtgaacaagaaggaaaggccttttggagtgtgtctttctgtgtgtttaaaaacagtgggaaaatccacaccacactctaagtggacagctcagaataatttagcatatttcctttcacacttaaagttcttaagatgagactgtgtaaatgagagaaagacttgattcagaggaaaaaaatgtgttctctctggactcttgcctagctcacaaggctttggagaattgtcttcctaaatcggggcacctgctacagaagagaatgtttcgttccctctgggtatgcacagctaaggggcctcatttctcccagagggagctgctggcccgctctaaggggtgcaagaggaaggagtgtgcccagaccagctgggggagcattgaaaggacagcttggggatggaatttttttttttttatctccattttccagttaggtagagccaagctgaggaatccttttaagattattagaaaacatgccctgaagagagttgttcttaggttacacatgaaatcctaccgtcactagcccccatacaccagtgttgctggctgaagatacccgcttaaggatgctaacatttaccctggtactgccacattttctctagagcagctggcccttcttgctacagccctatcccccctccttgcttctgtgaaatggggagacaaagcacttttgctctccaaagcacttttggatactcaggaggaaagataagatacatgtttgaagtattcaatcataggagcaaagaacttgcaaaatatgaagtgacttggaattaaccatgttgtagcctaacgtgctactgcatttctaaatcatcaatatttgcttgtctttgcccctagactctagactatgttaactagttaaggatgttacattttgaaaggatgtatgttagatatattatttgcagcaagaagttcattctgtgcaatatggacatgtttgcaaaccataccaagggtcaggttgttgtacacttacagtacgtgtcaaccataatggaacatccacaaatgcatcaattataccagggatgtatagtaagtcagggaactaatataaatgatgacagtcatggctgcactgctacttgtgctgtcgttttgtttgtttttctatgataatttaaaatacataggtagggctactgaggaaatttggagagccacattctgtggtttctcattatacttacttcctgcatttagagggagtttatttaaaagaaataaatgacaatcaaaccaaatcatcagttatcaatgtctgtttaattgtgtgactatctgactgttgatggccacagatgatggtctcctatggtatagttcactctgtagaagatgtatgcaaagtgaaatgccagccctttaaagagacattagttagtgtaaaatggatctttacatgttgcagtaacattgactatgtttcaaaactcagatgcataaaacgtaaggtatataaaaatacatctatgcttgcgtttgaaactacaacttgataacccctagaaagaagaggacatgagaggatgctggctatatatgttaatgagcaaaaggattatagttgttttgttttgtttttagagacagggtctcactataatgcttagactggtcttgaactcctgggctcaagcgatcctcctgcccctgtctcccaaagtgctaggattacaggtgtgagccaccacacctggcccatagttgtattttttttaggtcacttagaaaaatatgtcatgtattttacattttgagaaacaaatcaatcatggtttcttctagcgttgcgcaaacactgacccagcttctgggtatggaaataaccctgtgatgatgtgttaatataaaatgttgggagggaatattcccaataaaggtcttaagagaaaagtcacattacaagtaatgtaatggctctaccattcattcttctggtatttgtaatgaagtgaatccactgtttaatcagatccataatctttaacagattcaccacaaattttcatgggcgttgagtgctcagaataatgcttgaacacctcaccttgaaactgtagcagtgtgttctgggcagtatctgtaatgtatgaaatagagtctggaataggttatccactccatcttctaggttatcttagttgtatgacgaactgataaatctgtctgactgggctacaatccattgttcttagtccaatatggacactgccttaggcaatggtctatataagcaaaaggagatagagatctgaaataattttccgaataattcaggtggaaaacaagaaagattgtatttctctgctttcatttcaatttcattatttcaaattgcttgtcaaaatggcccaaaagatctgaattcacattaagttccccttgcacacttacctatttaaaaaactaaacttgcactgcaactgagaaattatttgtaaatcatgtggcatctatgtataataaaagaaagagacaactatattactcaatttcatatacatccaaaaagtataggctaatatatataacctgaagttgcagctggttctttttgatctgaagctgatgcttattaaaacaaatgatgtatggggagaggagaaggaagggcaaggaaggaattgacagataagaagcaaatggtttcttgtacagaggaattttgttttaatgtagaaagttatttgaaataaactaggtgaaatgaaattaactaaaggttttaatctgggattgaaagcctgatagcatttcctgcttctacaagtgtgccacatcaatccggtaatgccccagtgttattcacagacagaactttgtttcctgtgattttaaaataccgcgtctgttcctccatggaccagagtaattggcacattttaatgcataagctgggggtttcattttcccaggctctcttcaccatcactgcattggtagctaggagcttattgcttcaccccagtatggagttcagattacagtgttttccattacatttagattcatagaatctgaatggctgattaaatggccatctgatggctgaaagaggggcgtatttttcactctgtagtgaaaggcttggaggagtttctactttttattttaattatactttaaccaaagaattattttaaagtaaccttatatttaaaagatgattttgcaaaaaataaaaaataaaaaatatgccttctggagtgatgtctgtttggtaaatcattgttgataatttccttgttagtggtatttggaatgcatatagattgtcttgtcattgtgcttaacattaccataagtgtgtcttttccactcaactagctgtattcgtattaaaatgaagtctcttatttcaattacctagtgttgttgggaactaattgaacagctacagtaaaagaagttcctatctcattgcctttgtggaaaggcttccctatgtggtaaaagaaaggcattcctccgtaacctaggcactctgcaagtccagtgtttaatttcaaagcagtgatgaattgctcttttgaaattactctaagtaatccatgtgttagaatacagatgaacctccgtttgatttcacagccttcagcacaggcaactgttactgagtctgcacgaacttagataatgaggtgcagggttatttgcatttaaattgcaatccagcacacgtgtgagaaagaagaggcactagtctaaaaggctgcattgcggggagagatgagacaggcagaggagggtggggtaaagagcgatttaacatctatttaggttaatgttcactttacaaaggtgatgggggatattttgttaggtgatagcagatgcttttcatttttaaacatagaattaaaattggatttgcttctctttaatacttcaacatattgaatttccctaggaaagtgactagctataatgaaaattcaagcgaaaagggaaaaagattgtaaatgcagatgaaataacttcatttttaagtacaaataatagtaggattggtgtatgtaggtttaaaattatagtgatgactagtcgaacttaatatacaatcagttcttgcaaatactttacacttagctgccattacacaacaaattggaattttccagctgttcaactatcatggactctgtacaggatagatgtgtataatggaaaatatgtactgcttctttctttgattgccactcaagatggaaacaccatgccaaggcattttggttatacacagatcattctaaacctgttattttggagaggtgtattggtttctttctcatttataaggctattgtatttttttttgtatgtgattcaggtgtatttatttgaagactatttgtagttataggaaaaccacacctacctgtattgccaaattctttgtaaactctccgtggcacttgtgctttcctggctgagagctctcccctgttgatacagctatggcaccattgtaattacagatgcacctttcaggagcatctccattaaatggttcatagatgatttaataaaaagaaacttctcagttgatccag

SEQ ID NO: 36149 - DNA, 3764 bp, Homo sapiens
ctcattgcaaattcccggactgctaggcgaggagagggaagggggcggaggagacagggctactgcaggcgcagagctgggggcagccgggggcccgagtggctgaggctggtcccgcagcggccgcttgccggcgttctggctcctgtggcctcaccaggaagcgtcagagtcccgacactggggaagctcggagcgccgcctccgctgccgccgcctcctgcctggctctgggtccccgagccccctcccctggcccagcccgactccctcctccttcccgaaccatccggctcgggctccttccctggcgatggctggccgctgagccatggctcagtacggccaccccagtccgctcggcatggctgcgagagaggagctgtacagcaaagtcaccccccggaggaaccgccaacagcgccccggcaccatcaagcatggatcggcgctggacgtgctcctctccatggggttccccagagcccgcgcacaaaaagccttggcatccacgggaggaagaagtgttcaggcagcatgtgactggttattctcccatgtcggtgaccccttcctggatgaccccctgccccgggagtacgtcctctacctccgtcccaccggccccttagcacagaagctttccgacttttggcagcagtcgaagcagatctgcgggaagaacaaggcacacaacatcttcccccacatcacactctgccagttctttatgtgcgaggacagcaaggtggatgccctgggggaagccctgcagaccacggtcagtcgctggaaatgtaagttctcggccccgctgcccctggagctctatacgtcgtccaacttcatcggcctctttgtaaaggaagacagtgcggaggtcctcaagaagtttgctgctgactttgctgcagaggctgcatccaaaaccgaagtgcatgtggaacctcataagaagcagctacatgtgaccctggcttaccacttccaagccagccacctacccaccctagagaaactggcccagaacattgacgtcaagctagggtgtgactgggtggctaccatattttctcgggatatccgatttgctaaccatgagacattacaggtcatctacccctataccccacaaaatgacgatgagctggagctggtccccggggacttcatcttcatgtctccaatggagcagaccagcaccagcgagggttggatctatggcacgtccttaaccaccggctgctctggactcctgcctgagaattacattaccaaggctgatgaatgcagcacctggatatttcatggttcttattcaatcttaaatacatcgtcatccaactctctcacgtttggggatggagtattggagaggcggccttatgaggaccaggggctcggggagacgactcctcttactatcatctgccagcccatgcagccgctgagggtcaacagccagcccggcccccagaagcgatgcctttttgtgtgtcggcatggtgagaggatggatgttgtgtttgggaagtactggctgtcccagtgcttcgatgccaaaggccgctacatacgcaccaacctgaacatgcctcatagtttacctcagcggagtggtggtttccgagattacgagaaagatgctcccatcactgtgtttggatgcatgcaagcaagactagtgggtgaagccttattagagagcaataccattatcgatcatgtctattgctccccgtcccttcgctgcgttcagactgcacacaatatcttgaaaggtttacaacaagaaaatcacttgaagatccgtgtagagcccggcttatttgagtggacaaaatgggttgctgggagcacattacctgcatggatacctccatcagagttagctgcagccaacctgagtgttgatacaacctacagacctcacattccaatcagcaaattagttgtttcagaatcctatgatacttatatcagtagaagtttccaagtaacaaaagaaataataagtgaatgtaaaagtaaaggaaataacatcctgattgtggcccacgcatcttcccttgaagcgtgtacctgccaacttcagggcctgtcacctcagaactccaaggacttcgtacaaatggtccgaaagatcccatatctgggattttgttcctgtgaagaattaggagaaactggaatatggcagctgacagatccaccaatccttcctcttacccatggaccaactgggggcttcaactggagagagaccttgcttcaagaataaaccacaccagtgaacaagaaggaaaggccttttggagtgtgtctttctgtgtgtttaaaaacagtgggaaaatccacaccacactctaagtggacagctcagaataatttagcatatttcctttcacacttaaagttcttaagatgagactgtgtaaatgagagaaagacttgattcagaggaaaaaaatgtgttctctctggactcttgcctagctcacaaggctttggagaattgtcttcctaaatcggggcacctgctacagaagagaatgtttcgttccctctgggtatgcacagctaaggggcctcatttctcccagagggagctgctggcccgctctaaggggtgcaagaggaaggagtgtgcccagaccagctgggggagcattgaaaggacagcttggggatggaatttttttttttttatctccattttccagttaggtagagccaagctgaggaatccttttaagattattagaaaacatgccctgaagagagttgttcttaggttacacatgaaatcctaccgtcactagcccccatacaccagtgttgctggctgaagatacccgcttaaggatgctaacatttaccctggtactgccacattttctctagagcagctggcccttcttgctacagccctatcccccctccttgcttctgtgaaatggggagacaaagcacttttgctctccaaagcacttttggatactcaggaggaaagataagatacatgtttgaagtattcaatcataggagcaaagaacttgcaaaatatgaagtgacttggaattaaccatgttgtagcctaacgtgctactgcatttctaaatcatcaatatttgcttgtctttgcccctagactctagactatgttaactagttaaggatgttacattttgaaaggatgtatgttagatatattatttgcagcaagaagttcattctgtgcaatatggacatgtttgcaaaccataccaagggtcaggttgttgtacacttacagtacgtgtcaaccataatggaacatccacaaatgcatcaattataccagggatgtatagtaagtcagggaactaatataaatgatgacagtcatggctgcactgctacttgtgctgtcgttttgtttgtttttctatgataatttaaaatacataggtagggctactgaggaaatttggagagccacattctgtggtttctcattatacttacttcctgcatttagagggagtttatttaaaagaaataaatgacaatcaaaccaaaaaaaaaaaagaaaaaaaaaatgtgcgggcacgaaagtctaacctcgtggcggcggcccagggtaggaccgtccaggtgcgcggaaccgccggagggcggtcccccaaaaggcggcacgggctcgacacccggctggctcgtctcgggccgacatcccccccccggcgcgttccgaggacaaaaagccacagcaaaagcgcaac

SEQ ID NO: 36150 - DNA, 2630 bp, Homo sapiens
  misc_feature (2579)..(2582): n is a, c, g, or t
  misc_feature (2605)..(2605): n is a, c, g, or t
ctcattgcaaattcccggactgctaggcgaggagagggaagggggcggaggagacagggctactgcaggcgcagagctgggggcagccgggggcccgagtggctgaggctggtcccgcagcggccgcttgccggcgttctggctcctgtggcctcaccaggaagcgtcagagtcccgacactggggaagctcggagcgccgcctccgctgccgccgcctcctgcctggctctgggtccccgagccccctcccctggcccagcccgactccctcctccttcccgaaccatccggctcgggctccttccctggcgatggctggccgctgagccatggctcagtacggccaccccagtccgctcggcatggctgcgagagaggagctgtacagcaaagtcaccccccggaggaaccgccaacagcgccccggcaccatcaagcatggatcggcgctggacgtgctcctctccatggggttccccagagcccgcgcacaaaaagccttggcatccacgggaggaagaagtgttcaggcagcatgtgactggttattctcccatgtcggtgaccccttcctggatgaccccctgccccgggagtacgtcctctacctccgtcccaccggccccttagcacagaagctttccgacttttggcagcagtcgaagcagatctgcgggaagaacaaggcacacaacatcttcccccacatcacactctgccagttctttatgtgcgaggacagcaaggtggatgccctgggggaagccctgcagaccacggtcagtcgctggaaatgtaagttctcggccccgctgcccctggagctctatacgtcgtccaacttcatcggcctctttgtaaaggaagacagtgcggaggtcctcaagaagtttgctgctgactttgctgcagaggctgcatccaaaaccgaagtgcatgtggaacctcataagaagcagctacatgtgaccctggcttaccacttccaagccagccacctacccaccctagagaaactggcccagaacattgacgtcaagctagggtgtgactgggtggctaccatattttctcgggatatccgatttgctaaccatgagacattacaggtcatctacccctataccccacaaaatgacgatgagctggagctggtccccggggacttcatcttcatgtctccaatggagcagaccagcaccagcgagggttggatctatggcacgtccttaaccaccggctgctctggactcctgcctgagaattacattaccaaggctgatgaatgcagcacctggatatttcatggttcttattcaatcttaaatacatcgtcatccaactctctcacgtttggggatggagtattggagaggcggccttatgaggaccaggggctcggggagacgactcctcttactatcatctgccagcccatgcagccgctgagggtcaacagccagcccggcccccagaagcgatgcctttttgtgtgtcggcatggtgagaggatggatgttgtgtttgggaagtactggctgtcccagtgcttcgatgccaaaggccgctacatacgcaccaacctgaacatgcctcatagtttacctcagcggagtggtggtttccgagattacgagaaagatgctcccatcactgtgtttggatgcatgcaagcaagactagtgggtgaagccttattagagagcaataccattatcgatcatgtctattgctccccgtcccttcgctgcgttcagactgcacacaatatcttgaaaggtttacaacaagaaaatcacttgaagatccgtgtagagcccggcttatttgagtggacaaaatgggttgctgggagcacattacctgcatggatacctccatcagagttagctgcagccaacctgagtgttgatacaacctacagacctcacattccaatcagcaaattagttgtttcagaatcctatgatacttatatcagtagaagtttccaagtaacaaaagaaataataagtgaatgtaaaagtaaaggaaataacatcctgattgtggcccacgcatcttcccttgaagcgtgtacctgccaacttcagggcctgtcacctcagaactccaaggacttcgtacaaatggtccgaaagatcccatatctgggattttgttcctgtgaagaattaggagaaactggaatatggcagctgacagatccaccaatccttcctcttacccatggaccaactgggggcttcaactggagagagaccttgcttcaagaataaaccacaccagtgaacaagaaggaaaggccttttggagtgtgtctttctgtgtgtttaaaaacagtgggaaaatccacaccacactctaagtggacagctcagaataatttagcatatttcctttcacacttaaagttcttaagatgagactgtgtaaatgagagaaagacttgattcagaggaaaaaaatgtgttctctctggactcttgcctagctcacaaggctttggagaattgtcttcctaaatcggggcacctgctacagaagagaatgtttcgttccctctggggaaccccnnnnaaggggcccttttttttcccagnggagggggggccccttttattgcgg

SEQ ID NO: 36151 - DNA, 1919 bp, Homo sapiens
ctcattgcaaattcccggactgctaggcgaggagagggaagggggcggaggagacagggctactgcaggcgcagagctgggggcagccgggggcccgagtggctgaggctggtcccgcagcggccgcttgccggcgttctggctcctgtggcctcaccaggaagcgtcagagtcccgacactggggaagctcggagcgccgcctccgctgccgccgcctcctgcctggctctgggtccccgagccccctcccctggcccagcccgactccctcctccttcccgaaccatccggctcgggctccttccctggcgatggctggccgctgagccatggctcagtacggccaccccagtccgctcggcatggctgcgagagaggagctgtacagcaaagtcaccccccggaggaaccgccaacagcgccccggcaccatcaagcatggatcggcgctggacgtgctcctctccatggggttccccagagcccgcgcacaaaaagccttggcatccacgggaggaagaagtgttcaggcagcatgtgactggttattctcccatgtcggtgaccccttcctggatgaccccctgccccgggagtacgtcctctacctccgtcccaccggccccttagcacagaagctttccgacttttggcagcagtcgaagcagatctgcgggaagaacaaggcacacaacatcttcccccacatcacactctgccagttctttatgtgcgaggacagcaaggtggatgccctgggggaagccctgcagaccacggtcagtcgctggaaatgtaagttctcggccccgctgcccctggagctctatacgtcgtccaacttcatcggcctctttgtaaaggaagacagtgcggaggtcctcaagaagtttgctgctgactttgctgcagaggctgcatccaaaaccgaagtgcatgtggaacctcataagaagcagctacatgtgaccctggcttaccacttccaagccagccacctacccaccctagagaaactggcccagaacattgacgtcaagctagggtgtgactgggtggctaccatattttctcgggatatccgatttgctaaccatgagacattacaggtcatctacccctataccccacaaaatgacgatgagctggagctggtccccggggacttcatcttcatgtctccaatggagcagaccagcaccagcgagggttggatctatggcacgtccttaaccaccggctgctctggactcctgcctgagaattacattaccaaggctgatgaatgcagcacctggatatttcatggttcttattcaatcttaaatacatcgtcatccaactctctcacgtttggggatggagtattggagaggcggccttatgaggaccaggggctcggggagacgactcctcttactatcatctgccagcccatgcagccgctgagggtcaacagccagcccggcccccagaagcgatgcctttttgtgtgtcggcatggtgagaggatggatgttgtgtttgggaagtactggctgtcccagtgcttcgatgccaaaggccgctacatacgcaccaacctgaacatgcctcatagtttacctcagcggagtggtggtttccgagattacgagaaagatgctcccatcactgtgtttggatgcatgcaagcaagactagtgggtaagtatcctggagtgactgcactccaggcatttcttgcctcctccttcaaaacactggtaccatggatatgcaagacacttcctgtgggtttctataactttcctacaagtttcctcaattcaaaaggaacttactacacaaccattaagtttaggacactgtgctcagccctgggttggttgaccaaagtgaatgaggtgtggtccttattgaggagcacgtgatcca

SEQ ID NO: 36152 - DNA, 1112 bp, Homo sapiens
ctgcttcttgaggatcccctctccctactgtatcctaggcactctgcaagtccagtgtttaatttcaaagcagtgatgaattgctcttttgaaattactctaagtaatccatgtgttagaatacagatgaacctccgtttgatttcacagccttcagcacaggcaactgttactgagtctgcacgaacttagataatgaggtgcagggttatttgcatttaaattgcaatccagcacacgtgtgagaaagaagaggcactagtctaaaaggctgcattgcggggagagatgagacaggcagaggagggtggggtaaagagcgatttaacatctatttaggttaatgttcactttacaaaggtgatgggggatattttgttaggtgatagcagatgcttttcatttttaaacatagaattaaaattggatttgcttctctttaatacttcaacatattgaatttccctaggaaagtgactagctataatgaaaattcaagcgaaaagggaaaaagattgtaaatgcagatgaaataacttcatttttaagtacaaataatagtaggattggtgtatgtaggtttaaaattatagtgatgactagtcgaacttaatatacaatcagttcttgcaaatactttacacttagctgccattacacaacaaattggaattttccagctgttcaactatcatggactctgtacaggatagatgtgtataatggaaaatatgtactgcttctttctttgattgccactcaagatggaaacaccatgccaaggcattttggttatacacagatcattctaaacctgttattttggagaggtgtattggtttctttctcatttataaggctattgtatttttttttgtatgtgattcaggtgtatttatttgaagactatttgtagttataggaaaaccacacctacctgtattgccaaattctttgtaaactctccgtggcacttgtgctttcctggctgagagctctcccctgttgatacagctatggcaccattgtaattacagatgcacctttcaggagcatctccattaaatggttcatagatgatttaataaaaagaaacttctcagttgatccag

SEQ ID NO: 36153 - DNA, 780 bp, Homo sapiens
acggtggagctaaaaacggctaattgatcttgagataagaataccctttactaaggcaaagatttaattgaaatccaaaatgatttatagaaacgaaaggcattttccatttgttgtcttctgccgaaattctgaattgcatacacacatgaaggataatgaatggtttcaacggtgctatattaggttctctgattttcatgacctatgtatgtttggaaatacaatattgtataaaatgtggatcgttttgttaccgatttaatattgccattttaatttggtgtaacaattggttacacttgtttttcaaagctatcctttgaggagaaagtcaaaatgtgttgttagcctacctccactcaggcctcttgctgtgtaatcattattccaggttatgatgtgcatagcttttaaaactgcgtgtactattattctgctctttcccatactcttgtcatgtattcagaacctaaacttatagcaaaagagccaagcagtagcagtttttgtaaatgtaaaaataattagatccagactttgtttccttcaattttaaaaataaaaaatacctcagtgctatgtttttcagttatcacctgcatttctcaaaaaataacacctgcttcatgtggcacataacttgtaagaatcacattttggattttaaagaaagactattaaatattttaagatcactatcaatgacatttccctttcttttattcaacaatggagcctactgcagtagcgatttttaccttatagcttaggtctgac

SEQ ID NO: 36154 - DNA, 522 bp, Homo sapiens
acggtggagctaaaaacggctaattgatcttgagataagaataccctttactaaggcaaagatttaattgaaatccaaaatgatttatagaaacgaaaggcattttccatttgttgtcttctgccgaaattctgaattgcatacacacatgaaggataatgaatggtttcaacggtgctatattaggttctctgattttcatgacctatgtatgtttggaaatacaatattgtataaaatgtggatcgttttgttaccgatttaatattgccattttaatttggtgtaacaattggttacacttgtttttcaaagctatcctttgaggagaaagtcaaaatgtgttgttagcctacctccactcaggcctcttgctgtgtaatcattattccaggttatgatgtgcatagcttttaaaaccgctactgcttggctcttttgctataagtttaggttctgaatacatgacaagagtatgggaaagagcagaataatagtacacgcagttttaggtcgacgcgg

SEQ ID NO: 36155 - DNA, 323 bp, Homo sapiens
gcttattaagctaagaataattatactaaatagtaaaccacagacataaactttagcagtgctatctcgtttagcagtgctatctcgacgattacaatttaataccaggaatgtatcatgtaatgaatgcatattgaagatagtccatgtaaggcttcatactatcaattacaaaacaaaagtagtctcccatttcactcctatgtgggaggagttctacatccatcacattttccacatttaccatctgtgataagttctagctcaataaacttgaagttcaataaacttgaagcacagaaagtaagcaacaaagaacaaaa

SEQ ID NO: 36156 - DNA, 751 bp, Homo sapiens
tgagacagagtctcgctctgtcgcccaggctagagtgcagtggtgcgatcttggctcactgcaacctctgcctcctgggttcaagcaattctcctgcctcagcctcctgagtagctgggattacaggcgcacgtgtgccaccacgtccagttaatagagattttcagtagagacgaggtttcaccctgttggtcaggctggtctcgaactcctgaacaagggagacttctaagaaggtaggagttgagcaagaaatggctgctatggttttcctcctcctgagcatcacaaccatctggggagctttcaaaaaatgaagttgctcagccgttgagaactgctggaaagcccagcttaacaagttgtttgcttgggtggactctgcttgggggtgcagcggggggttctttccagtcctggtgtgttgctgggatgaagcagagagccctagaactgttctctccatcccacttacggcaagggctgttcctctgtcaggccagtccttgggggcaatgacagcagcaggaacattctggtaagtgtgtggtttccctcccagtgagcaggctaaccctgagtataggaacttaggggaggttaggtggctgatgcatgttttccagaccggtttgtatctgcttgtcattgatcttagaagttcatattatggtggaattatctatttgcatgtgtaaactttgaatatgtttttaacttttaataaaaagttatttttaaatattgtttt

SEQ ID NO: 36157 - DNA, 3889 bp, Homo sapiens
gtagctgctttgcaggtacatcatgtgacagtggaattatagaagatgtgaagaaaacaacacacactccaacactaaaagcatgatgtagctgctttgcaggtaaaagaagcagctacatcatgcttttagtgttggagtgtgtgttgttttctgtggctcaggggtattttagaatggactcttctgcaacccagtttcacatagagactcatgagaacacatcaggactttggtcaatatggtaccgcaaccattttgaccgtagtgttgtattaaatgatgtgtttctttccaaggagaccaagcacatgttaaagattctgaatttcactggccctttatttctacctccaggctgttggaatatattttctttgaaacttgctgttaaagacattgccataaatctattcaccaatgtatttttgactacaaacataggtgccatttttgcaatacctctacagatttattcagcaccaaccaaggaagggagtctgggttttgaagtgatagcacattgtggcatgcattatttcatgggaaaatcaaaagcaggaaatcctaattggaatgggagcctttctctggatcaatctacctggaatgtggattctgaacttgcaaataaattgtatgaaagatggaagaaatataaaaatggtgacgtctgcaagaggaatgttttgggaacaactcgatttgctcacttgaagaaatccaaggagtcagagtcctttgttttctttttgcctcgtttgatcgcagagcctggcctcatgttaaacttcagcgcaactgcccttaggagcaggatgatcaagtactttgtggtgcagaacccgtcctcttggccggtctccttgcagctcctgcctctctccttgtaccctaaacccgaagccctagtgcacctgctccacagatggtttggcactgatatgcagatgattaatttcacaactggtgaattccagctcaccgaagcttgcccttacctgggtacgcattctgaggaatccaggtttggcatcctccacttacatctgcagcctttggaaatgaaaagggttggcgtagttttcacacctgctgactatggaaaagttacctcactcatactaatccggaataacttgactgttattgacatgattggcgtggaaggatttggagcaagagagttattaaaagtgggtggaagacttcctggtgcaggaggctcactccgatttaaggtgcccgagtccacgctgatggactgccgtagacaactgaaagacagtaagcaaattttatctattacaaagaactttaaagttgagaatattggacctcttcctataactgtttcgtctctgaaaattaatgggtataactgccaaggttatggattcgaggtgctggattgtcatcagttttccctggacccaaacacatcccgcgatatcagcattgtgttcactccagactttacctcctcctgggtaattcgggacctaagtcttgtaaccgcagcggacctagaatttcgcttcactctcaatgtgactctccctcatcacctgttgcccttgtgtgcagacgtggttccaggacccagctgggaggagtcattttggaggctcacggtcttctttgtcagtttgtccctgttgggtgtgattttaatagccttccaacaagcacagtacattctcatggaattcatgaaaacaagacagaggcaaaatgctagctcctcttcacagcaaaacaatggtcctatggatgtaatcagcccccattcttacaaaagcaattgcaagaactttctcgatacatatggcccctctgataaaggcagggggaagaactgccttccagtgaacactccccaaagcaggatccagaatgctgcaaagaggagcccagccacctatggtcattctcagaagaagcacaaatgctcagtgtattacagtaaacacaaaaccagcacagctgcggccagcagcaccagcacgactactgaggaaaaacagacttcacccctgggcagctcactgcctgctgctaaagaggacatttgcactgatgccatgcgtgagaactggatcagcctcagatatgcaagtggcataaatgtcaacctgcagaagaatttaacccttcccaaaaacttactgaataaagaagaaaacacactgaaaaacacaattgttttcagtaatccttcttcagaatgtagtatgaaggagggaatacagacatgtatgtttcctaaggaaactgacattaaaacttcagagaacacagccgagttcaaggaacgggagctctgtccactgaagacctccaagaaactacctgaaaaccatttaccaagaaactcacctcagtaccaccagccagacttgccagaaatttccaggaaaaataatgggaataaccagcaagtacctgtcaagaatgaagtagatcattgtgaaaatttgaagaaggtggacacaaagccttcttcagaaaagaagattcacaaaacatctagagaagacatgttttctgagaaacaggacatacctttcgtagagcaagaagatccttataggaagaaaaagcttcaggagaaaagagaaggaaatttacaaaatttaaattggagtaaaagtcgaacatgtagaaagaacaagaaaaggggtgttgctccagtctcaaggcctcctgaacagagtgatctaaagcttgtgtgcagtgactttgagaggtctgagctgagcagtgacatcaatgtaagaagctggtgtatacaggaaagcactagggaggtttgtaaagcagatgccgaaattgcaagcagtttacctgctgcccagagagaggcagaaggttactaccagaagcctgagaagaaatgtgtggacaagttctgctccgattccagctctgactgtgggagctcctctggcagcgtgcgtgccagccggggcagctgggggagctggagcagcaccagcagctccgacggggataagaagcccatggtggacgcccagcacttcctgccggccggagacagtgtttcacaaaatgattttccttctgaagctcccatctccttgaatctttctcataacatctgcaatcccatgaccgtgaatagtctcccacaatacgcagagccttcctgtcccagccttcctgccgggcccacaggtgttgaagaagataaaggtctttactcacctggagacctgtggcccactccgccagtgtgtgtgacaagcagcttaaactgcaccctggagaacggcgtgccttgtgtgattcaggagtcggccccggttcataatagtttcattgattggagtgcaacatgcgaaggccagttttccagcgcatactgtccattggaattgaacgattacaatgcctttccagaagaaaacatgaactatgccaatggcttcccctgtcctgcagatgttcagacagactttattgatcacaactctcagtctacctggaacaccccacccaacatgcctgctgcctggggacatgccagtttcatcagctctccgccctacctcacaagcacccgaagcttgtctccaatgtctggactttttggttccatctgggccccgcaaagcgatgtgtatgaaaattgctgccccatcaaccccaccacggaacattcgacccacatggaaaaccaagcggtcgtgtgcaaggaatactacccggggttcaacccgtttcgcgcctatatgaacctggacatatggactaccacagcgaataggaatgcaaatttcccactgtctagagactcgagttactgtgggaatgtgtgaaaataattggatttttaaacaatgtgaataaagaggcttgtgttttg

SEQ ID NO: 36158 - DNA, 648 bp, Homo sapiens
catcctatcttaaatcattgtatttggccaggcgtggtggctcacgcctgtaatcccaacactttgggaggccgaggcagtggatcagttgaggctggtctcgaactcctgaacaagggagacttctaagaaggtaggagttgagcaagaaatggctgctatggttttcctcctcctgagcatcacaaccatctggggagctttcaaaaaatgaagttgctcagccgttgagaactgctggaaagcccagcttaacaagttgtttgcttgggtggactctgcttgggggtgcagcggggggttctttccagtcctggtgtgttgctgggatgaagcagagagccctagaactgttctctccatcccacttacggcaagggctgttcctctgtcaggccagtccttgggggcaatgacagcagcaggaacattctggtaagtgtgtggtttccctcccagtgagcaggctaaccctgagtataggaacttaggggaggttaggtggctgatgcatgttttccagaccggtttgtatctgcttgtcattgatcttagaagttcatattatggtggaattatctatttgcatgtgtaaactttgaatatgtttttaacttttaataaaaagttatttttaaatattgtttt

SEQ ID NO: 36159 - DNA, 734 bp, Homo sapiens
tggcatgctacactttgtttgttgtttgtctttgctcacttgaatgtagcttgttcactgctgtatcctcagtatctttaatggggccttgcagaaagtagttcctcaaatatttgttatgtgagtctcatcttgtcatccaggtcaagagacaatcggacactgtctgaagaaacggtcaaaacaatatgctgtatttcagaattatatcctgaaattatattccgaaaggagttagtcagcatgtgtgggtgacattagggagtgttttctggagggaagggcaggtgcaggaagggtaggatgagggccaggtgaggatagggtggactcaggccttgttctcttccgtaggtctttactcacctggagacctgtggcccactccgccagtgtgtgtgacaagcagcttaaactgcaccctggagaacggcgtgccttgtgtgattcaggagtcggccccggttcataatagagacagagtcttgctctgtcgcccaggctggagcgcagtggtgcaattatagctcactgcagccttgaactcctgggttcaagcggttctcctgcctcagcctctcaagtaactgggactacagtttcattgattggagtgcaacatgcgaaggccagttttccagcgcatactgtccattggaattgaacgattacaatgcctttccagaaggtaagggctcttcagacaatcccaacgccattattttattcttaga

SEQ ID NO: 36160 - DNA, 460 bp, Homo sapiens
aaacatttgcttttttccttataggtttggcactgatatgcagatgattaatttcacaactggtgaattccagctcaccgaagcttgcccttacctggtaggatgttatcctaaaacagaaaaaagaatgccgacaaactagacacatgagcatacgggcctcattgatttatgtttaaaatgtcttttatttactatatatggctcttttattttgattctctgggcattaacgatacatagcagatttttccagttaactagtgcggtaggagctgggtttatgttagctctaaatcattttaatttgattatttagaatcatgtgagtaaagaaataacagttgaacagagctttgtagaaaaccatgaaacttgagaccccagaatttataattctcttaagattccttggccctcaaattcttttttagggcaagataaggaaaaacaaatacat

SEQ ID NO: 36161 - DNA, 467 bp, Homo sapiens
cagatccttttctttagctagggaacctttatcatgtttttttcacatatactcctaatatttagactcacaatcatggtgatttctaggcagcataaataagtttagtgttttagtccaattggccctccatatctgcaggggaattggtcgcaggaccccctcggatactaaaatctcaaggatgttcaagtcctttaaaaccattgatggaaaaattggccctccttatttgagggttctccacctgcggttggttgaacctgcaggtttggaacctgcagatgcagagggctgaatgtatattcttgtctagcattaaacaggaagagatgataattagttcatgtctgttatatcttattttcacacaatcacagttttacttagaatgtttccagcttctcgtttagtaagatcgacccttatcccagggtttctcagctttcgcagtattggtattttgg

SEQ ID NO: 36162 - DNA, 3977 bp, Homo sapiens
gtagctgctttgcaggtacatcatgtgacagtggaattatagaagatgtgaagaaaacaacacacactccaacactaaaagcatgatgtagctgctttgcaggtaaaagaagcagctacatcatgcttttagtgttggagtgtgtgttgttttctgtggctcaggggtattttagaatggactcttctgcaacccagtttcacatagagactcatgagaacacatcaggactttggtcaatatggtaccgcaaccattttgaccgtagtgttgtattaaatgatgtgtttctttccaaggagaccaagcacatgttaaagattctgaatttcactggccctttatttctacctccaggctgttggaatatattttctttgaaacttgctgttaaagacattgccataaatctattcaccaatgtatttttgactacaaacataggtgccatttttgcaatacctctacagatttattcagcaccaaccaaggaagggagtctgggttttgaagtgatagcacattgtggcatgcattatttcatgggaaaatcaaaagcaggaaatcctaattggaatgggagcctttctctggatcaatctacctggaatgtggattctgaacttgcaaataaattgtatgaaagatggaagaaatataaaaatggtgacgtctgcaagaggaatgttttgggaacaactcgatttgctcacttgaagaaatccaaggagtcagagtcctttgttttctttttgcctcgtttgatcgcagagcctggcctcatgttaaacttcagcgcaactgcccttaggagcaggatgatcaagtactttgtggtgcagaacccgtcctcttggccggtctccttgcagctcctgcctctctccttgtaccctaaacccgaagccctagtgcacctgctccacagatggtttggcactgatatgcagatgattaatttcacaactggtgaattccagctcaccgaagcttgcccttacctgggtacgcattctgaggaatccaggtttggcatcctccacttacatctgcagcctttggaaatgaaaagggttggcgtagttttcacacctgctgactatggaaaagttacctcactcatactaatccggaataacttgactgttattgacatgattggcgtggaaggatttggagcaagagagttattaaaagtgggtggaagacttcctggtgcaggaggctcactccgatttaaggtgcccgagtccacgctgatggactgccgtagacaactgaaagacagtaagcaaattttatctattacaaagaactttaaagttgagaatattggacctcttcctataactgtttcgtctctgaaaattaatgggtataactgccaaggttatggattcgaggtgctggattgtcatcagttttccctggacccaaacacatcccgcgatatcagcattgtgttcactccagactttacctcctcctgggtaattcgggacctaagtcttgtaaccgcagcggacctagaatttcgcttcactctcaatgtgactctccctcatcacctgttgcccttgtgtgcagacgtggttccaggacccagctgggaggagtcattttggaggctcacggtcttctttgtcagtttgtccctgttgggtgtgattttaatagccttccaacaagcacagtacattctcatggaattcatgaaaacaagacagaggcaaaatgctagctcctcttcacagcaaaacaatggtcctatggatgtaatcagcccccattcttacaaaagcaattgcaagaactttctcgatacatatggcccctctgataaaggcagggggaagaactgccttccagtgaacactccccaaagcaggatccagaatgctgcaaagaggagcccagccacctatggtcattctcagaagaagcacaaatgctcagtgtattacagtaaacacaaaaccagcacagctgcggccagcagcaccagcacgactactgaggaaaaacagacttcacccctgggcagctcactgcctgctgctaaagaggacatttgcactgatgccatgcgtgagaactggatcagcctcagatatgcaagtggcataaatgtcaacctgcagaagaatttaacccttcccaaaaacttactgaataaagaagaaaacacactgaaaaacacaattgttttcagtaatccttcttcagaatgtagtatgaaggagggaatacagacatgtatgtttcctaaggaaactgacattaaaacttcagagaacacagccgagttcaaggaacgggagctctgtccactgaagacctccaagaaactacctgaaaaccatttaccaagaaactcacctcagtaccaccagccagacttgccagaaatttccaggaaaaataatgggaataaccagcaagtacctgtcaagaatgaagtagatcattgtgaaaatttgaagaaggtggacacaaagccttcttcagaaaagaagattcacaaaacatctagagaagacatgttttctgagaaacaggacatacctttcgtagagcaagaagatccttataggaagaaaaagcttcaggagaaaagagaaggaaatttacaaaatttaaattggagtaaaagtcgaacatgtagaaagaacaagaaaaggggtgttgctccagtctcaaggcctcctgaacagagtgatctaaagcttgtgtgcagtgactttgagaggtctgagctgagcagtgacatcaatgtaagaagctggtgtatacaggaaagcactagggaggtttgtaaagcagatgccgaaattgcaagcagtttacctgctgcccagagagaggcagaaggttactaccagaagcctgagaagaaatgtgtggacaagttctgctccgattccagctctgactgtgggagctcctctggcagcgtgcgtgccagccggggcagctgggggagctggagcagcaccagcagctccgacggggataagaagcccatggtggacgcccagcacttcctgccggccggagacagtgtttcacaaaatgattttccttctgaagctcccatctccttgaatctttctcataacatctgcaatcccatgaccgtgaatagtctcccacaatacgcagagccttcctgtcccagccttcctgccgggcccacaggtgttgaagaagataaaggtctttactcacctggagacctgtggcccactccgccagtgtgtgtgacaagcagcttaaactgcaccctggagaacggcgtgccttgtgtgattcaggagtcggccccggttcataatagtttcattgattggagtgcaacatgcgaaggccagttttccagcgcatactgtccattggaattgaacgattacaatgcctttccagaagaaaacatgaactatgccaatggcttcccctgtcctgcagatgttcagacagactttattgatcacaactctcagtctacctggaacaccccacccaacatgcctgctgcctggggacatgccagtttcatcagctctccgccctacctcacaagcacccgaagcttgtctccaatgtctggactttttggttccatctgggccccgcaaagcgatgtgtatgaaaattgctgccccatcaaccccaccacggaacattcgacccacatggaaaaccaagcggtcgtgtgcaaggaatactacccggggttcaacccgtttcgcgcctatatgaacctggacatatggactaccacagcgaataggaatgcaaatttcccactgtctagagactcgagttactgtgggaatgtgtgaaaataattggatttttaaacaatgtgaataaagaggcttgtgttttgattactagtgtaaactggttattgagatagattatgacattggtggatattttggcacttttatatgaaaataaattttttaatgaaa

SEQ ID NO: 36163 - DNA, 3951 bp, Homo sapiens
aaagattcccacctctccttcctgataccctccttagcaagacagaacaaatctgttggtagaatgaggtgaacaatagaccagttataaacatgcatcttctctaggatcggctcctggtctgtgccccctttcaagaactactgttttccctcggcactctagatagtgacctggaagactcgttgatgattagcatgtgtgtggaaggagtttcgcattttagatttaaagctgttaaaaatgttccaagtataattttgtttcaggctgtattcatgagccatgtgtcttttacgttattacctttacataattcgatttagttttgttttatgacatgtttgtttaatttgatatcatttgccattgagttagagggacttttaataaataagcagcagagacagaggtggcatttattaactctacagtcctctcagtttaagaagtttaatattaagcccttggcattatttactaattgaattatgttttctgtaaatctaaatatggaatctgatctaacttttaggaaatcctaattggaatgggagcctttctctggatcaatctacctggaatgtggattctgaacttgcaaataaattgtatgaaagatggaagaaatataaaaatggtgacgtctgcaagaggaatgttttgggaacaactcgatttgctcacttgaagaaatccaaggagtcagagtcctttgttttctttttgcctcgtttgatcgcagagcctggcctcatgttaaacttcagcgcaactgcccttaggagcaggatgatcaagtactttgtggtgcagaacccgtcctcttggccggtctccttgcagctcctgcctctctccttgtaccctaaacccgaagccctagtgcacctgctccacagatggtttggcactgatatgcagatgattaatttcacaactggtgaattccagctcaccgaagcttgcccttacctgggtacgcattctgaggaatccaggtttggcatcctccacttacatctgcagcctttggaaatgaaaagggttggcgtagttttcacacctgctgactatggaaaagttacctcactcatactaatccggaataacttgactgttattgacatgattggcgtggaaggatttggagcaagagagttattaaaagtgggtggaagacttcctggtgcaggaggctcactccgatttaaggtgcccgagtccacgctgatggactgccgtagacaactgaaagacagtaagcaaattttatctattacaaagaactttaaagttgagaatattggacctcttcctataactgtttcgtctctgaaaattaatgggtataactgccaaggttatggattcgaggtgctggattgtcatcagttttccctggacccaaacacatcccgcgatatcagcattgtgttcactccagactttacctcctcctgggtaattcgggacctaagtcttgtaaccgcagcggacctagaatttcgcttcactctcaatgtgactctccctcatcacctgttgcccttgtgtgcagacgtggttccaggacccagctgggaggagtcattttggaggctcacggtcttctttgtcagtttgtccctgttgggtgtgattttaatagccttccaacaagcacagtacattctcatggaattcatgaaaacaagacagaggcaaaatgctagctcctcttcacagcaaaacaatggtcctatggatgtaatcagcccccattcttacaaaagcaattgcaagaactttctcgatacatatggcccctctgataaaggcagggggaagaactgccttccagtgaacactccccaaagcaggatccagaatgctgcaaagaggagcccagccacctatggtcattctcagaagaagcacaaatgctcagtgtattacagtaaacacaaaaccagcacagctgcggccagcagcaccagcacgactactgaggaaaaacagacttcacccctgggcagctcactgcctgctgctaaagaggacatttgcactgatgccatgcgtgagaactggatcagcctcagatatgcaagtggcataaatgtcaacctgcagaagaatttaacccttcccaaaaacttactgaataaagaagaaaacacactgaaaaacacaattgttttcagtaatccttcttcagaatgtagtatgaaggagggaatacagacatgtatgtttcctaaggaaactgacattaaaacttcagagaacacagccgagttcaaggaacgggagctctgtccactgaagacctccaagaaactacctgaaaaccatttaccaagaaactcacctcagtaccaccagccagacttgccagaaatttccaggaaaaataatgggaataaccagcaagtacctgtcaagaatgaagtagatcattgtgaaaatttgaagaaggtggacacaaagccttcttcagaaaagaagattcacaaaacatctagagaagacatgttttctgagaaacaggacatacctttcgtagagcaagaagatccttataggaagaaaaagcttcaggagaaaagagaaggaaatttacaaaatttaaattggagtaaaagtcgaacatgtagaaagaacaagaaaaggggtgttgctccagtctcaaggcctcctgaacagagtgatctaaagcttgtgtgcagtgactttgagaggtctgagctgagcagtgacatcaatgtaagaagctggtgtatacaggaaagcactagggaggtttgtaaagcagatgccgaaattgcaagcagtttacctgctgcccagagagaggcagaaggttactaccagaagcctgagaagaaatgtgtggacaagttctgctccgattccagctctgactgtgggagctcctctggcagcgtgcgtgccagccggggcagctgggggagctggagcagcaccagcagctccgacggggataagaagcccatggtggacgcccagcacttcctgccggccggagacagtgtttcacaaaatgattttccttctgaagctcccatctccttgaatctttctcataacatctgcaatcccatgaccgtgaatagtctcccacaatacgcagagccttcctgtcccagccttcctgccgggcccacaggtgttgaagaagataaaggtctttactcacctggagacctgtggcccactccgccagtgtgtgtgacaagcagcttaaactgcaccctggagaacggcgtgccttgtgtgattcaggagtcggccccggttcataatagtttcattgattggagtgcaacatgcgaaggccagttttccagcgcatactgtccattggaattgaacgattacaatgcctttccagaagaaaacatgaactatgccaatggcttcccctgtcctgcagatgttcagacagactttattgatcacaactctcagtctacctggaacaccccacccaacatgcctgctgcctggggacatgccagtttcatcagctctccgccctacctcacaagcacccgaagcttgtctccaatgtctggactttttggttccatctgggccccgcaaagcgatgtgtatgaaaattgctgccccatcaaccccaccacggaacattcgacccacatggaaaaccaagcggtcgtgtgcaaggaatactacccggggttcaacccgtttcgcgcctatatgaacctggacatatggactaccacagcgaataggaatgcaaatttcccactgtctagagactcgagttactgtgggaatgtgtgaaaataattggatttttaaacaatgtgaataaagaggcttgtgttttgattactagtgtaaactggttattgagatagattatgacattggtggatattttggcacttttatatgaaaataaattttttaatgaaa

SEQ ID NO: 36164 - DNA, 3725 bp, Homo sapiens
gtagctgctttgcaggtacatcatgtgacagtggaattatagaagatgtgaagaaaacaacacacactccaacactaaaagcatgatgtagctgctttgcaggtaaaagaagcagctacatcatgcttttagtgttggagtgtgtgttgttttctgtggctcaggggtattttagaatggactcttctgcaacccagtttcacatagagactcatgagaacacatcaggactttggtcaatatggtaccgcaaccattttgaccgtagtgttgtattaaatgatgtgtttctttccaaggagaccaagcacatgttaaagattctgaatttcactggccctttatttctacctccaggctgttggaatatattttctttgaaacttgctgttaaagacattgccataaatctattcaccaatgtatttttgactacaaacataggtgccatttttgcaatacctctacagatttattcagcaccaaccaaggaagggagtctgggttttgaagtgatagcacattgtggcatgcattatttcatgggaaaatcaaaagcaggaaatcctaattggaatgggagcctttctctggatcaatctacctggaatgtggattctgaacttgcaaataaattgtatgaaagatggaagaaatataaaaatggtgacgtctgcaagtttggcactgatatgcagatgattaatttcacaactggtgaattccagctcaccgaagcttgcccttacctgggtacgcattctgaggaatccaggtttggcatcctccacttacatctgcagcctttggaaatgaaaagggttggcgtagttttcacacctgctgactatggaaaagttacctcactcatactaatccggaataacttgactgttattgacatgattggcgtggaaggatttggagcaagagagttattaaaagtgggtggaagacttcctggtgcaggaggctcactccgatttaaggtgcccgagtccacgctgatggactgccgtagacaactgaaagacagtaagcaaattttatctattacaaagaactttaaagttgagaatattggacctcttcctataactgtttcgtctctgaaaattaatgggtataactgccaaggttatggattcgaggtgctggattgtcatcagttttccctggacccaaacacatcccgcgatatcagcattgtgttcactccagactttacctcctcctgggtaattcgggacctaagtcttgtaaccgcagcggacctagaatttcgcttcactctcaatgtgactctccctcatcacctgttgcccttgtgtgcagacgtggttccaggacccagctgggaggagtcattttggaggctcacggtcttctttgtcagtttgtccctgttgggtgtgattttaatagccttccaacaagcacagtacattctcatggaattcatgaaaacaagacagaggcaaaatgctagctcctcttcacagcaaaacaatggtcctatggatgtaatcagcccccattcttacaaaagcaattgcaagaactttctcgatacatatggcccctctgataaaggcagggggaagaactgccttccagtgaacactccccaaagcaggatccagaatgctgcaaagaggagcccagccacctatggtcattctcagaagaagcacaaatgctcagtgtattacagtaaacacaaaaccagcacagctgcggccagcagcaccagcacgactactgaggaaaaacagacttcacccctgggcagctcactgcctgctgctaaagaggacatttgcactgatgccatgcgtgagaactggatcagcctcagatatgcaagtggcataaatgtcaacctgcagaagaatttaacccttcccaaaaacttactgaataaagaagaaaacacactgaaaaacacaattgttttcagtaatccttcttcagaatgtagtatgaaggagggaatacagacatgtatgtttcctaaggaaactgacattaaaacttcagagaacacagccgagttcaaggaacgggagctctgtccactgaagacctccaagaaactacctgaaaaccatttaccaagaaactcacctcagtaccaccagccagacttgccagaaatttccaggaaaaataatgggaataaccagcaagtacctgtcaagaatgaagtagatcattgtgaaaatttgaagaaggtggacacaaagccttcttcagaaaagaagattcacaaaacatctagagaagacatgttttctgagaaacaggacatacctttcgtagagcaagaagatccttataggaagaaaaagcttcaggagaaaagagaaggaaatttacaaaatttaaattggagtaaaagtcgaacatgtagaaagaacaagaaaaggggtgttgctccagtctcaaggcctcctgaacagagtgatctaaagcttgtgtgcagtgactttgagaggtctgagctgagcagtgacatcaatgtaagaagctggtgtatacaggaaagcactagggaggtttgtaaagcagatgccgaaattgcaagcagtttacctgctgcccagagagaggcagaaggttactaccagaagcctgagaagaaatgtgtggacaagttctgctccgattccagctctgactgtgggagctcctctggcagcgtgcgtgccagccggggcagctgggggagctggagcagcaccagcagctccgacggggataagaagcccatggtggacgcccagcacttcctgccggccggagacagtgtttcacaaaatgattttccttctgaagctcccatctccttgaatctttctcataacatctgcaatcccatgaccgtgaatagtctcccacaatacgcagagccttcctgtcccagccttcctgccgggcccacaggtgttgaagaagataaaggtctttactcacctggagacctgtggcccactccgccagtgtgtgtgacaagcagcttaaactgcaccctggagaacggcgtgccttgtgtgattcaggagtcggccccggttcataatagtttcattgattggagtgcaacatgcgaaggccagttttccagcgcatactgtccattggaattgaacgattacaatgcctttccagaagaaaacatgaactatgccaatggcttcccctgtcctgcagatgttcagacagactttattgatcacaactctcagtctacctggaacaccccacccaacatgcctgctgcctggggacatgccagtttcatcagctctccgccctacctcacaagcacccgaagcttgtctccaatgtctggactttttggttccatctgggccccgcaaagcgatgtgtatgaaaattgctgccccatcaaccccaccacggaacattcgacccacatggaaaaccaagcggtcgtgtgcaaggaatactacccggggttcaacccgtttcgcgcctatatgaacctggacatatggactaccacagcgaataggaatgcaaatttcccactgtctagagactcgagttactgtgggaatgtgtgaaaataattggatttttaaacaatgtgaataaagaggcttgtgttttgattactagtgtaaactggttattgagatagattatgacattggtggatattttggcacttttatatgaaaataaattttttaatgaaa

SEQ ID NO: 36165 - DNA, 4434 bp, Homo sapiens
  misc_feature (4433)..(4434): n is a, c, g, or t
gtagctgctttgcaggtacatcatgtgacagtggaattatagaagatgtgaagaaaacaacacacactccaacactaaaagcatgatgtagctgctttgcaggtaaaagaagcagctacatcatgcttttagtgttggagtgtgtgttgttttctgtggctcaggggtattttagaatggactcttctgcaacccagtttcacatagagactcatgagaacacatcaggactttggtcaatatggtaccgcaaccattttgaccgtagtgttgtattaaatgatgtgtttctttccaaggagaccaagcacatgttaaagattctgaatttcactggccctttatttctacctccaggctgttggaatatattttctttgaaacttgctgttaaagacattgccataaatctattcaccaatgtatttttgactacaaacataggtgccatttttgcaatacctctacagatttattcagcaccaaccaaggaagggagtctgggttttgaagtgatagcacattgtggcatgcattatttcatgggaaaatcaaaagcaggaaatcctaattggaatgggagcctttctctggatcaatctacctggaatgtggattctgaacttgcaaataaattgtatgaaagatggaagaaatataaaaatggtgacgtctgcaagaggaatgttttgggaacaactcgatttgctcacttgaagaaatccaaggagtcagagtcctttgttttctttttgcctcgtttgatcgcagagcctggcctcatgttaaacttcagcgcaactgcccttaggagcaggatgatcaagtactttgtggtgcagaacccgtcctcttggccggtctccttgcagctcctgcctctctccttgtaccctaaacccgaagccctagtgcacctgctccacagatggtttggcactgatatgcagatgattaatttcacaactggtgaattccagctcaccgaagcttgcccttacctgggtacgcattctgaggaatccaggtttggcatcctccacttacatctgcagcctttggaaatgaaaagggttggcgtagttttcacacctgctgactatggaaaagttacctcactcatactaatccggaataacttgactgttattgacatgattggcgtggaaggatttggagcaagagagttattaaaagtgggtggaagacttcctggtgcaggaggctcactccgatttaaggtgcccgagtccacgctgatggactgccgtagacaactgaaagacagtaagcaaattttatctattacaaagaactttaaagttgagaatattggacctcttcctataactgtttcgtctctgaaaattaatgggtataactgccaaggttatggattcgaggtgctggattgtcatcagttttccctggacccaaacacatcccgcgatatcagcattgtgttcactccagactttacctcctcctgggtaattcgggacctaagtcttgtaaccgcagcggacctagaatttcgcttcactctcaatgtgactctccctcatcacctgttgcccttgtgtgcagacgtggttccaggacccagctgggaggagtcattttggaggctcacggtcttctttgtcagtttgtccctgttgggtgtgattttaatagccttccaacaagcacagtacattctcatggaattcatgaaaacaagacagaggcaaaatgctagctcctcttcacagcaaaacaatggtcctatggatgtaatcagcccccattcttacaaaagcaattgcaagaactttctcgatacatatggcccctctgataaaggcagggggaagaactgccttccagtgaacactccccaaagcaggatccagaatgctgcaaagaggagcccagccacctatggtcattctcagaagaagcacaaatgctcagtgtattacagtaaacacaaaaccagcacagctgcggccagcagcaccagcacgactactgaggaaaaacagacttcacccctgggcagctcactgcctgctgctaaagaggacatttgcactgatgccatgcgtgagaactggatcagcctcagatatgcaagtggcataaatgtcaacctgcagaagaatttaacccttcccaaaaacttactgaataaagaagaaaacacactgaaaaacacaattgttttcagtaatccttcttcagaatgtagtatgaaggagggaatacagacatgtatgtttcctaaggaaactgacattaaaacttcagagaacacagccgagttcaaggaacgggagctctgtccactgaagacctccaagaaactacctgaaaaccatttaccaagaaactcacctcagtaccaccagccagacttgccagaaatttccaggaaaaataatgggaataaccagcaagtacctgtcaagaatgaagtagatcattgtgaaaatttgaagaaggtggacacaaagccttcttcagaaaagaagattcacaaaacatctagagaagacatgttttctgagaaacaggacatacctttcgtagagcaagaagatccttataggaagaaaaagcttcaggagaaaagagaaggaaatttacaaaatttaaattggagtaaaagtcgaacatgtagaaagaacaagaaaaggggtgttgctccagtctcaaggcctcctgaacagagtgatctaaagcttgtgtgcagtgactttgagaggtctgagctgagcagtgacatcaatgtaagaagctggtgtatacaggaaagcactagggaggtttgtaaagcagatgccgaaattgcaagcagtttacctgctgcccagagagaggcagaaggttactaccagaagcctgagaagaaatgtgtggacaagttctgctccgattccagctctgactgtgggagctcctctggcagcgtgcgtgccagccggggcagctgggggagctggagcagcaccagcagctccgacggggataagaagcccatggtggacgcccagcacttcctgccggccggagacagtgtttcacaaaatgattttccttctgaagctcccatctccttgaatctttctcataacatctgcaatcccatgaccgtgaatagtctcccacaatacgcagagccttcctgtcccagccttcctgccgggcccacaggtgttgaagaagataaaggtctttactcacctggagacctgtggcccactccgccagtgtgtgtgacaagcagcttaaactgcaccctggagaacggcgtgccttgtgtgattcaggagtcggccccggttcataatagtttcattgattggagtgcaacatgcgaaggccagttttccagcgcatactgtccattggaattgaacgattacaatgcctttccagaagaaaacatgaactatgccaatggcttcccctgtcctgcagatgttcagacagactttattgatcacaactctcagtctacctggaacaccccacccaacatgcctgctgcctggggacatgccagtttcatcagctctccgccctacctcacaagcacccgaagcttgtctccaatgtctggactttttggttccatctgggccccgcaaagcgatgtgtatgaaaattgctgccccatcaaccccaccacggaacattcgacccacatggaaaaccaagcggtcgtgtgcaaggaatactacccggggttcaacccgtttcgcgcctatatgaacctggacatatggactaccacagcgaataggaatgcaaatttcccactgtctagagactcgagttactgtgggaatgtgtgaaaataattggatttttaaacaatgtgaataaagaggcttgtgttttgattactagtgtaaactggttattgagatagattatgacattggtggatattttggcacttttatatgaaaataaattttttaatgaaaaaaaaaaaaaaaaaaactcgagactagtgccctggggttgtctgtgggcctcatgggcattgtggtgggcactgtcttcatcatccaaggcctgcgttcagttggtgcttccagacaccaagggccattgtgaatcccatcctggaagggaaggtgcatcgccatctacaggagcagaagaatggacttgctaaatgacctagcactattctctggcccgatttatcatatcccttttctcctccaaatatttctcctctcaccttttctctgggacttaagctgctatatcccctcagagctcacaaatgcctttacattctttccctgacctcctgattttttttttcttttctcaaatgttacctacaaagacatgcctggggtaagccacccggctacctaattcctcagtaacctccatcttctccaaggaagcaatttccttttatgagnn

SEQ ID NO: 36166 - DNA, 1183 bp, Homo sapiens
ctagggaaggtgaactacctggaaatacagacaggtggctacctgtctgaaaatctacctgacgggtagatttaaaaccacaggttacctcatagttatgttagttaattttttttgttgttggttatgacaagactttgctagatttgggaatttaatattcctcaattcttttctggctgtgtaactttacatcctttatatctgtatgtttcttccccaagaaactcttccccaagacttccattgagtgaaaactcaatcagacgtggttatacatatcagtatttcctcgtgcagaaaaaatgagtcgttcctcctttgccctcttccccacaggaccgtgaatagtctcccacaatacgcagagccttcctgtcccagccttcctgccgggcccacaggtgttgaagaagataaaggtctttactcacctggagacctgtggcccactccgccagtgtgtgtgacaagcagcttaaactgcaccctggagaacggcgtgccttgtgtgattcaggagtcggccccggttcataatagtttcattgattggagtgcaacatgcgaaggccagttttccagcgcatactgtccattggaattgaacgattacaatgcctttccagaagaaaacatgaactatgccaatggcttcccctgtcctgcagatgttcagacagactttattgatcacaactctcagtctacctggaacaccccacccaacatgcctgctgcctggggacatgccagtttcatcagctctccgccctacctcacaagcacccgaagcttgtctccaatgtctggactttttggttccatctgggccccgcaaagcgatgtgtatgaaaattgctgccccatcaaccccaccacggaacattcgacccacatggaaaaccaagcggtcgtgtgcaaggaatactacccggggttcaacccgtttcgcgcctatatgaacctggacatatggactaccacagcgaataggaatgcaaatttcccactgtctagagactcgagttactgtgggaatgtgtgaaaataattggatttttaaacaatgtgaataaagaggcttgtgttttgattactagtgtaaactggttattgagatagattatgacattggtggatattttggcacttttatatgaaaataaattttttaatgaaa

SEQ ID NO: 36167 - DNA, 1331 bp, Homo sapiens
gtagctgctttgcaggtacatcatgtgacagtggaattatagaagatgtgaagaaaacaacacacactccaacactaaaagcatgatgtagctgctttgcaggtaaaagaagcagctacatcatgcttttagtgttggagtgtgtgttgttttctgtggctcaggggtattttagaatggactcttctgcaacccagtttcacatagagactcatgagaacacatcaggactttggtcaatatggtaccgcaaccattttgaccgtagtgttgtattaaatgatgtgtttctttccaaggagaccaagcacatgttaaagattctgaatttcactggccctttatttctacctccaggctgttggaatatattttctttgaaacttgctgttaaagacattgccataaatctattcaccaatgtatttttgactacaaacataggtgccatttttgcaatacctctacagatttattcagcaccaaccaaggaagggagtctgggttttgaagtgatagcacattgtggcatgcattatttcatgggaaaatcaaaagcaggaaatcctaattggaatgggagcctttctctggatcaatctacctggaatgtggattctgaacttgcaaataaattgtatgaaagatggaagaaatataaaaatggtgacgtctgcaagaggaatgttttgggaacaactcgatttgctcacttgaagaaatccaaggagtcagagtcctttgttttctttttgcctcgtttgatcgcagagcctggcctcatgttaaacttcagcgcaactgcccttaggagcaggatgatcaagtactttgtggtgcagaacccgtcctcttggccggtctccttgcagctcctgcctctctccttgtaccctaaacccgaagccctagtgcacctgctccacagatggtttggcactgatatgcagatgattaatttcacaactggtgaattccagctcaccgaagcttgcccttacctgggtacgcattctgaggaatccaggtttggcatcctccacttacatctgcagcctttggaaatgaaaagggttggcgtagttttcacacctgctgactatggaaaagttacctcactcatactaatccggaataacttgactgttattgacatgattggcgtggaaggatttggagcaagagagttattaaaagtgggtggaagacttcctggtgcaggaggctcactccgatttaaggtgcccgagtccacgctgatggactgccgtagacgtgagttcatatgtgtggcactctgacaggggaggttggcattaaagctgagagtg

SEQ ID NO: 36168 - DNA, 1367 bp, Homo sapiens
gtagctgctttgcaggtacatcatgtgacagtggaattatagaagatgtgaagaaaacaacacacactccaacactaaaagcatgatgtagctgctttgcaggtaaaagaagcagctacatcatgcttttagtgttggagtgtgtgttgttttctgtggctcaggggtattttagaatggactcttctgcaacccagtttcacatagagactcatgagaacacatcaggactttggtcaatatggtaccgcaaccattttgaccgtagtgttgtattaaatgatgtgtttctttccaaggagaccaagcacatgttaaagattctgaatttcactggccctttatttctacctccaggctgttggaatatattttctttgaaacttgctgttaaagacattgccataaatctattcaccaatgtatttttgactacaaacataggtgccatttttgcaatacctctacagatttattcagcaccaaccaaggaagggagtctgggttttgaagtgatagcacattgtggcatgcattatttcatgggaaaatcaaaagcaggaaatcctaattggaatgggagcctttctctggatcaatctacctggaatgtggattctgaacttgcaaataaattgtatgaaagatggaagaaatataaaaatggtgacgtctgcaagaggaatgttttgggaacaactcgatttgctcacttgaagaaatccaaggagtcagagtcctttgttttctttttgcctcgtttgatcgcagagcctggcctcatgttaaacttcagcgcaactgcccttaggagcaggatgatcaagtactttgtggtgcagaacccgtcctcttggccggtctccttgcagctcctgcctctctccttgtaccctaaacccgaagccctagtgcacctgctccacagatggtttggcactgatatgcagatgattaatttcacaactggtgaattccagctcaccgaagcttgcccttacctggtaggatgttatcctaaaacagaaaaaagaatgccgacaaactagacacatgagcatacgggcctcattgatttatgtttaaaatgtcttttatttactatatatggctcttttattttgattctctgggcattaacgatacatagcagatttttccagttaactagtgcggtaggagctgggtttatgttagctctaaatcattttaatttgattatttagaatcatgtgagtaaagaaataacagttgaacagagctttgtagaaaaccatgaaacttgagaccccagaatttataattctcttaagattccttggccctcaaattcttttttagggcaagataaggaaaaacaaatacat

SEQ ID NO: 36169 - DNA, 710 bp, Homo sapiens
gtagctgctttgcaggtacatcatgtgacagtggaattatagaagatgtgaagaaaacaacacacactccaacactaaaagcatgatgtagctgctttgcaggtaaaagaagcagctacatcatgcttttagtgttggagtgtgtgttgttttctgtggctcaggggtattttagaatggactcttctgcaacccagtttcacatagagactcatgagaacacatcaggactttggtcaatatggtaccgcaaccattttgaccgtagtgttgtattaaatgatgtgtttctttccaaggagaccaagcacatgttaaagattctgaatttcactggccctttatttctacctccaggctgttggaatatattttctttgaaacttgtgggatgaagcagagagccctagaactgttctctccatcccacttacggcaagggctgttcctctgtcaggccagtccttgggggcaatgacagcagcaggaacattctggtaagtgtgtggtttccctcccagtgagcaggctaaccctgagtataggaacttaggggaggttaggtggctgatgcatgttttccagaccggtttgtatctgcttgtcattgatcttagaagttcatattatggtggaattatctatttgcatgtgtaaactttgaatatgtttttaacttttaataaaaagttatttttaaatattgtttt

SEQ ID NO: 36170 - DNA, 737 bp, Homo sapiens
ggttcagaatccagtccaggatttctcatttcattggcaggtctttttagtctcctttaatcttccccagctgttctttgccttttatgacatagacatttttgaagcgtgctggccatttatttcctatgatgtttcttgattggagttacatgatatttcctcatgattaggttatgctttttggccagaatatctcaggagggatgctgtgtccctctcggggttttaacttttctttcctcacacctagatcaagtactttgtggtgcagaacccgtcctcttggccggtctccttgcagctcctgcctctctccttgtaccctaaacccgaagccctagtgcacctgctccacagatggtatgaagactttttttctgagaggcagtttgggaagtacttgggaagacttagaattacttaatgtcctacactttttcaaccaggacctgtgtgtggatgtggacacagtattaaccgattagctcatggaccttgggcatcctgccccttggtgcatgtgatttgatggaactacctggctctgtgtgttatgtggcatcttcagtgttactatgcgaagtccactaaccaacagatccttttctttagctagggaacctttatcatgtttttttcacatatactcctaatatttagactcacaatcatggtgatttctaggcagcataaataagtttagtgttttagtccaattggccctccatatctgc

SEQ ID NO: 36171 - DNA, 491 bp, Homo sapiens
aggacatttgcactgatgccatgcgtgagaactggatcagcctcagatatgcaagtggcataaatgtcaacctgcagaagaatttaacccttcccaaaaacttactgaataaagaagaaaacacactgaaaaacacaattgttttcagtaatccttcttcagaatgtagtatgaaggagggaatacagacatgtatgtttcctaaggaaactgacattaaaacttcagagaacacagccgagttcaaggaacgggagctctgtccactgaagacctccaagaaactacctgaaaaccatttaccaagaaactcacctcagtaccaccagccagacttgccagaaatttccaggaaaaataatggtaatcttttcatcccctttgataattctctcctgtttgtacccagtctgtttttaatggaattgttctcacctgtgaccgttagttttaattgtggatgctgagttttagcaaaggtttaaatattg

SEQ ID NO: 36172 - DNA, 312 bp, Homo sapiens
tttttgtgtgtgtgtgtcttttccaggcctcctgaacagagtgatctaaagcttgtgtgcagtgactttgagaggtctgagctgagcagtgacatcaatgtaagaagctggtgtatacaggaaagcactagggaggtttgtaaagcagatgccgaaattgcaagcagtttacctgctgcccagagagaggcaggtatgtaatgatactgagctacaaatggtgcttctgtgggaatttttgtttcctcaatgaagtatctaataagagaaatgacacctcagtgattttatctctacaggcaacttagctaa

SEQ ID NO: 36173 - DNA, 311 bp, Homo sapiens
cacgattcatgtttaatgtttaattaaaaaatgtgagaatatcagtttaaagtgaaaaatcagtcatgcattaatgatattaataacctatgcattttaataccgaatatacagttgaagtgtactttttgaaacttgtgataatgtgtttcttttaatgcaggagacagtgtttcacaaaatgattttccttctgaagctcccatctccttgaatctttctcataacatctgcaatcccatgtaagttttttattttccagcttttacagtatgttttgtgtactgctttttctaccaattattgtgttt

SEQ ID NO: 36174 - DNA, 448 bp, Homo sapiens
cttttaacttatttttccttcctcatttatacttcagccctacctcacaagcacccgaagcttgtctccaatgtctggactttttggttccatctgggccccgcaaagcgatgtgtatgaaaattgctgccccatcaaccccaccacggaacattcgacccacatggaaaaccaagcggtcgtgtgcaaggaatactacccggggttcaacccgtttcgcgcctatatgaacctggacatatggactaccacagcgaataggaatgcaaatttcccactgtctagagactcgagttactgtgggaatgtgtgaaaataattggatttttaaacaatgtgaataaagaggcttgtgttttgattactagtgtaaactggttattgagatagattatgacattggtggatattttggcacttttatatgaaaataaattttttaatgaaa

SEQ ID NO: 36175 - DNA, 2078 bp, Homo sapiens
aggcagggcggtaaatcggccgaggcgaacaggaagaggacgaaaaaaataaccgtccgcgacgccgagacaaaccggacccgcaaccaccatgaacagcaaaggtcaatatccaacacagccaacctaccctgtgcagcctcctgggaatccagtataccctcagaccttgcatcttcctcaggctccaccctataccgatgctccacctgcctactcagagctctatcgtccgagctttgtgcacccaggggctgccacagtccccaccatgtcagccgcatttcctggagcctctctgtatcttcccatggcccagtctgtggctgttgggcctttaggttccacaatccccatggcttattatccagtcggtcccatctatccacctggctccacagtgctggtggaaggagggtatgatgcaggtgccagatttggagctggggctactgctggcaacattcctcctccacctcctggatgccctcccaatgctgctcagcttgcagtcatgcagggagccaacgtcctcgtaactcagcggaaggggaacttcttcatgggtggttcagatggtggctacaccatctggtgaggaaccaaggccacctttgtgccgggaaagacatcacataccttcagcacttctcacaatgtaactgctttagtcatattaacctgaagttgcagtttagacacatgttgttggggtgtctttctggtgcccaaactttcaggcacttttcaaatttaataaggaaccatgtaatggtagcagtacctccctaaagcattttgaggtaggggaggtatccattcataaaatgaatgtgggtgaagccgccctaaggattttcctttaatttctctggagtaatactgtaccatactggtctttgcttttagtaataaaacatcaaattaggtttggagggaactttgatcttcctaagaattaaagttgccaaattattctgattggtctttaatctcctttaagtctttgatatatattacttgttataaatggaacgcattagttgtctgccttttcctttccatcccttgccccacccatcccatctccaaccctagtcttccatttcctcccgccagtctccattgaatcaatggtgcaggacagaaagccagtcagactaatttccttctttcctcgcacttctccccactcgtcatcttttaactagtgtttcacaaggatcctctgaaaccctctctgtgccccaagtacagatcccattacttctgctttcgtatctcctcaggcaaaagtggagggtgccttatgggccctcctcataggttgtctctgcatacacgaacctaacccaaatttgctttggtgccagaaaaactgagctatgtttgaacaaagatgtcgtgcaaactgtactgtgaacaacagttggtttaaaatatgaggggcaaggaggaggatgcatttcaaaagcttgattgatgtgttcagagctaaattaagaggagttttcagatcaaaaactggttaccattttttgtcagagtgtctgatgcggccactcattcggctccccagaattcctagactgggttaatagggtcatattgtgaatgtctcactacaaaatgacttgagtccagtgaaatctcattagggtttaagaatatttcagggatccttaatgttttgatttttgttttctgaaattggattttattttattttatcttataatttcagttcatctaaattgtgtgttctgtacatgtgatgtttgactgtaccattgactgttatggaagttcagcgttgtatgtctctctctacactgtggtgcacttaacttgtggaatttttatactaaaaatgtagaataaagactattttgaagatttgaataaagtgatgaagttgcattacacctcactgcaaggattctttacttagcttgtttttagatttcttctatatatattttatttatatcccatctagaattcagctaggtgctgctgctgctctgtttcctttgatgacgctttgaaataaaggcaggagtacaagcctaaaaaaa

SEQ ID NO: 36176 - DNA, 1902 bp, Homo sapiens
aggcagggcggtaaatcggccgaggcgaacaggaagaggacgaaaaaaataaccgtccgcgacgccgagacaaaccggacccgcaaccaccatgaacagcaaaggtcaatatccaacacagccaacctaccctgtgcagcctcctgggaatccagtataccctcagaccttgcatcttcctcaggctccaccctataccgatgctccacctgcctactcagagctctatcgtccgagctttgtgcacccaggggctgccacagtccccaccatgtcagccgcatttcctggagcctctctgtatcttcccatggcccagtctgtggctgttgggcctttaggttccacaatccccatggcttattatccagtcggtcccatctatccacctggctccacagtgctggtggaaggagggtatgatgcaggtgccagatttggagctggggctactgctggcaacattcctcctccacctcctggatgccctcccaatgctgctcagcttgcagtcatgcagggagccaacgtcctcgtaactcagcggaaggggaacttcttcatgggtggttcagatggtggctacaccatctggtgaggaaccaaggccacctttgtgccgggaaagacatcacataccttcagcacttctcacaatgtaactgctttagtcatattaacctgaagttgcagtttagacacatgttgttggggtgtctttctggtgcccaaactttcaggcacttttcaaatttaataaggaaccatgtaatggtagcagtacctccctaaagcattttgaggtaggggaggtatccattcataaaatgaatgtgggtgaagccgccctaaggattttcctttaatttctctggagtaatactgtaccatactggtctttgcttttagtaataaaacatcaaattaggtttggagggaactttgatcttcctaagaattaaagttgccaaattattctgattggtctttaatctcctttaagtctttgatatatattacttgttataaatggaacgcattagttgtctgccttttcctttccatcccttgccccacccatcccatctccaaccctagtcttccatttcctcccgccagtctccattgaatcaatggtgcaggacagaaagccagtcagactaatttccttctttcctcgcacttctccccactcgtcatcttttaactagtgtttcacaaggatcctctgaaaccctctctgtgccccaagtacagatcccattacttctgctttcgtatctcctcaggcaaaagtggagggtgccttatgggccctcctcataggttgtctctgcatacacgaacctaacccaaatttgctttggtgccagaaaaactgagctatgtttgaacaaagatgtcgtgcaaactgtactgtgaacaacagttggtttaaaatatgaggggcaaggaggaggatgcatttcaaaagcttgattgatgtgttcagagctaaattaagaggagttttcagatcaaaaactggttaccattttttgtcagagtgtctgatgcggccactcattcggctccccagaattcctagactgggttaatagggtcatattgtgaatgtctcactacaaaatgacttgagtccagtgaaatctcattagggtttaagaatatttcagggatccttaatgttttgatttttgttttctgaaattggattttattttattttatcttataatttcagttcatctaaattgtgtgttctgtacatgtgatgtttgactgtaccattgactgttatggaagttcagcgttgtatgtctctctctacactgtggtgcacttaacttgtggaatttttatactaaaaatgtagaataaagactattttgaagatttgaa

SEQ ID NO: 36177 - DNA, 355 bp, Homo sapiens
atatcgtcgacccacgcgtccggtgaatgtctcactacaaaatgacttgagtccagtgaaatctcattagggtttaagaatatttcagggatccttaatgttttgatttttgttttctgaaattggattttattttattttatcttataatttcagttcatctaaattgtgtgttctgtacatgtgatgtttgactgtaccattgactgttatggaagttcagcgttgtatgtctctctctacactgtggtgcacttaacttgtggaatttttatactaaaaatgtagaataaagactattttgaagatttgaataaagtgatgaagttgcattacacctcaaaaaaaaaataaa

SEQ ID NO: 36178 - DNA, 2093 bp, Homo sapiens
cgctagacggacggaccatcatgtgacacggaagtagctccgaacaggaagaggacgaaaaaaataaccgtccgcgacgccgagacaaaccggacccgcaaccaccatgaacagcaaaggtcaatatccaacacagccaacctaccctgtgcagcctcctgggaatccagtataccctcagaccttgcatcttcctcaggctccaccctataccgatgctccacctgcctactcagagctctatcgtccgagctttgtgcacccaggggctgccacagtccccaccatgtcagccgcatttcctggagcctctctgtatcttcccatggcccagtctgtggctgttgggcctttaggttccacaatccccatggcttattatccagtcggtcccatctatccacctggctccacagtgctggtggaaggagggtatgatgcaggtgccagatttggagctggggctactgctggcaacattcctcctccacctcctggatgccctcccaatgctgctcagcttgcagtcatgcagggagccaacgtcctcgtaactcagcggaaggggaacttcttcatgggtggttcagatggtggctacaccatctggtgaggaaccaaggccacctttgtgccgggaaagacatcacataccttcagcacttctcacaatgtaactgctttagtcatattaacctgaagttgcagtttagacacatgttgttggggtgtctttctggtgcccaaactttcaggcacttttcaaatttaataaggaaccatgtaatggtagcagtacctccctaaagcattttgaggtaggggaggtatccattcataaaatgaatgtgggtgaagccgccctaaggattttcctttaatttctctggagtaatactgtaccatactggtctttgcttttagtaataaaacatcaaattaggtttggagggaactttgatcttcctaagaattaaagttgccaaattattctgattggtctttaatctcctttaagtctttgatatatattacttgttataaatggaacgcattagttgtctgccttttcctttccatcccttgccccacccatcccatctccaaccctagtcttccatttcctcccgccagtctccattgaatcaatggtgcaggacagaaagccagtcagactaatttccttctttcctcgcacttctccccactcgtcatcttttaactagtgtttcacaaggatcctctgaaaccctctctgtgccccaagtacagatcccattacttctgctttcgtatctcctcaggcaaaagtggagggtgccttatgggccctcctcataggttgtctctgcatacacgaacctaacccaaatttgctttggtgccagaaaaactgagctatgtttgaacaaagatgtcgtgcaaactgtactgtgaacaacagttggtttaaaatatgaggggcaaggaggaggatgcatttcaaaagcttgattgatgtgttcagagctaaattaagaggagttttcagatcaaaaactggttaccattttttgtcagagtgtctgatgcggccactcattcggctccccagaattcctagactgggttaatagggtcatattgtgaatgtctcactacaaaatgacttgagtccagtgaaatctcattagggtttaagaatatttcagggatccttaatgttttgatttttgttttctgaaattggattttattttattttatcttataatttcagttcatctaaattgtgtgttctgtacatgtgatgtttgactgtaccattgactgttatggaagttcagcgttgtatgtctctctctacactgtggtgcacttaacttgtggaatttttatactaaaaatgtagaataaagactattttgaagatttgaataaagtgatgaagttgcattacacctcactgcaaggattctttacttagcttgtttttagatttcttctatatatattttatttatatcccatctagaattcagctaggtgctgctgctgctctgtttcctttgatgacgctttgaaataaaggcaggagtacaagcctaaaaaaa

SEQ ID NO: 36179 - DNA, 1917 bp, Homo sapiens
cgctagacggacggaccatcatgtgacacggaagtagctccgaacaggaagaggacgaaaaaaataaccgtccgcgacgccgagacaaaccggacccgcaaccaccatgaacagcaaaggtcaatatccaacacagccaacctaccctgtgcagcctcctgggaatccagtataccctcagaccttgcatcttcctcaggctccaccctataccgatgctccacctgcctactcagagctctatcgtccgagctttgtgcacccaggggctgccacagtccccaccatgtcagccgcatttcctggagcctctctgtatcttcccatggcccagtctgtggctgttgggcctttaggttccacaatccccatggcttattatccagtcggtcccatctatccacctggctccacagtgctggtggaaggagggtatgatgcaggtgccagatttggagctggggctactgctggcaacattcctcctccacctcctggatgccctcccaatgctgctcagcttgcagtcatgcagggagccaacgtcctcgtaactcagcggaaggggaacttcttcatgggtggttcagatggtggctacaccatctggtgaggaaccaaggccacctttgtgccgggaaagacatcacataccttcagcacttctcacaatgtaactgctttagtcatattaacctgaagttgcagtttagacacatgttgttggggtgtctttctggtgcccaaactttcaggcacttttcaaatttaataaggaaccatgtaatggtagcagtacctccctaaagcattttgaggtaggggaggtatccattcataaaatgaatgtgggtgaagccgccctaaggattttcctttaatttctctggagtaatactgtaccatactggtctttgcttttagtaataaaacatcaaattaggtttggagggaactttgatcttcctaagaattaaagttgccaaattattctgattggtctttaatctcctttaagtctttgatatatattacttgttataaatggaacgcattagttgtctgccttttcctttccatcccttgccccacccatcccatctccaaccctagtcttccatttcctcccgccagtctccattgaatcaatggtgcaggacagaaagccagtcagactaatttccttctttcctcgcacttctccccactcgtcatcttttaactagtgtttcacaaggatcctctgaaaccctctctgtgccccaagtacagatcccattacttctgctttcgtatctcctcaggcaaaagtggagggtgccttatgggccctcctcataggttgtctctgcatacacgaacctaacccaaatttgctttggtgccagaaaaactgagctatgtttgaacaaagatgtcgtgcaaactgtactgtgaacaacagttggtttaaaatatgaggggcaaggaggaggatgcatttcaaaagcttgattgatgtgttcagagctaaattaagaggagttttcagatcaaaaactggttaccattttttgtcagagtgtctgatgcggccactcattcggctccccagaattcctagactgggttaatagggtcatattgtgaatgtctcactacaaaatgacttgagtccagtgaaatctcattagggtttaagaatatttcagggatccttaatgttttgatttttgttttctgaaattggattttattttattttatcttataatttcagttcatctaaattgtgtgttctgtacatgtgatgtttgactgtaccattgactgttatggaagttcagcgttgtatgtctctctctacactgtggtgcacttaacttgtggaatttttatactaaaaatgtagaataaagactattttgaagatttgaa

SEQ ID NO: 36180 - DNA, 1958 bp, Homo sapiens
cgctagacggacggaccatcatgtgacacggaagtagctccgaacaggaagaggacgaaaaaaataaccgtccgcgacgccgagacaaaccggacccgcaaccaccatgaacagcaaaggtcaatatccaacacagccaacctaccctgtgcagcctcctgggaatccagtataccctcagaccttgcatcttcctcaggctccaccctataccgatgctccacctgcctactcagagctctatcgtccgagctttgtgcacccaggggctgccacagtccccaccatgtcagccgcatttcctggagcctctctgtatcttcccatggcccagtctgtggctgttgggcctttaggttccacaatccccatggcttattatccagtcggtcccatctatccacctggctccacagtgctggtggaaggagggtatgatgcaggtgccagatttggagctggggctactgctggcaacattcctcctccacctcctggatgccctcccaatgctgctcagcttgcagtcatgcagggagccaacgtcctcgtaactcagcggaaggggaacttcttcatgggtggttcagatggtggctacaccatctggtgaggaaccaaggccacctttgtgccgggaaagacatcacataccttcagcacttctcacaatgtaactgctttagtcatattaacctgaagttgcagtttagacacatgttgttggggtgtctttctggtgcccaaactttcaggcacttttcaaatttaataaggaaccatgtaatggtagcagtacctccctaaagcattttgaggtaggggaggtatccattcataaaatgaatgtgggtgaagccgccctaaggattttcctttaatttctctggagtaatactgtaccatactggtctttgcttttagtaataaaacatcaaattaggtttggagggaactttgatcttcctaagaattaaagttgccaaattattctgattggtctttaatctcctttaagtctttgatatatattacttgttataaatggaacgcattagttgtctgccttttcctttccatcccttgccccacccatcccatctccaaccctagtcttccatttcctcccgccagtctccattgaatcaatggtgcaggacagaaagccagtcagactaatttccttctttcctcgcacttctccccactcgtcatcttttaactagtgtttcacaaggatcctctgaaaccctctctgtgccccaagtacagatcccattacttctgctttcgtatctcctcaggcaaaagtggagggtgccttatgggccctcctcataggttgtctctgcatacacgaacctaacccaaatttgctttggtgccagaaaaactgagctatgtttgaacaaagatgtcgtgcaaactgtactgtgaacaacagttggtttaaaatatgaggggcaaggaggaggatgcatttcaaaagcttgattgatgtgttcagagctaaattaagaggagttttcagatcaaaaactggttaccattttttgtcagagtgtctgatgcggccactcattcggctccccagaattcctagactgggttaatagggtcatattgtgaatgtctcactacaaaatgacttgagtccagtgaaatctcattagggtttaagaatatttcagggatccttaatgttttgatttttgttttctgaaattggattttattttattttatcttataatttcagttcatctaaattgtgtgttctgtacatgtgatgtttgactgtaccattgactgttatggaagttcagcgttgtatgtctctctctacactgtggtgcacttaacttgtggaatttttatactaaaaatgtagaataaagactattttgaagatttgaataaagtgatgaagttgcattacacctcaaaaaaaaaataaa

SEQ ID NO: 36181 - DNA, 1884 bp, Homo sapiens
cgctagacggacggaccatcatgtgacacggaagtagctccgaacaggaagaggacgaaaaaaataaccgtccgcgacgccgagacaaaccggacccgcaaccaccatgaacagcaaaggtcaatatccaacacagccaacctaccctgtgcagcctcctgggaatccagtataccctcagaccttgcatcttcctcaggctccaccctataccgatgctccacctgcctactcagagctctatcgtccgagctttgtgcacccaggggctgccacagtccccaccatgtcagccgcatttcctggagcctctctgtatcttcccatggcccagtctgtggctgttgggcctttaggttccacaatccccatggcttattatccagtcggtcccatctatccacctggctccacagtgctggtggaaggagggtatgatgcaggtgccagatttggagctggggctactgctggcaacattcctcctccacctcctggatgccctcccaatgctgctcagcttgcagtcatgcagggagccaacgtcctcgtaactcagcggaaggggaacttcttcatgggtggttcagatggtggctacaccatctggtgaggaaccaaggccacctttgtgccgggaaagacatcacataccttcagcacttctcacaatgtaactgctttagtcatattaacctgaagttgcagtttagacacatgttgttggggtgtctttctggtgcccaaactttcaggcacttttcaaatttaataaggaaccatgtaatggtagcagtacctccctaaagcattttgaggtaggggaggtatccattcataaaatgaatgtgggtgaagccgccctaaggattttcctttaatttctctggagtaatactgtaccatactggtctttgcttttagtaataaaacatcaaattaggtttggagggaactttgatcttcctaagaattaaagttgccaaattattctgattggtctttaatctcctttaagtctttgatatatattacttgttataaatggaacgcattagttgtctgccttttcctttccatcccttgccccacccatcccatctccaaccctagtcttccatttcctcccgccagtctccattgaatcaatggtgcaggacagaaagccagtcagactaatttccttctttcctcgcacttctccccactcgtcatcttttaactagtgtttcacaaggatcctctgaaaccctctctgtgccccaagtacagatcccattacttctgctttcgtatctcctcaggcaaaagtggagggtgccttatgggccctcctcataggttgtctctgcatacacgaacctaacccaaatttgctttggtgccagaaaaactgagctatgtttgaacaaagatgtcgtgcaaactgtactgtgaacaacagttggtttaaaatatgaggggcaaggaggaggatgcatttcaaaagcttgattgatgtgttcagagctaaattaagaggagttttcagatcaaaaactggttaccattttttgtcagagtgtctgatgcggccactcattcggctccccagaattcctagactgggttaatagggtcatattgtgaatgtctcactacaaaatgacttgagtccagtgaaatctcattagggtttaagaatatttcagggatccttaatgttttgatttttgttttctgaaattggattttattttattttatcttataatttcagttcatctaaattgtgtgttctgtacatgtgatgtttgactgtaccattgactgttatggaagttcagcgttgtatgtctctctctacactgtgggtagacgcctgtggtaagactaatcctgggg

SEQ ID NO: 36182 - DNA, 1309 bp, Homo sapiens
  misc_feature (1254)..(1254): n is a, c, g, or t
  misc_feature (1257)..(1257): n is a, c, g, or t
cgctagacggacggaccatcatgtgacacggaagtagctccgaacaggaagaggacgaaaaaaataaccgtccgcgacgccgagacaaaccggacccgcaaccaccatgaacagcaaaggtcaatatccaacacagccaacctaccctgtgcagcctcctgggaatccagtataccctcagaccttgcatcttcctcaggctccaccctataccgatgctccacctgcctactcagagctctatcgtccgagctttgtgcacccaggggctgccacagtccccaccatgtcagccgcatttcctggagcctctctgtatcttcccatggcccagtctgtggctgttgggcctttaggttccacaatccccatggcttattatccagtcggtcccatctatccacctggctccacagtgctggtggaaggagggtatgatgcaggtgccagatttggagctggggctactgctggcaacattcctcctccacctcctggatgccctcccaatgctgctcagcttgcagtcatgcagggagccaacgtcctcgtaactcagcggaaggggaacttcttcatgggtggttcagatggtggctacaccatctggtgaggaaccaaggccacctttgtgccgggaaagacatcacataccttcagcacttctcacaatgtaactgctttagtcatattaacctgaagttgcagtttagacacatgttgttggggtgtctttctggtgcccaaactttcaggcacttttcaaatttaataaggaaccatgtaatggtagcagtacctccctaaagcattttgaggtaggggaggtatccattcataaaatgaatgtgggtgaagccgccctaaggattttcctttaatttctctggagtaatactgtaccatactggtctttgcttttagtaataaaacatcaaattaggtttggagggaactttgatcttcctaagaattaaagttgccaaattattctgattggtctttaatctcctttaagtctttgatatatattacttgttataaatggaacgcattagttgtctgccttttcctttccatcccttgccccacccatcccatctccaaccctagtcttccatttcctcccgccagtctccattgaatcaatggtgcaggacagaaagccagtcagactaatttccttctttcctcgcacttctccccactcgtcatcttttaactagtgtttcacaaggatcctctgaaaccttntgngccagaagatccatacatctggtcggttcccggccagtggggcctaggccca

SEQ ID NO: 36183 - DNA, 1276 bp, Homo sapiens
cgctagacggacggaccatcatgtgacacggaagtagctccgaacaggaagaggacgaaaaaaataaccgtccgcgacgccgagacaaaccggacccgcaaccaccatgaacagcaaaggtcaatatccaacacagccaacctaccctgtgcagcctcctgggaatccagtataccctcagaccttgcatcttcctcaggctccaccctataccgatgctccacctgcctactcagagctctatcgtccgagctttgtgcacccaggggctgccacagtccccaccatgtcagccgcatttcctggagcctctctgtatcttcccatggcccagtctgtggctgttgggcctttaggttccacaatccccatggcttattatccagtcggtcccatctatccacctggctccacagtgctggtggaaggagggtatgatgcaggtgccagatttggagctggggctactgctggcaacattcctcctccacctcctggatgccctcccaatgctgctcagcttgcagtcatgcagggagccaacgtcctcgtaactcagcggaaggggaacttcttcatgggtggttcagatggtggctacaccatctggtgaggaaccaaggccacctttgtgccgggaaagacatcacataccttcagcacttctcacaatgtaactgctttagtcatattaacctgaagttgcagtttagacacatgttgttggggtgtctttctggtgcccaaactttcaggcacttttcaaatttaataaggaaccatgtaatggtagcagtacctccctaaagcattttgaggtaggggaggtatccattcataaaatgaatgtgggtgaagccgccctaaggattttcctttaatttctctggagtaatactgtaccatactggtctttgcttttagtaataaaacatcaaattaggtttggagggaactttgatcttcctaagaattaaagttgccaaattattctgattggtctttaatctcctttaagtctttgatatatattacttgttataaatggaacgcattagttgtctgccttttcctttccatcccttgccccacccatcccatctccaaccctagtcttccatttcctcccgccagtctccattgactgttatggaagttcagcgttgtatgtctctctctacactgtggtgcacttaacttgtggaatttttatactaaaaatgtagaataaagactattttgaagatttgaaaataaaaaaaataaaaaatacaaa

SEQ ID NO: 36184 - DNA, 1896 bp, Homo sapiens
ccctaactccagcaggcttctaacttccggtccgcaggcttttgtggccaaccccaaggggggggctggccaaacccaaggtccccaccatgtcagccgcatttcctggagcctctctgtatcttcccatggcccagtctgtggctgttgggcctttaggttccacaatccccatggcttattatccagtcggtcccatctatccacctggctccacagtgctggtggaaggagggtatgatgcaggtgccagatttggagctggggctactgctggcaacattcctcctccacctcctggatgccctcccaatgctgctcagcttgcagtcatgcagggagccaacgtcctcgtaactcagcggaaggggaacttcttcatgggtggttcagatggtggctacaccatctggtgaggaaccaaggccacctttgtgccgggaaagacatcacataccttcagcacttctcacaatgtaactgctttagtcatattaacctgaagttgcagtttagacacatgttgttggggtgtctttctggtgcccaaactttcaggcacttttcaaatttaataaggaaccatgtaatggtagcagtacctccctaaagcattttgaggtaggggaggtatccattcataaaatgaatgtgggtgaagccgccctaaggattttcctttaatttctctggagtaatactgtaccatactggtctttgcttttagtaataaaacatcaaattaggtttggagggaactttgatcttcctaagaattaaagttgccaaattattctgattggtctttaatctcctttaagtctttgatatatattacttgttataaatggaacgcattagttgtctgccttttcctttccatcccttgccccacccatcccatctccaaccctagtcttccatttcctcccgccagtctccattgaatcaatggtgcaggacagaaagccagtcagactaatttccttctttcctcgcacttctccccactcgtcatcttttaactagtgtttcacaaggatcctctgaaaccctctctgtgccccaagtacagatcccattacttctgctttcgtatctcctcaggcaaaagtggagggtgccttatgggccctcctcataggttgtctctgcatacacgaacctaacccaaatttgctttggtgccagaaaaactgagctatgtttgaacaaagatgtcgtgcaaactgtactgtgaacaacagttggtttaaaatatgaggggcaaggaggaggatgcatttcaaaagcttgattgatgtgttcagagctaaattaagaggagttttcagatcaaaaactggttaccattttttgtcagagtgtctgatgcggccactcattcggctccccagaattcctagactgggttaatagggtcatattgtgaatgtctcactacaaaatgacttgagtccagtgaaatctcattagggtttaagaatatttcagggatccttaatgttttgatttttgttttctgaaattggattttattttattttatcttataatttcagttcatctaaattgtgtgttctgtacatgtgatgtttgactgtaccattgactgttatggaagttcagcgttgtatgtctctctctacactgtggtgcacttaacttgtggaatttttatactaaaaatgtagaataaagactattttgaagatttgaataaagtgatgaagttgcattacacctcactgcaaggattctttacttagcttgtttttagatttcttctatatatattttatttatatcccatctagaattcagctaggtgctgctgctgctctgtttcctttgatgacgctttgaaataaaggcaggagtacaagcctaaaaaaa

SEQ ID NO: 36185 - DNA, 1812 bp, Homo sapiens
aggcagggcggtaaatcggccgaggcgaacaggaagaggacgaaaaaaataaccgtccgcgacgccgagacaaaccggacccgcaaccaccatgaacagcaaaggtcaatatccaacacagccaacctaccctgtgcagcctcctgggaatccagtataccctcagaccttgcatcttcctcaggctccaccctataccgatgcctccacctcctggatgccctcccaatgctgctcagcttgcagtcatgcagggagccaacgtcctcgtaactcagcggaaggggaacttcttcatgggtggttcagatggtggctacaccatctggtgaggaaccaaggccacctttgtgccgggaaagacatcacataccttcagcacttctcacaatgtaactgctttagtcatattaacctgaagttgcagtttagacacatgttgttggggtgtctttctggtgcccaaactttcaggcacttttcaaatttaataaggaaccatgtaatggtagcagtacctccctaaagcattttgaggtaggggaggtatccattcataaaatgaatgtgggtgaagccgccctaaggattttcctttaatttctctggagtaatactgtaccatactggtctttgcttttagtaataaaacatcaaattaggtttggagggaactttgatcttcctaagaattaaagttgccaaattattctgattggtctttaatctcctttaagtctttgatatatattacttgttataaatggaacgcattagttgtctgccttttcctttccatcccttgccccacccatcccatctccaaccctagtcttccatttcctcccgccagtctccattgaatcaatggtgcaggacagaaagccagtcagactaatttccttctttcctcgcacttctccccactcgtcatcttttaactagtgtttcacaaggatcctctgaaaccctctctgtgccccaagtacagatcccattacttctgctttcgtatctcctcaggcaaaagtggagggtgccttatgggccctcctcataggttgtctctgcatacacgaacctaacccaaatttgctttggtgccagaaaaactgagctatgtttgaacaaagatgtcgtgcaaactgtactgtgaacaacagttggtttaaaatatgaggggcaaggaggaggatgcatttcaaaagcttgattgatgtgttcagagctaaattaagaggagttttcagatcaaaaactggttaccattttttgtcagagtgtctgatgcggccactcattcggctccccagaattcctagactgggttaatagggtcatattgtgaatgtctcactacaaaatgacttgagtccagtgaaatctcattagggtttaagaatatttcagggatccttaatgttttgatttttgttttctgaaattggattttattttattttatcttataatttcagttcatctaaattgtgtgttctgtacatgtgatgtttgactgtaccattgactgttatggaagttcagcgttgtatgtctctctctacactgtggtgcacttaacttgtggaatttttatactaaaaatgtagaataaagactattttgaagatttgaataaagtgatgaagttgcattacacctcactgcaaggattctttacttagcttgtttttagatttcttctatatatattttatttatatcccatctagaattcagctaggtgctgctgctgctctgtttcctttgatgacgctttgaaataaaggcaggagtacaagcctaaaaaaa

SEQ ID NO: 36186 - DNA, 1832 bp, Homo sapiens
aggcagggcggtaaatcggccgaggcgaacaggaagaggacgaaaaaaataaccgtccgcgacgccgagacaaaccggacccgcaaccaccatgaacagcaaaggtcaatatccaacacagccaacctaccctgtgcagcctcctgggaatccagtataccctcagaccttgcatcttcctcaggctccaccctataccgatgctccacctgcctactcagagcctccacctcctggatgccctcccaatgctgctcagcttgcagtcatgcagggagccaacgtcctcgtaactcagcggaaggggaacttcttcatgggtggttcagatggtggctacaccatctggtgaggaaccaaggccacctttgtgccgggaaagacatcacataccttcagcacttctcacaatgtaactgctttagtcatattaacctgaagttgcagtttagacacatgttgttggggtgtctttctggtgcccaaactttcaggcacttttcaaatttaataaggaaccatgtaatggtagcagtacctccctaaagcattttgaggtaggggaggtatccattcataaaatgaatgtgggtgaagccgccctaaggattttcctttaatttctctggagtaatactgtaccatactggtctttgcttttagtaataaaacatcaaattaggtttggagggaactttgatcttcctaagaattaaagttgccaaattattctgattggtctttaatctcctttaagtctttgatatatattacttgttataaatggaacgcattagttgtctgccttttcctttccatcccttgccccacccatcccatctccaaccctagtcttccatttcctcccgccagtctccattgaatcaatggtgcaggacagaaagccagtcagactaatttccttctttcctcgcacttctccccactcgtcatcttttaactagtgtttcacaaggatcctctgaaaccctctctgtgccccaagtacagatcccattacttctgctttcgtatctcctcaggcaaaagtggagggtgccttatgggccctcctcataggttgtctctgcatacacgaacctaacccaaatttgctttggtgccagaaaaactgagctatgtttgaacaaagatgtcgtgcaaactgtactgtgaacaacagttggtttaaaatatgaggggcaaggaggaggatgcatttcaaaagcttgattgatgtgttcagagctaaattaagaggagttttcagatcaaaaactggttaccattttttgtcagagtgtctgatgcggccactcattcggctccccagaattcctagactgggttaatagggtcatattgtgaatgtctcactacaaaatgacttgagtccagtgaaatctcattagggtttaagaatatttcagggatccttaatgttttgatttttgttttctgaaattggattttattttattttatcttataatttcagttcatctaaattgtgtgttctgtacatgtgatgtttgactgtaccattgactgttatggaagttcagcgttgtatgtctctctctacactgtggtgcacttaacttgtggaatttttatactaaaaatgtagaataaagactattttgaagatttgaataaagtgatgaagttgcattacacctcactgcaaggattctttacttagcttgtttttagatttcttctatatatattttatttatatcccatctagaattcagctaggtgctgctgctgctctgtttcctttgatgacgctttgaaataaaggcaggagtacaagcctaaaaaaa

SEQ ID NO: 36187 - DNA, 2067 bp, Homo sapiens
cgctagacggacggaccatcatgtgacacggaagtagctccgaacaggaagaggacgaaaaaaataaccgtccgcgacgccgagacaaaccggacccgcaaccaccatgaacagcaaaggtcaatatccaacacagccaacctaccctgtgcagcctcctgggaatccagtataccctcagaccttgcatcttcctcaggctccaccctataccgatgctccacctgcctactcagagctctatcgtccgagctttgtgcacccaggggctgccacagtccccaccatgtcagccgcatttcctggagcctctctgtatcttcccatggcccagtctgtggctgttgggcctttaggttccacaatccccatggcttattatccagtcggtcccatctatccacctggctccacagtgctggtggaaggagggtatgatgcaggtgccagatttggagctggggctactgctggcaacattcctcctccacctcctggatgccctcccaatgctgctcagcttgcagtcatgcagggagccaacgtcctcgtaactcagcggaaggggaacttcttcatgggtggttcagatggtggctacaccatctggtgaggaaccaaggccacctttgtgccgggaaagacatcacataccttcagcacttctcacctgaagttgcagtttagacacatgttgttggggtgtctttctggtgcccaaactttcaggcacttttcaaatttaataaggaaccatgtaatggtagcagtacctccctaaagcattttgaggtaggggaggtatccattcataaaatgaatgtgggtgaagccgccctaaggattttcctttaatttctctggagtaatactgtaccatactggtctttgcttttagtaataaaacatcaaattaggtttggagggaactttgatcttcctaagaattaaagttgccaaattattctgattggtctttaatctcctttaagtctttgatatatattacttgttataaatggaacgcattagttgtctgccttttcctttccatcccttgccccacccatcccatctccaaccctagtcttccatttcctcccgccagtctccattgaatcaatggtgcaggacagaaagccagtcagactaatttccttctttcctcgcacttctccccactcgtcatcttttaactagtgtttcacaaggatcctctgaaaccctctctgtgccccaagtacagatcccattacttctgctttcgtatctcctcaggcaaaagtggagggtgccttatgggccctcctcataggttgtctctgcatacacgaacctaacccaaatttgctttggtgccagaaaaactgagctatgtttgaacaaagatgtcgtgcaaactgtactgtgaacaacagttggtttaaaatatgaggggcaaggaggaggatgcatttcaaaagcttgattgatgtgttcagagctaaattaagaggagttttcagatcaaaaactggttaccattttttgtcagagtgtctgatgcggccactcattcggctccccagaattcctagactgggttaatagggtcatattgtgaatgtctcactacaaaatgacttgagtccagtgaaatctcattagggtttaagaatatttcagggatccttaatgttttgatttttgttttctgaaattggattttattttattttatcttataatttcagttcatctaaattgtgtgttctgtacatgtgatgtttgactgtaccattgactgttatggaagttcagcgttgtatgtctctctctacactgtggtgcacttaacttgtggaatttttatactaaaaatgtagaataaagactattttgaagatttgaataaagtgatgaagttgcattacacctcactgcaaggattctttacttagcttgtttttagatttcttctatatatattttatttatatcccatctagaattcagctaggtgctgctgctgctctgtttcctttgatgacgctttgaaataaaggcaggagtacaagcctaaaaaaa

SEQ ID NO: 36188 - DNA, 1481 bp, Homo sapiens
aattcgagctcgaattccgaattccgggatgggatcacataccttcagcacttctcacaatgtaactgctttagtcatattaacctgaagttgcagtttagacacatgttgttggggtgtctttctggtgcccaaactttcaggcacttttcaaatttaataaggaaccatgtaatggtagcagtacctccctaaagcattttgaggtaggggaggtatccattcataaaatgaatgtgggtgaagccgccctaaggattttcctttaatttctctggagtaatactgtaccatactggtctttgcttttagtaataaaacatcaaattaggtttggagggaactttgatcttcctaagaattaaagttgccaaattattctgattggtctttaatctcctttaagtctttgatatatattacttgttataaatggaacgcattagttgtctgccttttcctttccatcccttgccccacccatcccatctccaaccctagtcttccatttcctcccgccagtctccattgaatcaatggtgcaggacagaaagccagtcagactaatttccttctttcctcgcacttctccccactcgtcatcttttaactagtgtttcacaaggatcctctgaaaccctctctgtgccccaagtacagatcccattacttctgctttcgtatctcctcaggcaaaagtggagggtgccttatgggccctcctcataggttgtctctgcatacacgaacctaacccaaatttgctttggtgccagaaaaactgagctatgtttgaacaaagatgtcgtgcaaactgtactgtgaacaacagttggtttaaaatatgaggggcaaggaggaggatgcatttcaaaagcttgattgatgtgttcagagctaaattaagaggagttttcagatcaaaaactggttaccattttttgtcagagtgtctgatgcggccactcattcggctccccagaattcctagactgggttaatagggtcatattgtgaatgtctcactacaaaatgacttgagtccagtgaaatctcattagggtttaagaatatttcagggatccttaatgttttgatttttgttttctgaaattggattttattttattttatcttataatttcagttcatctaaattgtgtgttctgtacatgtgatgtttgactgtaccattgactgttatggaagttcagcgttgtatgtctctctctacactgtggtgcacttaacttgtggaatttttatactaaaaatgtagaataaagactattttgaagatttgaataaagtgatgaagttgcattacacctcactgcaaggattctttacttagcttgtttttagatttcttctatatatattttatttatatcccatctagaattcagctaggtgctgctgctgctctgtttcctttgatgacgctttgaaataaaggcaggagtacaagcctaaaaaaa

SEQ ID NO: 36189 - DNA, 427 bp, Homo sapiens
  misc_feature (419)..(419): n is a, c, g, or t
ctctactctcacagggccttcaatctagcaagggaaagatctgcacaaaactacacttaaaagcacttaaaccagaaatgtggttattacaaaggcgaaatggccagtctcagggatcaggaaacgcttccttgaaaacgtgacatttaggctgagacctgaagggtaagaaagaaagtgactgataaaggcagaaataccagtgagaggtaagagcggtgcgggcagagagatgaacaacagccaggagccagaaaagagcttggatccttcaaggaagaagccagtgtggctggaatacagtaacaaaggaagaaaagtatgaaaagttctcctgtgagcgactggagtcgtgcttgacatgttcctttcctctgtccccacatccagtcagtaccaccctggtattaggaggtggntactgttg

SEQ ID NO: 36190 - DNA, 233 bp, Homo sapiens
aaaatgttggcagtatttctgattaatgtgggaagaaaagctctattcattgactgatttatttgaaatcagatggggtcagttaaaaaatatttaatttgttctcttgaaacactgaacccaaaagaaatgaatctgaacttaaataataatctttgggcaaaaattgcacacaattttgattgctttcctaagtgtcatgtaaacaccaaaacattaagaaagagcttcta

SEQ ID NO: 36191 - DNA, 443 bp, Homo sapiens
ttggcccaccccgcccccaacctgtaccggtaaaaaccagaccagatggcagaagaaaaggaagaaaagagcaacacaagcagctgaccagcagggatacaagctgctgagccttggggatacatgcggctgagctttagctgtggatagatgcggctaacttcagatggtgcgacttcagggaaagatcaccttccttccgcatcaattccccatcctgctgacagccacttttatcacccattgaaatcctccgcatgcactaccttccaaatagctcatgtgacctggttcttcctggacactgaacaagaactcgggtgtcaaaaagggcaggtgcaggatgctgtcaccctgacccttcactgaactgttaatatttagccatccacgaacaacagctgagtgaaacgagccactccagttcctgcccacgaaggggg

SEQ ID NO: 36192 - DNA, 872 bp, Homo sapiens
attaaactcaggcgctttaaattttacactgaaatacgttgaaagctagcttagttgatctctgtcattaacagaaaccatctctgtttttgttattttcttggcttgatttaacgttcgttgctcgcaagaaacagaaacccactcaaggtagttgaaggaaagggaggttttcattcaagggagttggagaatcggaaggcaagaatgagcctcaggcctctcatgggactggacccggccagtggaaagctgttgtctcacaccctgccccacctcacaatacatgtctcttttctgcctctttccttgcatgcttgtcattctcactcgctatgtatgccagctttccctgcagctccatgcacgctgcgtctgtggccctttcctgccttttgccttccaggctaaaactagatagcttttgggtcttaattccaaatgcttaggagtgaatcggttagctcagaagtccaaccagttcaaacacctgtgtcaatctagcacattaattctcaaccttggctattatttgatgtcactgggagctttaatagataccaaagcctgtgtcccattaccagaaattctggttttagtggtctgggatgttactaaacctaatttgttgggatatgtttaagttcccagaggattctaacatagagctgtggtccatggttaagaagcactgatctaggagagaagagggtcatcttataggcgtggaatgctcagatagtggggtcttggcctaggtagattattctcccaaagatgtcctctagggtgtccccatttttggctttaacctaccagtcctctttcttatagggtgtgttggaataacctatggagctctactttaagga

SEQ ID NO: 36193 - DNA, 474 bp, Homo sapiens
gaacccactcaatgctgattacactgatgtggtttctcttggtaagggacccatcaaagggttttacccagagccagggaagctgcatggcctcttgccgataatcacacatgaagagtagcaggaatttctatgtggctaagataaagtacgtgaagaaatgcttaaaaactgcttggagtagaacacaatttactttaatgcaaaagcagtgcccaggaagctgagtgagatgtaaaggcagaagtctaaaagggagaaaactcagtaggcaaaaatcactaaatgatttctacaaaatcatttcctgagcacccactttggtatataatatgctttaagcttttcactactctgccgggcgtggtggctcatgcctgtaatcccagcactttgggaggctgaggtgggaggatcaccaggtcaggagttcgagaccagcctggccaacatggtgaaaccccatctctacta

SEQ ID NO: 36194 - DNA, 372 bp, Homo sapiens
ggccattgtcctggtccaagtctttattctgtgttaccagaattattgcaaaaacctctcagctagtgttcatactcctgggttttcctgtctatttctgtaagtaagtgctgcctgatcctgctaaaatgcatgctactaaacttttaatgatgtcccaatatgtatagaaaaacctacatgctttggcacaggctttttttgtgtcactattttttcttatctttctaggctagtcttctcctgcttccttattataccctatacttacagtggccatataattttccaaatgggacacttaagtgtgaaaggggccctagtagtaattatgttggggaaacaggcctaagacaatactgttctgtaata

SEQ ID NO: 36195 - DNA, 1099 bp, Homo sapiens
  misc_feature (726)..(726): n is a, c, g, or t
gagacagggtctcgctctgttacccaggctggagtgcagcggcacgatctcagttttctgcagcctccacatcccaggctcaagcgattctcctgcctcagcctcccgagtagctgtgactgcaatcacgcgccaccataccccactaatttttgtattttttgtagagatgggtagggtcagtaaccatttaaatatgccactgaccttgagaaaaagaatgtcagctataatcacaagccacaaacgtctgtcactgtgaattggctcatcacgaagaactgagggataacatggagttatgatagcagtggaggcaggcaggggaaaagggcccatgagatatggatggcagcactctcccccattccctgccatccccactgcacatgtataagctaagtaaatattacgtcgtcttttactaacaccccaaaactctcacttgatgaaggaccaggggagtaagttgctgaatgggctcattaagacttaggaattctttagaggctcaaacacagaaagccagtgatgggaaataaggatgacacagctgatagcccatggagtcccagggtgagactaagactccataagagccaggcttagacttataaaggaatgctggctgctgaagacattcagaactcaagctaagaatctctggcctgcattcagaagatacctttggtctctgtggttggccaaatgatggctccaaatatnatccacagatatgattatcctggataatctgggtggtccctcaatgcaaccacaagaatctttataaaaaggcagagggagatttggcacagaagagaaagcagtgatcctggaggtactgattggagtgatgtggccacaagccaaggaatgcctgcagcctgcagaagctggaagaggccaggaatggattatcccctagagcccccggcaagaacacggcccttccaaccccttgactttatcacagtgaaactgatgtcagacttctggcctccagaactgcaggagaataaatctggattgttttaagccactaagtttgtgataattggttacaccagccaaagaaaaccaaggcagtccttcattc

SEQ ID NO: 36196 - DNA, 1163 bp, Homo sapiens
  misc_feature (790)..(790): n is a, c, g, or t
attacaggcatgagccactgtgcctggccttgaattgtgaactttaaaagggtgaattttatggtatgtgaatcatatcacattcttttaaaaaagttaacagggactctttcctcagtgtggaagtgtaattgacagacctcctaactaccagtgagcgtggggatgagaaaatgccacacaataaagttgcttgagaaagagagagattgagcgacagatcatgtgtgagatggagtagggtcagtaaccatttaaatatgccactgaccttgagaaaaagaatgtcagctataatcacaagccacaaacgtctgtcactgtgaattggctcatcacgaagaactgagggataacatggagttatgatagcagtggaggcaggcaggggaaaagggcccatgagatatggatggcagcactctcccccattccctgccatccccactgcacatgtataagctaagtaaatattacgtcgtcttttactaacaccccaaaactctcacttgatgaaggaccaggggagtaagttgctgaatgggctcattaagacttaggaattctttagaggctcaaacacagaaagccagtgatgggaaataaggatgacacagctgatagcccatggagtcccagggtgagactaagactccataagagccaggcttagacttataaaggaatgctggctgctgaagacattcagaactcaagctaagaatctctggcctgcattcagaagatacctttggtctctgtggttggccaaatgatggctccaaatatnatccacagatatgattatcctggataatctgggtggtccctcaatgcaaccacaagaatctttataaaaaggcagagggagatttggcacagaagagaaagcagtgatcctggaggtactgattggagtgatgtggccacaagccaaggaatgcctgcagcctgcagaagctggaagaggccaggaatggattatcccctagagcccccggcaagaacacggcccttccaaccccttgactttatcacagtgaaactgatgtcagacttctggcctccagaactgcaggagaataaatctggattgttttaagccactaagtttgtgataattggttacaccagccaaagaaaaccaaggcagtccttcattc

SEQ ID NO: 36197 - DNA, 495 bp, Homo sapiens
ccataacgtgaaagaaggattttagatattctgtatatttgtacaatgtaatgaatgcctattagaatggataatggaaactgggcctatatttctgtttttcacatggtgcctgccatgttattgtttataaacaattgcagtttatcagttaccaaagcatctcagatagctagggggtggggtgggagaacatggcaggaaatgtacactcagtaatgaattctgaagcattttcgttcttttattggagcaagtcaccaaatgagaaatggacatggaatttgaaataacactgcatttgaatccgttttcagtatttattcaactacagaggcactttctaagattatttttcctcgagatctatagactccaaactacagacttagctgaaagcaaaagttagcctcagaaaagtctttatcatcataagctctggttatcaaattttaattgatgcctgaaaatttaatactataaatgccaaagaag

SEQ ID NO: 36198 - DNA, 346 bp, Homo sapiens
aaatgggctctcactatgttgctcaggctggtctcaatctcctgggctcaggtgatcctcccatctaagcctcctgagtagctaggactacgtgtgtgtgacaccacagccggccaattaaaattttattttttattttatttttttagagatagggtctcactatgtgacccaggctggctgaaatgttaattttaaaagagcatcccaaattagcagagtaggctaccttctcaagttgccatcaagaactggtactcagctggcttttgtaaaggtaacctagcagtgtaaagctaagactgccagagggatgtaaagctaagactgccagagggatgtaaag

SEQ ID NO: 36199 - DNA, 441 bp, Homo sapiens
aaggcccccactattggaaggtcagtggctctatcataggccaacagtgacagaagtgggcagctcccaggaggcccgatgtcttctcatgccctgtggtcctaggaaggagcaggaagtggttggaaacaggggctgggctcagatcttatgacttcctgggtttcaggagatctggttatcaactgaaagccaggatctggatgagggtatgtgcctgtttaagtcatgatgaaatggcttcaggacagggatatatacaaagtttgtgcatttgtcctcccagggattttccaactcaattcttacccaattacagatcccaaaagtacagagactgtccccatttctctgaataactgctgagtctgtgcctctctgtcacctttcctaacacagggccacagtgtgggaggtttgaggtctgattcagggacacac

SEQ ID NO: 36200 - DNA, 459 bp, Homo sapiens
gaagatgacatgggatggataaggtgggaaaaactggagcacttaaaaaaaagggggaaatcatttccagagggccaacatgagcaaagacacagctggggcatagagaggttatgctgccagacctttgaaggagggtggctggagataagagtagaaagggagggctggaaagctgggtgcagtggttcatgcctgtaatcccagcactttgggaggccgaggtgggcagatcatgaggtcaggagatcaagaccatcttggccaacatggtgaaaccccatctctactaaaaatacaaaaattagctgggtgtggtggcgtgcacctgtagtcccaggtacttgggaggctgaggcagaattgcttgaacccaggaggtggaggctgtagtgagctgagatggtgccactgcactccagcctgggcaacagagcaagattccatctcaaaaaaaaa

SEQ ID NO: 36201 - DNA, 750 bp, Homo sapiens
aaaagaagcaaaaaacaaacggaaatattccttaacaactacaggaaaacttcaaaatgttgcaagaaaataaccatcaatctcaaatttttacccaccaatactgctttaagaaaataatgcaaaataataccattttcagacaaataaggcctgagagactttcactaaaggaacctgtagataatttacttctgaaagacaaaggaagaagtgtgagaaaagtatgctttattaaaggtgctaagttttctacaataatattctttcaactttttgtaagaaaaaaaaaggtctaaattatggggagttagaattaatgcaactggtactaatcaggcttttttccaaacaattctgtctatgccttgctggttcacagatggcattatcatttatagcacatgacagccaatcaattagtaacttgaaattactaataatttcattattggtatggtgttgagtgtgtgaaaccaaagtacacagcagttcatgaaattttactaaaaataataaaatcactatattcaaaagtacacagcataaaaatgcaaataaatacatttagaagttgtttgatttttaattttgatgttcagtatcttagcgagatatttactaaagtaataatgcttcactcaaggttataatgttgacaatatttcttccttcaaaaaatttgttctaatttccaggaaagagaaagagaaaagattacagaagctgtgttttttctagaaaaaaaaa

SEQ ID NO: 36202 - DNA, 440 bp, Homo sapiens
cctccccttgcctatcaagctagcagatagaaccagtgagctggtagcttcatcaacatctggcatctggtgttcacctttgagtccaaggtggtgattccagtcttcaccatttcaaagctagcaggaaaggagaaagaggacaaggagggcgagtagcttccttttgcagaacccagctgcacacgtcacctttactcacagccattttcaagaatatagtcgcacagccacacgcctcggggcatctgggaaatgcagtcactgccacagcaatcgagagtcctgttcacacttagcaagaaaagggtattattctgtttctaaaaggaaaaaggggaaaatgaaggaaggaacacttactaatctctgccagtagccttgggcaaatcgctcttttcaagtctatttataaaatataagctagtaaaatatttaca

SEQ ID NO: 36203 - DNA, 220 bp, Homo sapiens
tttatatttacagttacgggttcacaggcttaaagctggagagggtcttgaagatattctaacccagtcacctcatcgtttagaaaacagtagccaacactgtacattcattgcttttaggtctcctcatgacttgctaagttccataagggcggggactttatttgccgtgtttactgttagtgcctccaaatgaattcaggtttacaagcaaataaat

SEQ ID NO: 36204 - DNA, 455 bp, Homo sapiens
atttcagagttcccagagcacgttcacacacatcgtctaatttatctaattagatcctgtcaacctttttttatggatgaggatatataggttcagagcagtcaagcagcctgttcacaagtttttagtgacagttcagtcattaaactgaactaacctacagttcagtgcttttcaatgaatttttacctcttgtagtgaaattcttacttactaaaactgttgcctattttctaggtccccacttgcttttttttttccatatggtgctaatttgactttgttctgcagccgttgtctgtcagttggcccttgacaacagcataagcaaaagctaaatgccatagttcacagctcttagaaactttgaaaacctttgagtagtgaaaagatggctaagtgtcaccatcttgtagaacttcctcacataactgaaaggtaatgttcctaacaaa

SEQ ID NO: 36205 - DNA, 627 bp, Homo sapiens
tccaggtaattctgcaagtgtgtcatcctgtttctgcatattgccttgcacacctttgatactgaattcttttgtggaattcaaagagtcaggtacaggttttccagtaatagcattttcttgctggagagatgcttctgcccaatcacctgttgatttagtgatgggagtgctcccatcaatagaacatacaggagttttctgatgagtgctagttttaagatttacaactggaatttctgaattatattcactcatgtcaagtcctgtagtttttgtgatgcagtcagaagatttatcggtctgttgtttcacttggggaaccagatcccaagtcagtatttcgttagtaaagttatgcatatcattcacgcatctggacacctcttccagtgctgcatttgtgtgtgaaaactgcctactgagcaatgcagacattgggtaacgtcctgcctctttatttctcagtggaaaaagcttgtcattagtctctgaaatgtcttcggatgattctttatcagtgtgcacagaccagctaccaaaatcatctgtgctctccttatatgagtctttaaattctttgtcaaatgctgctttgtcaataattacttcaaatggtgattcagg

SEQ ID NO: 36206 - DNA, 317 bp, Homo sapiens
acaagaacttgacatgtagcattaaattcaaatatagcacaaaattggacgggtgcagtggttcacgcctgtaatcccagcatttcgggaggccaaggtgggcagaccacttgaggccaggagtctgagaccagcctggtcaatatgtcgaaaccctatctctactaaaaaaatataaaaattagccgggcgtggcggtggacacctgtaatcccagctacttgggcggctgaggcacgagaatcgcttggacctgggaagtagaagctgcagtgatccgagagcgtgccaccactcttcagcccgggcgacagagt

SEQ ID NO: 36207 - DNA, 414 bp, Homo sapiens
  misc_feature (1)..(1): n is a, c, g, or t
  misc_feature (40)..(40): n is a, c, g, or t
  misc_feature (61)..(61): n is a, c, g, or t
  misc_feature (78)..(78): n is a, c, g, or t
  misc_feature (253)..(253): n is a, c, g, or t
  misc_feature (294)..(294): n is a, c, g, or t
  misc_feature (312)..(312): n is a, c, g, or t
  misc_feature (379)..(379): n is a, c, g, or t
  misc_feature (407)..(407): n is a, c, g, or t
ntttgactttttctcggctctcctcctacaactctgttcncagctttccaaaattgtttcnctttactccttagatanctgggtttccttaggttctgtgctctccctcttgccttcctaagaccctcagcatgagaccacaaatgtctgtcccctgtccatcaccaactgaggacagtgggatttcaaggacagtatttgatggactgaagatgccgatgcaaaaatcttccagtgtctaggattccacttnggggctgaagggcaatgtgaagagtgactgcaagtcctggnattttctgtggtgtcagnaaacgcccctttattttaaatgattccagacatctgggcagcatagcttggccaccatcactcaggnttgatcctgcagttgagtagaattcagnttggact

SEQ ID NO: 36208 - DNA, 376 bp, Homo sapiens
tttttttttttttttgagacggagtctcgctgtcacccaggctgtagtacagtggcacgatctcattcactgcactccagcctgtaacttccagatctcactgcactccagcctgtaactccagctcactgtaacttccacctcctgggttcaagcaattctcctgcctcagcctcgcaagtagctgagaccacaggctgccgccctgcctggctaattttttgtattttagtagagacggggtttcaccatgttgcccaggctggtcttgaactcctgagctcaggcaatccgcctacctcagcctcctaaagtgctaggattacaggcatgagccactgtgcctggccaatcattttttataaacttttttctt

SEQ ID NO: 36209 - DNA, 728 bp, Homo sapiens
attgttttgtactcttaaaatgtgtacattttattatatgtaaactataattcaataaaattgataaaaacaactagaaagaatccaaatgttcaacaacagtacgatgaataagtgtggtatagttatacattgaaatagtccataacaatgaaaaacagtgtcacttctgctacacacaacacaggctttcacagacataagggtgaatgaaggaaatcttacacagagtacgtaacatagcactctgtttacgtgaagtccaagaaaaggcaagactgatctatggctagaggtccacagcggggtggaatctgtggtagaactgactgggagggcacaagggggtcctctgggtcttagcattgctttctagcccccgtctgggtggcggttacatgagtgtgtgatatgcaaaaattcttcctgctgtatacttgagattcgcacaccgtttggtacataagttatacctcaataagaaagttaaaaaaaaaaaaaaaaaaaaacctcgtgcccaattcttggtcttgagggcaaattccctatgcgagttgtttaaattcggaaccatgtcatacttgttcctgggggaaaaagtaatcccttacaattccccaacactttccgacccggaggcctaaagggaaaagccggggtggcctaggggggagctacctcccttaaatggggtgggcttaatggccgctttccagcgggaaacgggg

SEQ ID NO: 36210 - DNA, 494 bp, Homo sapiens
ggcggacaacatcacatgccaaaaagagcagtcaccgggcgattgtgagtaagctcttagcctgaggctcagtgcacggtgggcgttcaggaagtggtggccactgtcagggttgtgaccaggtggttctctgctcagagcatctgctctctgtcctggcaggtctgcatgtcatgtgctgtgggctgtgcaccatgacacataccttccgtgtgccaggctcagaagcaccatgttcagcaagtcccttccctgcccttgagagcctgctgggagcagggaagccacactcaaccacaccctctcgctgagctttactgctggaagagtggagagcccggggcctccatgtgccttgctaaggagtgtgggctgctcccggagccacaggagccatgggaatccgcacaggagccacggagcggcccacacctcccaaccagctttggatcagggcaagggagcctcccctggtcacctcaggtggtacagtc

SEQ ID NO: 36211 - DNA, 2219 bp, Homo sapiens
  misc_feature (664)..(664): n is a, c, g, or t
  misc_feature (1685)..(1685): n is a, c, g, or t
  misc_feature (1721)..(1721): n is a, c, g, or t
gttttgtatgtgcctaccactttatattcattgtatattcaccccgtatttatgtattccttgcatctgccctgagaggcagagtcatggatggaaaaccaaggcctggcttaagaccctgcccaggtatagctggtaacgtgagagtcattctcaagactgcctgcctccagtgcccataccctttccgccacaccacaccttggggcttgctgttgtagcctgtgtggtcactaggcatgtctgggctaaggacgggcaagtcccacaagtggctgtttcgtgtctcctgcagtctcctggctgatacttctctgtataagctggtgattcttgggctctttcctcatctccaaaaccgttgttgggatggctgggtggatggatgggtgggtaggtagatggaattcccaaagtaacacaaggggcattgggccatttgaggaagctgcagacagagcactggccaccaccaaagccactggagcttgggagtcaggcggccctggggggtccttgctgttgctgcgtctcccacaccttaatcagagcatcgccaatgcaataaagttaatggagccagtcatcctatgaaggagccaattccgtgcaaagatgatacatctttgaagttgatgaggcctattaattgagcttatgcccnttaaaatgaattagattcttgaaatctaccacacagcagtacatccatttagtgtttctgtcaccgaggaatgaggagccaccagcacagagctataggaactgtcttcctgctgacatctagcatggcctacggctccttgggagctccacagatgtcatgcctggccagccattcttgttcttagcaaattccccaaatcggcataaatagctccaggaagaaagtgataccgatgatccatgggcctctggaagcgcatccagccagccctcagccattagcccctacctcaggatcagttagcagagatgcacaagaatacagctagactgccagcacttcaaaaatggccactgcacaggtggaactggtgcagggtggtccccgggctccagtagggtaagcagacatggtttccaggaggtgtgtagacctggaactgactgagcagagtgagtgcagtcagtgagctcagtcagtgactgagcagatctgactgcagcctgaacgggaatcatcacgcggcatcccctggacccccaaagatgcaccgaagctctgctcagtctcagactcctcccagttaccaccactcgcagttgcttaagagcacaaagtggcacttgttttgcccacagaacatctgctgaagacaaaacttgtgtttatagctcttcacttcaaaagactggccgtgttataaaaagaaagggaccatctgtccctcttctggaccccagcgcctcttggaagagatttctgtgcaagaaggcagtgagaagtcagcgtcgacttcagggaactattttggggccggaaaagaatagtgcctacccgccaaggggaccgtcgccggcagatgaaagccagctttgaggaggccatgcgatgggagatgctggcccggaggaggtgggctgtgcgccaatgatgctgcccagatattccagcagagcagagaccccagagcagagaaccaactggcaggaccgagggatgtgagggaaggcgaaggggnagggctgtgaggcactgcagctcccaggagcaggcntgagaaatgtcagcaacagcttgctgccacgcagagtcagatatcatgtttgcatcacccatgtgcgttccttcacccgacttctggggccattcttatctgcaaggccccttagggcagttctgcctcttgggaacaccttaggctgagtgatcgccttcccgtggctgagagctgagaagttcttccagactgcacaggtgtccggtctgtctgtgatgcccgcttaagactcatctgccttaagcccctgggcaccaatatagaaaagtcatgtgagtccaggagaagctgggcggaggtgaggtggagccaggattagcacggggtggggcctgcagaggggaggaatttcccaggcttcctggccggcatctcccaggctgagcatcttccagactgaaactccctaagaagggcttggccctccccgcctgcacggtgtttcatcggtttggaacagtcctgtttccttcccctcccctcgtccccaacagg

SEQ ID NO: 36212 - DNA, 412 bp, Homo sapiens
ggtcgacctggctggatggcactcacaggtgcagccagtgcaggctctcagagtcctgcagagaggctcctgcaagcagccacagtcatggccttggtggggctcagtgccaatgaggcttcagatacttgactgcgcaaccctcaccttgaagcaagaatacacactcctggctggcactgactgcttctgctggaccccgccaggaagggcgacaccattgcccgtggcagtgctatacataagaaagatcttgctatcagacctcctcggctaccaagaaagctccatgggaaggaacgccattccccgccctgggaatcttggaaggtgcactcgctggcctgacctcggtaccccaaggtgtccaaacccagcatttcaaagactcaggactgaatggacatgacag

SEQ ID NO: 36213 - DNA, 402 bp, Homo sapiens
actgctctccagcctgggcaacagagtaagactccatctcaaaaaataaaataaaataaaataaagaaaagagaagtcttctgtaaccattatataattattaatttttcagattggtttggcagattatcattagtttgacagattagtggcagattattttctgccactaactacaaaatttgaaaaaattaagtcagaaaatcatgccctaggttctgaaagacattaacacgggatatttctgagttgactgtttatgattgttgatctggaaatcaacttcttaaaacactgagacttgaaatacaaaggctatgagcattctgtgacacttgtgtagtaaaatttgctacatattgaaaatttattcttcataataaatagttttcagaagcttct

SEQ ID NO: 36214 - DNA, 431 bp, Homo sapiens
tgctttatcttcaaattcactgattttcttctgcctgctcaagtctgcggttaaacttctctagtgaatttttcatttcagtttttgtacttttcctaaaatttctggcttcaaataggaagcagggaggggctctgtgcctttaaattttccagttgatgccactagtggaagccattgcatcccaaggaatgtctaaaccaagacaggcatctgctgggacccaccagatcaaagggcacaaccccaaatttttggaggacaaggtcccactgcctaccctggccagctagctactccaggaatgtgagctgctatccccatagcttcaggggagctgaagagagggggatagtagctgggtcacacacacagttcccttagcaaagatcagcagcctctccctttaccaatcagtctcccgattgtta

SEQ ID NO: 36215 - DNA, 634 bp, Homo sapiens
gcatcgcttctcggccttttggctaagatcaagtgtagtatctgttcttatcagtttaatatctgatacgtcctctatccgaggacaatatattaaatggatttttggagcagggagatggaataggagcttgctccgtccactccacgcatcgacctggtattgcagtacctccaggaacggtgcaccccctccggggatacaacgtgtttcctaaaagtagagggaggtgagagacggtagcacctgcggggcggcttgcacgccgagtgcctgtgacgcgccggcttgacttaactgcttccctgaagtaccgtgaggttcctgatgtgcgggcggtagacggtaggcttatgcggcacgctttcgtttccaccgtggctactgcgctttgggaaggccacgacctcctcctttggggaggtccttaggatctcagcttggcagtcgagtgggtggcgaccttttaaaggaatgggacccacccggagttcttctttctcctgtctctctctctctctctctctctctctctctctctctctctgtctgtctctcgtctctctgtgtctgtctctgtctctctgtctctctctctgtctctctctctctctctctgtctctcactctctct

SEQ ID NO: 36216 - DNA, 698 bp, Homo sapiens
ttgggccaacgaaccgtgttgggccaacgcaccgtgttgggccaacgcaccgggttgggccaacgcaccgtgttgggccaacgcaccgtgttgggccaacgcaccgtgttgggccaacgcaccgtgttgggccaacgcaccgtcgaggacaatatattaaatggatttttggagcagggagatggaataggagcttgctccgtccactccacgcatcgacctggtattgcagtacctccaggaacggtgcaccccctccggggatacaacgtgtttcctaaaagtagagggaggtgagagacggtagcacctgcggggcggcttgcacgccgagtgcctgtgacgcgccggcttgacttaactgcttccctgaagtaccgtgaggttcctgatgtgcgggcggtagacggtaggcttatgcggcacgctttcgtttccaccgtggctactgcgctttgggaaggccacgacctcctcctttggggaggtccttaggatctcagcttggcagtcgagtgggtggcgaccttttaaaggaatgggacccacccggagttcttctttctcctgtctctctctctctctctctctctctctctctctctctctctgtctgtctctcgtctctctgtgtctgtctctgtctctctgtctctctctctgtctctctctctctctctctgtctctcactctctct

SEQ ID NO: 36217 - DNA, 178 bp, Homo sapiens
gcatcgcttctcggccttttggctaagatcaagtgtagtatctgttcttatcagtttaatatctgatacgtcctctatccgaggacaatatattaaatggatttttggagcagggagatggaataggagcttgctccgtccactccacgcaccgttcccgacgcggcccggtcgcgac

SEQ ID NO: 36218 - DNA, 1138 bp, Homo sapiens
ggaaatgatatatcagtataggatgagtttagacaggacaaacgaaattcaatttagattattttatagttcttatatttttgaaaatattatcccctcaattttctttcttcttttgtaaaataacgtgtttttgaaataatgaataactcccttttggattttaagggtctgctttttctgatgtatgtacggtcagcctatttatttgttccgtcccctttgcagtttggcagaaccttatgaagaagcttcccaaactgaaccacagtgctttcactctattagcaaattgtactaaagatgccagcgtaatgatgagtgccaaggttatagacatcctgcattttttaaatgttgctaaaatgagataaaagccttatgcagaagcaaccgcaggcaccccgcaggtaatgctatcgatttccctaataagtgggaaacgcttggggaaccttagatttgctgttggttctgttgaaatggtggaagtgatgtgaaaagtgttgctagacaacttcattattttccatagacctatctcttatttatttatttccctttaaaataggacagaggtttgctaaacagtttggccattgtagttttaacctaatattttaccttatggaaataatggagtaatttgtgtttttatgttcatattaatttttttaagtactgttaaagaatgaatagttatttttgagcacatatttgttcaactactgagtctccagagtaacacagggcactaaaatgcttttgagaaagaagtgttttattggtctgaatttacctgtttatattaattatatgtacggggaaatgtcttcttcaccagtcacagtggcttaaatgtacccacttatttcatgtgttttcatgctgttgcctagagaatagttttatattttctcaaatgttaataaagatattttgaagaagctgctactctttttatccccatatctcactgtaaagacaaacacttcatttgtttttaattattttcagccaattatttctttttgtctttcaaggtgatagttatttcctttgtttgaactggagatcctgggattcctttaaaaaaattactaataaggaaatgtcatgcaacctttatcatggaatt

SEQ ID NO: 36219 - DNA, 243 bp, Homo sapiens
atcccctttcatcttattttgtattattctaagctcaatgtgaccatgaccctcctgacactgccttcatacggcataatgatagtgttagaaatgctcctgtatttcatttgaataaagtcttcaaaactggagtgatttttagagctcccttagtagcccttacaatcttttttatttgcatattctttttttataatattttttagtcgtatgcattaatattttttaaatgctagaaaa

SEQ ID NO: 36220 - DNA, 440 bp, Homo sapiens
caagccccagggacctgcgatgggagggaggagagggggattggcctcacgagcgtgggcaggggcaagcatttccagcctttggggagtggcgaggctcccattccaggggcccgagaagaaggagaggggtctgcccttggaagttgccacggatgaaagaaccaaagaaaagctcttggagaatcacaatttattattttatttaacacgcccttttatagcactgatggagtctcaggcactctgctaaaccgttttgaaatgtttgttcatgtaatcctcactgcgacactatgtaagcatgattatcctccccgttttacagagcaggagactgaggcacagaagggtttcctgtcatttagtaagatcacgaattggtaagtggcagaactggggctggaagcagtcaggtgggagcgggatggtggtttcct

SEQ ID NO: 36221 - DNA, 164 bp, Homo sapiens
ccacacaagaagtcagcaccatcctcaccctccttccacagacgggaaaactggggctgagaaaagtaaagcatttgctcacgtgacttgaagatgcccgtaaagtcccttcaccatgagaaaactttcatgcaactggaacttcaaatttcctactgcacgta

SEQ ID NO: 36222 - DNA, 735 bp, Homo sapiens
ggctggaacccaacacggtgtctgtggcgagattctggctggagtcgtaagaaagagttctaagaacctttcaacaggttcaggcaaattttctttagagaacaaactaaagcatcgtcctagagtgacacgaagctgacaaatttgcatctcaatcagccggacactgctcaggctttcacaagtctaattcaataaattcaaaaatggcctatctgcttctctgcaattcagccatgcaccaagtttgaaaatgttagactgaagcagaaaccttcaccctaacttcgccaggcactcccagacgagccaaatgcggggatttctggcctgaaagaaaactggtgatgcagactccaagaatcaaggagcagtgtgaccagagagataagctgtgtggaatcagcagccttcccgcccagaacgtgggctcagcatgtttgccagataataagaaaaaccaaaattggaggcaggagcaaaagttcgggataagaagttgatgttcaacccacaatcctgacccttcaccttcactttggtttagtggagttacctgtcaagtctgcccagggcttaaaacaccaactcagcactgcgctggcacaatctctgggactcctcccacttagacagaggaggaagctgaggttgaggcaggaatgaaaggaccagacccaattctgccaaaaccatacaatcaattaaatccgtggacattctattaaaaaaaaa

SEQ ID NO: 36223 - DNA, 532 bp, Homo sapiens
gaataaacaaccacaaggtcaggaaactgggttagtcaaaagaaaccactttcctcatttgaaccagccccctaaaatccaacagcgtgttttactgcaaaccaaaaaagaaatgccaagttttaaaaagaaagtacccctctcttggaatacagaaacgttacctaaacagtaatttgagcctttctttaagaatgaagagtgaggaaataaagatcattcctccatattgaatgtctgattttagacattcaattgtttcttaggagattaaaatcatctaagctctctccttccctcagaagatcagagtaaaactttcctttttccttcaactcttttctttattcagtatacctatgttgagtcattactctgtatgaaaccctggactagtctaatagtgtaaggatgaatgacaccattgtacaacagaggcaataagccacataatcaaggaaggaacagaatgctttgtgaatgctgaggaatgtgcaattaattttgtctgagggggactttacagagcaac

SEQ ID NO: 36224 - DNA, 336 bp, Homo sapiens
tggttgaaaatgaactgttttttgtgcctgctgtgatttgaaataacatttacaggaaatggaaaagcttccatgtgttaccctgtttatgaatttaaatgtcaacccccaacacaatacatgaaattccagatcttcttttctgtatataacctttgttcaagttgccagttttaaaatttcacattagagagaacttgggagatctttatccaaatgtaataaccaaaagaaaaacactgtatcctttgaaatctaaaaggtgcttactttttttcttgctctctctctccctccttccggccctcccaggtttgtagagcacacgtaagggca

SEQ ID NO: 36225 - DNA, 521 bp, Homo sapiens
aacattaaaataaaatgatggttcttgtgtggggcatggataggtacaacaaaggaggcatgaagaccagttaaagggctgttgcattgtttcagcagtaggtgatgtaatgcttggattagcgtgataataagatgtggtttcatcacattttttaagtaattcattgctatgttttttaagtttcataagctcagtattaattttcttaagagtttgtggaggctgggtgcagtggctcacaactataatcccagcactttagaaggctgaggcaggaggatttcttgaggccaggagtttgagaccagcctgggaaacatagtgagaccccccctcccaccatctcaacaaaaaaataaaaagtaaaaattagctatgtgtcgtggtacacggctgtggtcctggctacttgggatgctgaggtgggaggatcacttgaacccaggagtcccaggtaacagtgagctatgattgtatcactgccctccagtctgggtggcagagcaagacccagtctt

SEQ ID NO: 36226 - DNA, 447 bp, Homo sapiens
ccatgtgtgatcctggagtggactctggactggatttttttctttgtctattttatcttattttcactatacaggacattattgggacaattaacaaaatttgaataaagtctgtagatcagaaaataatattttattagtgttcatttcctgttttaataaattatactgtggttattttaagagaatgtcgttgttcttaggaaatacatactgaagtatttaggaataagagggaatcatgtcttcaatctactctcaaatattatataaaagtatcacatgcacacagaagaataaagcaaatgtggcaaaatgttaaccgttgtggaatctggatgaagggaatagagaacaaccgctgtacaaagaactctttgtattattcttgcaactttctgcatgtctgaattatttcaaaataaataaatgtttaaaacgtaaaaa

SEQ ID NO: 36227 - DNA, 218 bp, Homo sapiens
gggctcatagctgatcttatggtgaaaagatgcgttagtgaacattacattcatgacatattttaaaatagtataaaaacaaaaacaacaataaccaaaatacatttgttttctgtcatcaaactgtggttggaccatcaaaccattgatggtcatctaaccccatctcctgttgggtcttttttttttttttttaagacagagtttccctcttgttg

SEQ ID NO: 36228 - DNA, 680 bp, Homo sapiens
aattacggagtttagttaagaatgtatcactactggctccttaactgtggcaaatgtactattctagtataagatgttcatattggggggaaactggctgcagtatttctataaatataaaactgttctaaatgataaagtctttaaatttttgttatatagtatttaatacaagcaaaagaacatttgtaattaatatgtagattaaaaacaagaaaaccccataaactgttccctctactaatgattaaaacattagcaataagtgccattgaagctatcctaatctatcatagccttttcccagccctgactggggattttaacatttcccttctttaaaaaaaaatttttgtaaattgtttatgtggtatgagtaatatgttcatgatatgaggtaagaatccacttccttttctgttatgaatatttcggaaaatatttcaaataaatgaaaagttccaagtccaatagaaaaaatttttttcctaaaccatgttgccacatgatgtcccatcactactgaattgaatatctgtttcctacaaagtattctccacaggtcgggtgcagtggctcacacctgtattcccagcactttgggagttcaagaccaggagaatacctgagtccagaagttaagatcagctggggcgacatagtgagaccccatcgctaca

SEQ ID NO: 36229 - DNA, 3536 bp, Homo sapiens
  misc_feature (833)..(833): n is a, c, g, or t
  misc_feature (2021)..(2021): n is a, c, g, or t
  misc_feature (2091)..(2091): n is a, c, g, or t
  misc_feature (2152)..(2152): n is a, c, g, or t
  misc_feature (2909)..(2909): n is a, c, g, or t
ggcattgatgctgtgtgcgcgtgcgtgtgtgtgtgtgtgtgtgtgtgtgtgtgtgtgtgtgtgtgtgtgtgtctggagtcatggcagggtccctttctgtctgtctccttgctctgccccagactggggggctgcagaggtgagggtatctggcctcaacagctgcttattcccgatgggatggcctgggctgggcccctgaggccaggctgacttggacatggcaagaggggtcccaggctcttgtgggcaaagcaggggaggcgccaatgtggaggaacagagtctcctggctggctgctgctctctggagcgggtggagtcagggaagagctgagctggggagtcaccctgggcctggggtcaccgtaggccccatgtagcaccctggttcccctgcctgtaggtgacaggagccagcccagccaggtgtgctccctccccaggccctaggcaggcgggtacaggggccagcagctgcgcccgccccaccttccttcccacccacatgccgaagggtggccaggcaggcaggtggacgagtccaggcagcggctgagtcagtgtgtgtggaatgttctggccgctcccagctgcaccctgcccctacctgccaccacctcaccttcatcctcaggcgctgcggccctgagcccctgccaggaatgcacctttagcccaggcctgctcagtgagctccgccgacagccagccctgctcctcccgccatgaccctgcagacccctctgggcttccaagttcctgggggctgcagtgaacatgctccacctgcatggctggcaaaccatggtgggccccagctgtggtgcgtnctggggtagaggcaaggaagtgatgggaccgcagagatgagacccccagggatgagatgggacccccaggcagggcccagggtccagggcccaggagagagaagcagggagggagagagcttcctggtggaggacgcatcctacagtgggggcaagggtgctctgaggtccggtgaaggcagggactaggctgcccaggccctgcctgcttggctggggctgggggctgctgggaggtggctgggaggctgggcctgggcagctaagctggagctttggccagggtccagagcctccctcccttcagcttcctgctgcacagaaccctcgcccctggccaccccgtgctgcctccttgccctggcagacccagcactggctgctgctagtcagatggggtagcgggcaggggccggaggggccaccctcccagctgacccagcctcctgggccgcttcttccaaaccagcagggtagaaagatggggcacccaccagtctctcccagtgccccggccccagctggcaccacagctatacctgggcttattccagaccttgtcgccgggaccccctgtgagttgtgggattcccaagaggggtgtggggataacccagccaagtgggggctgcagctgtccacagatgcactcagcctggcctctaccccagggccccgctgggctctcattgccggcgcccttgccgcgggcgtcctcctcgtctcctgcctcctctgtgctgcctgctgctgctgccgccgccacaggaagaagcccagggacaaggagtccgtgggtctgggcagtgcccgcggcaccaccaccacccacctggtgaggagcggctccttgctcactcagtccagagagggcttgaaatccaggctccagagcccagggcagcgaggcgagttcagccccagggatggtttaacccccacagaggcagggcgttgaggaccttcctggcagggaaagtgggtgaacagaggtgagaaggaggccatgcaacaggggctgccccatgggcccgagggagccacagcgggttcttgaggaaggcagggggtaccccagatgccacgttttgggtgggtttggccggtctcacagagcgaagccgacgatttgtgcctgttgggtggcctggcctggaggcggggggtcttgacccatgtcatgcaagngctgcccgggagcccagggctctgatgaggcatgatgtcagcaccacctgccccttgtcccaactcactncaggtgcaacctgatgtggatggcctggagtccagcccgggggatgctcagcaatgggggngcctgcagctctccctggagttcgactttggaagccaggaggtgaagggccccgctgcgcaggaccagcggttctgcgagtttccggaaagggtgacgggggaagggcagaccccatgccctgggtggtggggagctgacagggcaggggcccttggctgagcccaccccgctggctcccagatcagggtgggcctgaggcaggcagccgacctgaggcctgggggcaccgtggacccctatgcccgggtcagcgtctccacccaggccggacacagacatgagacaaaagtgcaccgaggcacgctctgccccgtgtttgacgagacctgctgcttccacgtgagtcagggatggtcggctgggtgggcctggacggctggatgggcctgggctgggtgggcctgggcagctgggtgggcctgggcagctgggtgggcctgagctagggcagcagggcctggctcacgccgctgcctcagatcccgcaggcggagctgccaggggccaccctgcaggtgcagcttttcaacttcaagcgcttctcggggcatgagcccctgggtgagctccgtctgccactgggcaccgtggatctgcagcatgttctggagcactggtacctgctgggcccgccggctgccactcaggtgaggtgctggtcaccaggccacagcccaaggcagagctggcagggaccctgccctatgggccatcggaaagacaggcctgatgggcagcattttcgggggtctganccccaactcggccagaatcaccctcccgggctgaagcccctcttgctgcccacagcccgagcaggtcggggagctgtgcttctctctccggtacgtgcccagctcaggccggctgaccgtggtggtgctggaggctcgaggcctgcgtccaggacttgcagagccctacgtgaaggtccagctcatgctgaaccagaggaagtggaagaagagaaagacagccaccaaaaagggcacggcggccccctacttcaatgaggccttcaccttcctggtgcccttcagccaggtccagaatgtggacctggtgctggctgtctgggaccgcagcctgccgctccgaactgagcccgtaggcaaggtgcacctgggtgcccgggcctcggggcagcccctgcagcactgggcagacatgctggcccacgcccggcggcccattgcccagcggcaccccctgcggccagccagggaggtggaccgcatgctggccctgcagccccgccttcgcctgcgcctgcccttgccccactcctgaatgcaccacatgcctctgtctccccgctgagcccaggcacttgcccaggccgccctgcaggaccactgcaataaacgccttctcctgccact

SEQ ID NO: 36230 - DNA, 3233 bp, Homo sapiens
  misc_feature (833)..(833): n is a, c, g, or t
  misc_feature (2021)..(2021): n is a, c, g, or t
  misc_feature (2091)..(2091): n is a, c, g, or t
  misc_feature (2152)..(2152): n is a, c, g, or t
ggcattgatgctgtgtgcgcgtgcgtgtgtgtgtgtgtgtgtgtgtgtgtgtgtgtgtgtgtgtgtgtgtgtctggagtcatggcagggtccctttctgtctgtctccttgctctgccccagactggggggctgcagaggtgagggtatctggcctcaacagctgcttattcccgatgggatggcctgggctgggcccctgaggccaggctgacttggacatggcaagaggggtcccaggctcttgtgggcaaagcaggggaggcgccaatgtggaggaacagagtctcctggctggctgctgctctctggagcgggtggagtcagggaagagctgagctggggagtcaccctgggcctggggtcaccgtaggccccatgtagcaccctggttcccctgcctgtaggtgacaggagccagcccagccaggtgtgctccctccccaggccctaggcaggcgggtacaggggccagcagctgcgcccgccccaccttccttcccacccacatgccgaagggtggccaggcaggcaggtggacgagtccaggcagcggctgagtcagtgtgtgtggaatgttctggccgctcccagctgcaccctgcccctacctgccaccacctcaccttcatcctcaggcgctgcggccctgagcccctgccaggaatgcacctttagcccaggcctgctcagtgagctccgccgacagccagccctgctcctcccgccatgaccctgcagacccctctgggcttccaagttcctgggggctgcagtgaacatgctccacctgcatggctggcaaaccatggtgggccccagctgtggtgcgtnctggggtagaggcaaggaagtgatgggaccgcagagatgagacccccagggatgagatgggacccccaggcagggcccagggtccagggcccaggagagagaagcagggagggagagagcttcctggtggaggacgcatcctacagtgggggcaagggtgctctgaggtccggtgaaggcagggactaggctgcccaggccctgcctgcttggctggggctgggggctgctgggaggtggctgggaggctgggcctgggcagctaagctggagctttggccagggtccagagcctccctcccttcagcttcctgctgcacagaaccctcgcccctggccaccccgtgctgcctccttgccctggcagacccagcactggctgctgctagtcagatggggtagcgggcaggggccggaggggccaccctcccagctgacccagcctcctgggccgcttcttccaaaccagcagggtagaaagatggggcacccaccagtctctcccagtgccccggccccagctggcaccacagctatacctgggcttattccagaccttgtcgccgggaccccctgtgagttgtgggattcccaagaggggtgtggggataacccagccaagtgggggctgcagctgtccacagatgcactcagcctggcctctaccccagggccccgctgggctctcattgccggcgcccttgccgcgggcgtcctcctcgtctcctgcctcctctgtgctgcctgctgctgctgccgccgccacaggaagaagcccagggacaaggagtccgtgggtctgggcagtgcccgcggcaccaccaccacccacctggtgaggagcggctccttgctcactcagtccagagagggcttgaaatccaggctccagagcccagggcagcgaggcgagttcagccccagggatggtttaacccccacagaggcagggcgttgaggaccttcctggcagggaaagtgggtgaacagaggtgagaaggaggccatgcaacaggggctgccccatgggcccgagggagccacagcgggttcttgaggaaggcagggggtaccccagatgccacgttttgggtgggtttggccggtctcacagagcgaagccgacgatttgtgcctgttgggtggcctggcctggaggcggggggtcttgacccatgtcatgcaagngctgcccgggagcccagggctctgatgaggcatgatgtcagcaccacctgccccttgtcccaactcactncaggtgcaacctgatgtggatggcctggagtccagcccgggggatgctcagcaatgggggngcctgcagctctccctggagttcgactttggaagccaggaggtgaagggccccgctgcgcaggaccagcggttctgcgagtttccggaaagggtgacgggggaagggcagaccccatgccctgggtggtggggagctgacagggcaggggcccttggctgagcccaccccgctggctcccagatcagggtgggcctgaggcaggcagccgacctgaggcctgggggcaccgtggacccctatgcccgggtcagcgtctccacccaggccggacacagacatgagacaaaagtgcaccgaggcacgctctgccccgtgtttgacgagacctgctgcttccacatcccgcaggcggagctgccaggggccaccctgcaggtgcagcttttcaacttcaagcgcttctcggggcatgagcccctgggtgagctccgtctgccactgggcaccgtggatctgcagcatgttctggagcactggtacctgctgggcccgccggctgccactcagcccgagcaggtcggggagctgtgcttctctctccggtacgtgcccagctcaggccggctgaccgtggtggtgctggaggctcgaggcctgcgtccaggacttgcagagccctacgtgaaggtccagctcatgctgaaccagaggaagtggaagaagagaaagacagccaccaaaaagggcacggcggccccctacttcaatgaggccttcaccttcctggtgcccttcagccaggtccagaatgtggacctggtgctggctgtctgggaccgcagcctgccgctccgaactgagcccgtaggcaaggtgcacctgggtgcccgggcctcggggcagcccctgcagcactgggcagacatgctggcccacgcccggcggcccattgcccagcggcaccccctgcggccagccagggaggtggaccgcatgctggccctgcagccccgccttcgcctgcgcctgcccttgccccactcctgaatgcaccacatgcctctgtctccccgctgagcccaggcacttgcccaggccgccctgcaggaccactgcaataaacgccttctcctgccact

SEQ ID NO: 36231 - DNA, 380 bp, Homo sapiens
tgatgaggtgaggatgactctagatgatgtatgtccaatgttcaggacccacatatcatccatttagggtaggtattcaaaagaaatggagctgctcagagttttctatcagagtcggtaaattcgagtttctacagggtcaactggttttcgcagcttcaatttccatgtttcttaggaaacaagataaagtttctcacggtgattccattttttgtaaacaattatttccaaaacaagaataatgaaaacaaataatgtcaggaaattatgatttttgttcttttagcatagagaacatcaccataaacagagaaacaaaaccttggaaaggttctataagagtgctatatgctcccttatagcctgaaatagggata

SEQ ID NO: 36232 - DNA, 290 bp, Homo sapiens
cccactttagggtttgaaccttggctccttttagatctgtcaactactaaactagccattgcttgtgctaacattgtagaacaatgaaattcagttcctgcattctgacaagctttaaggtaattccccaagctttgtgtggatctcacaggagccattgcacacttgcaatctgcatttacattttcataggttagaattatggtaagcatttctgcagcaggggcattagggatctgatgccacactgcctcttgcagccatgtgatatattgtgcataaggctctca

SEQ ID NO: 36233 - DNA, 336 bp, Homo sapiens
tccactttgccaatctgttttttaattggtgtatttagaccattacagttatggcaattattaatatgttatggttttcctgccattttattgttttctctttgtttcttctgtgtcttattcctctgtttctgttttcttccatttctgtgggttacttgaatatttttaggatttcctgttgatttatttatagcaccagtccccaccctttttttggcaccagggaccagttttgtggacaacaatttttccacagacaggggaagggcggatggtttcaggatgaaactgtttcaccttagatcatcaggcattagattatcataaagagca

SEQ ID NO: 36234 - DNA, 472 bp, Homo sapiens
tggggatgggaaggtgggttaatcccagtaggagcaatccaatccaatctgggaaggagggagggaggaacatcgcaagaaccagcccttgttcctgttacaggaacagttacaggtgggtggtggatgtggtgtggggaatatgaggtatcctcgaccaaacctcggtgtcctgagcacaggggagagaagggcgtgccaccaagtgcgttgtagggtccaggccagtccctggggtgcccttgcaggtccgcggttcatcttccattcctgtgagcggccattgcatccctgccttggatcctgagtagatttgctcaggtcatccctgcctggcaatcttcctctgccccaggggaagccaggcctggcgtgggaggttacgggcctgcacaaacctaccagcagggcctccttgggcagcgtggacctggagcttctcttggggccaccagtgtgttggggcagggga

SEQ ID NO: 36235 - DNA, 264 bp, Homo sapiens
gaaataaaaggctgaaatcactaaatcttcaacaacatagaataaagtgtgatgaggcccagcgtggtggttcatgcctgtaatcccagcactttgggaggctgaggagacggatcacttgaggtcaggagttcgaggccagcctgaccataatggtgaagccccgcctccataaaaaacacaaaaattagctaggcatggtggcgggcgcctgtaggcccaactatttgggaggctgagtcaggagaatcgcttgaaccccgc

SEQ ID NO: 36236 - DNA, 652 bp, Homo sapiens
tatccttctctactcagtcttgctgacctaactctgtaggagatttgtgccccaggcagatgataattcaggtcctgactctccaggtcctcaaatgctcatgacagatagttcagttgatggcatagcctccgagaaacagaagggcactctgaatctactttctgtaaaatatcagttcaaaaccatcagctcagggcttgtatatgcaggctgcttgtctggtattctactaaacacctatcttttctgcaaagttgaccagctttgctttgtgggcaaaaggtattcatttcaaagagctaagacacaaattgatgccatctaaagtgaattccttagagaaatccagtagtgatagcagctcccattccaggcatctagggtgatggtaagtagctcaatccacaggaaacactaagcattattaaaaactggtgatcagagacttctttccagagtattatttcagtctgctgttgttccaaaattgtcctgctactaaaatcctcaactgcccctttctttgtcatgaccaatatttaaacacatctgtactgtacaagataaaattgtgcagacaccttgcttaggaaaaaagaccctagaagtaggtgaagtcaagaccgactccctgtctccccctgagact

SEQ ID NO: 36237 - DNA, 605 bp, Homo sapiens
attttagtagagacggggtttcaccatgttgcccaggctggtctcgaactcttgagctcaggcaatccgcccgcctctgcctcccaaagtgctacgactacaggcatgagccaccgcgcctggccaataaatcattctttagtttgtagatgagaaatctaaggttatgagagacttatatttcctcaaatcattccacacagtcactgcagcaaaagatcccaaaatcagatgttctaactctccattcttggatacttgttatgacatcatattgcattccagttttagaattactaagttacgtattttggttcattgaaggactttaatgctacaattctcctgaattaaaacagaaagaaaaaccatgaatcttttagctattttccctcaaaacttcatttcatattttgatttaaatgattcttaagtcttgttaataaatttcagaaagattgatctagaaaattattaaacctgattttgttcttcaatgaataaaatggccttcaagagagctatagtatgatttgcaaactgtactttatgttttgacaaaagaaactttaatattcctgtatttttccactgcaggtgaattt

SEQ ID NO: 36238 - DNA, 630 bp, Homo sapiens
ccacgcgtcgcccacgcgtccgcgtcgggattaggtgaaagtacgtagttgtctttcgtaagttaaaatgataattgggccgaaacttactgccttacctaaaaggcagcgcagtcaggatattggtaggtcgggggcggctttggaaacccttaagtttacaagcatgcgcggacttgagtgctcattaggtcgccgggcgtccacgtgcagccctggaccctgaaccccggcgtgcgtgggccgtgggccctcgggggaaaggttccgtgcactcggggactccggtgaagcctgttcagccgtctgtgtcatgtggccatcttgagtctactctgtcgctcttgtgccctagcaccccgagaaccgtcagtttgagccagatgggaagctgagctgaacacattacgatggatgatggaaacataagactatcaagaaatccaagtggtaatgggcgaagtttattcagcatccggcaatggacttatcgtagttggggaaacgggtgttccgaataatatcctggaagttatcaggacacctattttaaatataggcctgaattttgtaaagtaatatttaaggtggtccgtgataattaaataaaatgcttaattcatgtggcta

SEQ ID NO: 36239 - DNA, 794 bp, Homo sapiens
ccacgcgtcgcccacgcgtccgcgtcgggattaggtgaaagtacgtagttgtctttcgtaagttaaaatgataattgggccgaaacttactgccttacctaaaaggcagcgcagtcaggatattggtaggtcgggggcggctttggaaacccttaagtttacaagcatgcgcggacttgagtgctcattaggtcgccgggcgtccacgtgcagccctggaccctgaaccccggcgtgcgtgggccgtgggccctcgggggaaaggttccgtgcactcggggactccggtgaagcctgttcagccgtctgtgtcatgtggccatcttgagtctactctgtcgctcttgtgccctagcaccccgagaaccgtcagtttgagccagatgggaagctgagctgaacacattacgatggatgatggaaacataagactatcaagaaatccaagtggtaatgggcgaagtttattcagcatccggcaatggacttatcgtagttggggaaacgggtgttccgaataatatcctggaagttatcaggacacctattttaaatataggcctgaattttgtaaagtaatatttaaggtggtccgtgataattaaataaaatgcttaattcatgtggctaaaaaaaaaaaaaaaaaaaaaaaattttcggcgcggcccgcgcccagaaaatttaacaccctgtgggggccggggccagggttacgaccggccacgtgccggacccgccgagaaggtggtcccaaaaagcgggccggtttgaccagggcgggccggcaccaggcg

SEQ ID NO: 36240 - DNA, 508 bp, Homo sapiens
cgtttattacataaacaaaataacattacagaaatgataacccagctagctttaaaaagagaacaccctaagatcaggaattcctattatataacacataactatgctaccccctacctctacccccaaaactagattaatcaaggctccagatgaggctgagacccaagagctggatattaatgtagccactgttagtcaggcaccatgggatgatgaaactccaggaccttcacattcgggaagcgtcgggattaggtgaaaggaagctgagctgaacacattacgatggatgatggaaacataagactatcaagaaatccaagtggtaatgggcgaagtttattcagcatccggcaatggacttatcgtagttggggaaacgggtgttccgaataatatcctggaagttatcaggacacctattttaaatataggcctgaattttgtaaagtaatatttaaggtggtccgtgataattaaataaaatgcttaattcatgtggcta

SEQ ID NO: 36241 - DNA, 298 bp, Homo sapiens
gcggccgctactactactaaattaacaacccgtcgacgtcgggattaggtgaaaggaagctgagctgaacacattacgatggatgatggaaacataagactatcaagaaatccaagtggtaatgggcgaagtttattcagcatccggcaatggacttatcgtagttggggaaacgggtgttccgaataatatcctggaagttatcaggacacctattttaaatataggcctgaattttgtaaagtaatatttaaggtggtccgtgataattaaataaaatgcttaattcatgtggcta

SEQ ID NO: 36242 - DNA, 641 bp, Homo sapiens
tgccgaaggcctcggcctttcacattcgggaagcgtcgggattaggtgaaagtacgtagttgtctttcgtaagttaaaatgataattgggccgaaacttactgccttacctaaaaggcagcgcagtcaggatattggtaggtcgggggcggctttggaaacccttaagtttacaagcatgcgcggacttgagtgctcattaggtcgccgggcgtccacgtgcagccctggaccctgaaccccggcgtgcgtgggccgtgggccctcgggggaaaggttccgtgcactcggggactccggtgaagcctgttcagccgtctgtgtcatgtggccatcttgagtctactctgtcgctcttgtgccctagcaccccgagaaccgtcagtttgagccagatgggaagctgagctgaacacattacgatggatgatggaaacataagactatcaagaaatccaagtggtaatgggcgaagtttattcagcatccggcaatggacttatcgtagttggggaaacgggtgttccgaataatatcctggaagttatcaggacacctattttaaatataggcctgaattttgtaaagtaatatttaaggtggtccgtgataattaaataaaatgcttaattcatgtggcta

SEQ ID NO: 36243 - DNA, 663 bp, Homo sapiens
ccacgcgtcgcccacgcgtccgcgtcgggattaggtgaaagtacgtagttgtctttcgtaagttaaaatgataattgggccgaaacttactgccttacctaaaaggcagcgcagtcaggatattggtaggtcgggggcggctttggaaacccttaagtttacaagcatgcgcggacttgagtgctcattaggtcgccgggcgtccacgtgcagccctggaccctgaaccccggcgtgcgtgggccgtgggccctcgggggaaaggttccgtgcactcggggactccggtgaagcctgttcagccgtctgtgtcatgtggccatcttgagtctactctgtcgctcttgtgccctagcaccccgagaaccgtcagtttgagccagatgggaagctgagctgaacacattacgatggatgatggaaacataagactatcaagaaatccaagtggtaatgggcgaagtttattcagcatccggcaatggacttatcgtagttggggaaacgggtgttccgaataatatcctggaagttatcaggacacctattttaaatataggcctgaattttgtaaagtaatatttaaggtggtccgtgataattaaataaaatgcttaattcatgtggctaaaaaacaataatagctttaaagaaaaaactcta

SEQ ID NO: 36244 - DNA, 892 bp, Homo sapiens
tgccgaaggcctcggcctttcacattcgggaagcgtcgggattaggtgaaagtacgtagttgtctttcgtaagttaaaatgataattgggccgaaacttactgccttacctaaaaggcagcgcagtcaggatattggtaggtcgggggcggctttggaaacccttaagtttacaagcatgcgcggacttgagtgctcattaggtcgccgggcgtccacgtgcagccctggaccctgaaccccggcgtgcgtgggccgtgggccctcgggggaaaggttccgtgcactcggggactccggtgaagcctgttcagccgtctgtgtcatgtggccatcttgagtctactctgtcgctcttgtgccctagcaccccgagaaccgtcagtttgagccagatggtgagtaataacctgtagcagtttggttgctggttaattctggattgtgaatctccatgtatctttgggacctgtcagccgtggcagtctcccttcctagccatggaagagcatatccttgtttattggcaaagctgtcaccatttaattggtatcagattctgacttgcacaagtaacattcactgttaaaaacctagagggtgccgggttattgggcaaaatttctaaaccgttgttcaatgtttctagggaagctgagctgaacacattacgatggatgatggaaacataagactatcaagaaatccaagtggtaatgggcgaagtttattcagcatccggcaatggacttatcgtagttggggaaacgggtgttccgaataatatcctggaagttatcaggacacctattttaaatataggcctgaattttgtaaagtaatatttaaggtggtccgtgataattaaataaaatgcttaattcatgtggcta

SEQ ID NO: 36245 - DNA, 1084 bp, Homo sapiens
tgccgaaggcctcggcctttcacattcgggaagcgtcgggattaggtgaaagtacgtagttgtctttcgtaagttaaaatgataattgggccgaaacttactgccttacctaaaaggcagcgcagtcaggatattggtaggtcgggggcggctttggaaacccttaagtttacaagcatgcgcggacttgagtgctcattaggtcgccgggcgtccacgtgcagccctggaccctgaaccccggcgtgcgtgggccgtgggccctcgggggaaaggttccgtgcactcggggactccggtgaagcctgttcagccgtctgtgtcatgtggccatcttgagtctactctgtcgctcttgtgccctagcaccccgagaaccgtcagtttgagccagatggtgagtaataacctgtagcagtttggttgctggttaattctggattgtgaatctccatgtatctttgggacctgtcagccgtggcagtctcccttcctagccatggaagagcatatccttgtttattggcaaagctgtcaccatttaattggtatcagattctgacttgcacaagtaacattcactgttaaaaacctagagggtgccgggttattgggcaaaatttctaaaccgttgttcaatgtttctagggaagctgagctgaacacattacgatggatgatggaaacataaggtacattccttttttgatatttctgagttaatctgaaacgccttagcggcaggacgttggaaagctaaagttggcccgttttgctggcttttgtagtttgagttaacaaccaactgaattagctgataagatctcaaaacagtgaggtaagtacacagctcggagttttataatgctttttttctcttgcagactatcaagaaatccaagtggtaatgggcgaagtttattcagcatccggcaatggacttatcgtagttggggaaacgggtgttccgaataatatcctggaagttatcaggacacctattttaaatataggcctgaattttgtaaagtaatatttaaggtggtccgtgataattaaataaaatgcttaattcatgtggcta

SEQ ID NO: 36246 - DNA, 586 bp, Homo sapiens
ccacgcgtcgcccacgcgtccgcgtcgggattaggtgaaagtacgtagttgtctttcgtaagttaaaatgataattgggccgaaacttactgccttacctaaaaggcagcgcagtcaggatattggtaggtcgggggcggctttggaaacccttaagtttacaagcatgcgcggacttgagtgctcattaggtcgccgggcgtccacgtgcagccctggaccctgaaccccggcgtgcgtgggccgtgggccctcgggggaaaggttccgtgcactcggggactccggtgaagcctgttcagccgtctgtgtcatgtggccatcttgagtctactctgtcgctcttgtgccctagcaccccgagaaccgtcagtttgagccagatgactatcaagaaatccaagtggtaatgggcgaagtttattcagcatccggcaatggacttatcgtagttggggaaacgggtgttccgaataatatcctggaagttatcaggacacctattttaaatataggcctgaattttgtaaagtaatatttaaggtggtccgtgataattaaataaaatgcttaattcatgtggcta

SEQ ID NO: 36247 - DNA, 822 bp, Homo sapiens
atttatcctggattagagacatttgagaaatcatgaaattatagaattgaagtctttggagagctgagccttggccacacattgcaaccatctggagggatttcagaaatacggtgcccaggcccatcctggaaacgctgagtgaattgatctggagcgggatctgaccaatagccagtcattcctcacgaggtctgagtaaatcaagacaactccttaaactgaggcatgcaatgtcctgatcaggtggtagaagtgccttttcacagagacgtgcaatgctatgtcatgggactttcttttctccgaaatctgtagatcacagcgggcgatgggcgtggctgcccagtgcagaagtaggagacggtcatgtgcccttccactgctgtctgccatagtctcacagagctggcattttctaatacaaactgtcttaggcttttaatccacactaaatcttggcaatcactgcctctgtcaaagaaaagtacttgcttgagacactgttaagagtctcgtcttacagcctgtgtgcacgttgaggcatctgtgcaggtgccatgcacaggaggtgctcagcgggaagttggagcacctgggttctcatctgcctctgctcctggctgctccttgactttgcacgaatgaacggaacatctctgcatctgcaccagggtcgggaagtaaaagcaccaaactagatgtctctgagatcaccctcatctctgaaatcatgtggcctaactaaatgattatgtatcaacagaaatcaacattggaatttacaaaggatttgattaagagaaatgcaaaaaaaaaaaa

SEQ ID NO: 36248 - DNA, 411 bp, Homo sapiens
tttttttttccaagacagggtcttaccccgtcaacatagctggactgctgtggcgcgatcacagctcattgcagcctcggcctccccccgagctcaggcaatcttctcacctcagccttcagagtagctggaactacaggcatgcaccactgcacctggcttttattttttgtagaaacagggtctcaccatattgccagggctgaacataacttttatatgcactgaaaaaccaaaaaatttgtgtgactcgttttattgagatgacttctttattgtagtgctgcagtctgggaccaagcccgtagtccctgtgaggtatgcctctatttcctaccacaaccagcagtaactttcaagtcaccatttagataatcagaactctaactcatcctgtagatggatgctttg

SEQ ID NO: 36249 - DNA, 271 bp, Homo sapiens
cattggggaaaatgtttagaatgtatggaaaacatgttatggatattatatatctaccataaaccaagaaaagagtctggcagagggaaattctatgttgattaggaaaagtcaccacgatcctggtctttatggctttattttttttctaaacaattgctttattctttttttcagaatataaaagaaaggctaagaaaaagaaaaaccaatcatgtctttcaaagatagcattcttaacatcttggtcctgtgcttttttaaaaaaaaa

SEQ ID NO: 36250 - DNA, 416 bp, Homo sapiens
aaagatgcagtatccccttttggaaacttcctttttccacaaataaaatcccctggttttgtttcctagagaaattctgttccaccaatgattgaccttattacccaaagggtggacaggaagagaaagtggatacatggctgtgcactgtcctccattacatttcatccaatgatgttgaatactgcataggtcagaagtccaaagagcatccaatagtccctccttgagtgaagcttttttattcaccatttaatgccacatgggtttggccatctctcctgggataagggaagtggattgtggtagtaagtcccctggtccttgtcaaactcttctgagcttgtgtagcacacacatactatgcttggaacttgagcttaaccatcagtttctctgcagaagactgcaacctg

SEQ ID NO: 36251 - DNA, 806 bp, Homo sapiens
ttgacacagactttatacttttcacaaaaactacctcagagtgaattgtagcctttaatgttaagcacaaaaatgtaaaactcctagaagataataaaggagaaaatctggtgaccttaggtttggtgataactttttagacaaaacaccaaaagcatactccatgaaagaaagacgttgttaagttggacttcgttaaaataaaatatgtacgttttgtgaaagttactgtttagggactaaagagataagtcacagactgggagaaaatctttggaaaatacatacctgaaaaagaactggcatccaaaaatattcagagaacccttataactcaataataaatgaacaacacaattaaatggacaaaaaaatctgaacctccttggagaagatatacagatggcaagcaagcatttcaaaagatgtttccacatatcattagagaacatgcaaatttaaaccacagtgagatactatacacctattagagtgatgaaaattccagacactgacaataccacatgctggtgagtatgtggagtaatgggaattctcattcattgctggtgggaatgcaaaataataaccttcaaaagacacttgggcagtttctttaaaagctaaacatattcttaccatatgatccagcagtcatgttccttggtgtttatccaaatgaactgaaaactttaagtccacataaaaatctgccgatacatgtttgtagcaactttatttgtaattgcccaaacttggaagcaaccaagatgtccttcagtaggttaatggataaacaaactgtg

SEQ ID NO: 36252 - DNA, 261 bp, Homo sapiens
cctcctcctcttccacttgttttccctctacaattctcttcacttctttccctctttctcccccagttcttcttctgtttccaattcctcttcttctcaaagttctttgaatgttctcacttcttctaattctcctccatttccttccaattctcctaattcttctccttctcctccttcttcttcttccttctctccctttaagcctcagcttccatgtatagtttactcatttgctagtttagaaatggaatctgctat

SEQ ID NO: 36253 - DNA, 338 bp, Homo sapiens
gggcaaaaagcacgaaactccatctccaaaaaaaaagcctgtagctgacatttagtagatgcttattaaaagtaataagcatctctgggaggctgtctcacagcaggatgatcaggtcagttttctggacaactttatgggttaggtccgaagttcagatagttctctgggtctctggggctgaaagaacagaactgtgtcttgctttaagagtctctatctggccaggtgcagtggctcacgcctgtaatcccagtactttggggggtgggaggatcgcttgagcccagtagtttgagaccagcctaggcaacatgttgagaccctgtctcaaccat

SEQ ID NO: 36254 - DNA, 449 bp, Homo sapiens
atggccaggctggtctcaagctcctgacctcaagtgatccgcccacctcaacctcccaaagtgctgggattacaggcatgagcaacagtgcctggccctatctttttttgtttgttttgttttgtttgtattttagatacctttgacttctaatgtgaaaatactctatatgatctcagagcggtgtatgaactttggaatactttatgacagaacctctagctcataaagcagcccattaacttagcctctagtctatttattgtactaaaatgaagttacataaagctgtatggtttttacaacagattaacatacttaaacagttttgttttgttttgttttgttttgttttgtggcagggtctcactctgttgcccaggctggagtgcagtggcgcgatcacgggtcactgcaacctccacctcccaggctcaaatcatcctccc

SEQ ID NO: 36255 - DNA, 867 bp, Homo sapiens
gtggcagaaatttttaggtatgaggaggattggataagaggaagatatcttttcatcagattgaattggaattagaaacatattttgttgcaaacttctatcaataagtagcacctcggatagaacataaaatatagacaaaatttttaacaagttgataataaactaattttcacttcagtcagtacatatacggagacaatattacatgctaatcagtgcacctagacatttaggatatacaggtcaaatgtattccagctcccgtccttaggtttcatataaggacacaaaatacataatcatattctatattgcactgtcagattaatctccttaagcaatgatttagataatgagaagaatttcactggccacctatcctattaagatattcagactccttgggaaagagtatggtttcgaaaaaagtaggtcaggctttcattataggatagacctgggtggagcccctatatatatcactcagccagcttggtttgctcatatataaaattctagctagtgatacctaattcaatcctaatgctgtaagaaataaatgagataataatctacctggatagcatgtaacctgtatctggtatctaatttctttctcctatctgatgttctgggccttccagaaaatagttcttacctccttttcccttgatgtaaatattttatccccacccaactcctacctggccttctaagcagcatttcttgaatatttcatgtgtagtcctatttctgtctttgttcaaatcagttcaaatcatatctcctacctgaaatgcctcctccttttttccccagctttactgaggtataattgacaaataaaaaaatgtatatatgttt

SEQ ID NO: 36256 - DNA, 318 bp, Homo sapiens
agtgatttatgaagctattatagattcttgtttttctgttcattcaatggaatgcaaaaaccttgaagaaatatgtggtcagatttatttcactgcagctgtttcttaccagaataaaatgtttatccttttgaaacccaaactttaacatgcacacaaatccatcactcattatataatggtaacattaatactgacacaatgtttttaggcaccagatacctgtgtctttacacattcttttgtagtattacctaatgaccctaaaaaaatctctgatgggatggtatataataacagccaaaatgcttatagcag

SEQ ID NO: 36257 - DNA, 893 bp, Homo sapiens
gaaggaatctgaggtcacttgttcaaattccctgatttacagatgaggaaacagaggctcagacagctcaaatgacttctctccaatacccaacattcgacaagtagcagctctgggactagtacccaaagcacctagctctccaatcactgcgcaagccacacaattctgtctgcttgtcagtggcttttctgattcaaaaaaagcttaggaatttccccaggaggcagcacgatgtagtgggaagggctctggatgtctctccaaggcttctggaattcatgcccacctccaccaagaagccactttcctgccagctacaggtgctcacctgaaaagcaagccagaccatattaaccctgggcattgctggtacctgggaagactttctgattcaatgctttccacctcctcctacccctcaccacccccgtggcatgaaatcctgggggctgctttagaaattgttttctttggctgctggtgggggtgctgctggtgggggtttgcacagctggcacactgcaccagtctggtgggggtttgcacagctggcacactgcaccagtctcctgcctgctgccaacaaggccatttcccaagcactggctttggagaagttggggctctgaagtgggaacacaaggctgccttttgcaggccaggtgtaaattctccccctgccactttcagcctagcgtgaaacagatggagtgtgcattcccacttccctttatggtaccctggaatgatggagctgcccagggcatcgccacgttactctctagacagtctctttgtcttcctgcaatggcagcgccgaggttgtatatttctaggtgcaggtatatgattgccatataataaaaatctgaaaacatcccaaaaaaggc

SEQ ID NO: 36258 - DNA, 118 bp, Homo sapiens
cttgaccaggcttttatcatctgtttctaagaccactgtaatagtctccttacttctctgcctctactcttgattcctttatgtaatccattcacttcacaagagccaggaggccttt

SEQ ID NO: 36259 - DNA, 299 bp, Homo sapiens
tgagccgagatcgccactgcactccagcctgggtgacaaagcgagactctgtctcgacaaaaaaaaagggggtacattagttaagaaaaactacaagtgtgtcttttgcttgagggaaaggctaacattagtagaatgatgaaaattattaatggtgttgctgtacagtagcatagtatgcagtcttcaagttgcatttgaaggttatataatagtagggaaatgtccccagtgtaataaatggtgtaaaaaaacaaaagacaatgtatatgtgaaatatgattccaattttatacata

SEQ ID NO: 36260 - DNA, 224 bp, Homo sapiens
tgccctgtaggactgtcatgtaaattagatcatataggaaaagcattttaataaattcctttcctatcttatcttacaattatattgctgggataatggatcatcaaggaccaaagctaagatactagacccctgggtttttgagtgggccagatgacttggacaagttgtttaacctctctgtgttttgttttctttttgttatgtttcttctaatccaaaat

SEQ ID NO: 36261 - DNA, 434 bp, Homo sapiens
aaatgtcaaaagtcacaggtgtcactgttggggtagataggatttgaccatagtggtgtgatctggcctacctcctttatatttctcttaaattgaaaagtagagtgatacagtgtgaatatagtttccaagctatttagtagcagagtagcctcaaggactttctcatgtaattctatgattaaagaaaaaggtcgagggttaagcaaggtcgaggtaagttaaacaatgcatcagaagaagaaatgtcaggaaaaaaagcattgtatttatttctgaatgatgtatttggaaatttaaatgttcagcagaaaaataaaatttgataattaggttctaaagaaactggatatatgaggatgtgtatgtgtgtgtatttacctatgtagtttgggaagataaactgaagtaaaacataacactaaaatgaagct

SEQ ID NO: 36262 - DNA, 662 bp, Homo sapiens
  misc_feature (4)..(4): n is a, c, g, or t
  misc_feature (20)..(20): n is a, c, g, or t
  misc_feature (31)..(31): n is a, c, g, or t
  misc_feature (54)..(54): n is a, c, g, or t
  misc_feature (70)..(70): n is a, c, g, or t
tacncacaaggaacaagtgngtccaccgtgngcgttaaatagtgatcccgggtncagaatcgcagagcangtcgtccccctgccggcttctccgccgccgccgccttccgcaggccgtttccaccgaggaaaaggaatcgtatcgtatgtccgctatccagaacctccactctttcgacccctttgctgatgcaagtaagggtgatgacctgcttcctgctggcactgaggattatatccatataagaattcaacagagaaacggcaggaagacccttactactgtccaagggatcgctgatgattacgataaaaagaaactagtgaaggcgtttaagaaaaagtttgcctgcaatggtactgtaattgagcatccggaatatggagaagtaattcagctacagggtgaccaacgcaagaacatatgccagttcctcgtagagattggactggctaaggacgatcagctgaaggttcatgggttttaagtgcttgtggctcactgaagcttaagtgaggatttccttgcaatgagtagaatttcccttctctcccttgtcacaggtttaaaaacctcacagcttgtataatgtaaccatttggggtccgcttttaacttggactagtgtaactccttcatgcaataaactgaaaagagccat

SEQ ID NO: 36263 - DNA, 1152 bp, Homo sapiens
  misc_feature (80)..(80): n is a, c, g, or t
aggactcagcagcctcccccttgggccccgtcgcttccctactttccgtaccctctgcccgccttctcccgccaccgccnccgccgccttccgcaggccgtttccaccgaggaaaaggaatcgtatcgtatgtccgctatccagaacctccactctttcgaaaaaagtttgcctgcaatggtactgtaattgagcatccggaatatggagaagtaattcagctacagggtgaccaacgcaagaacatatgccagttcctcgtagagattggactggctaaggacgatcagctgaaggttcatgggttttaagtgcttgtggctcactgaagcttaagtgaggatttccttgcaatgagtagaatttcccttctctcccttgtcacaggtttaaaaacctcacagcttgtataatgtaaccatttggggtccgcttttaacttggactagtgtaactccttcatgcaataaactgaaaagagccatgctgtctagtcttgaagtccctcatttaaacagaggtcaagcaataggcgcctggcagtgtcaagcctgaaaccaagcaataccgtcatgtttcagccaagcccagagccctaagattacaaacaactatggccggaacctcctcagctctccctctgcagagttccctaccctaagagaatgttaccacctgaacagtcctcggtgaatctgagaggagaggatggggtaaggcagaagcaccagctgtactactagaagggagcttttggtggtagatcccctggtgtctccaacctgactaggtggacagagctcaaagaggccctcttaccgctagcgaggtgataggacatctggcttgccacaaaggtctgttcgaccagacatatcctagctaagggatgtccaaacatcagaatgtgaggccaaccttctatcagagttaactttgacaagggaccaatctcaaactgatcatcagtatgttgtaagggtgagtgggattaagagaggccatgctggaagacaatggtttgggtgttccctagtttggtttgttggttaactttataatgttggaaataaacaaaaaacaagggggggattaggggagcgtgaaggatgataaaaggcgaggatggtggtcaatatttttattaggggc

SEQ ID NO: 36264 - DNA, 758 bp, Homo sapiens
  misc_feature (50)..(50): n is a, c, g, or t
ggcacgatcggcacgagtggcagcccggactcccccgacatgtgatcggnttcccagggagggcgggaggcccgggcgttccccgagcctggggaagctggccgtcccggactgacctgctcggggagagccagcaaaggacacattcggcctggcccaagccctgacgatttcagtgttgttttctgcacgcgcaaaacacctggggaccgaggggatggcagtggcatcctatctttgacagctctgaacgagcttaaccttttttttcagacccctttgctgatgcaagtaagggtgatgacctgcttcctgctggcactgaggattatatccatataagaattcaacagagaaacggcaggaagacccttactactgtccaagggatcgctgatgattacgataaaaagaaactagtgaaggcgtttaagaaaaagtttgcctgcaatggtactgtaattgagcatccggaatatggagaagtaattcagctacagggtgaccaacgcaagaacatatgccagttcctcgtagagattggactggctaaggacgatcagctgaaggttcatgggttttaagtgcttgtggctcactgaagcttaagtgaggatttccttgcaatgagtagaatttcccttctctcccttgtcacaggtttaaaaacctcacagcttgtataatgtaaccatttggggtccgcttttaacttggactagtgtaactccttcatgcaataaactgaaaagagccat

SEQ ID NO: 36265 - DNA, 433 bp, Homo sapiens
tactactaaattcgcggccgcgtcgacgagaaacggcaggaagacccttactactgtccaagggatcgctgatgattacgataaaaagaaactagtgaaggcgtttaagaaaaagtttgcctgcaatggtactgtaattgagcatccggaatatggagaagtaattcagctacagggtgaccaacgcaagaacatatgccagttcctcgtagagattggactggctaaggacgatcagctgaaggttcatgggttttaagtgcttgtggctcactgaagcttaagtgaggatttccttgcaatgagtagaatttcccttctctcccttgtcacaggtttaaaaacctcacagcttgtataatgtaaccatttggggtccgcttttaacttggactagtgtaactccttcatgcaataaactgaaaagagccat

SEQ ID NO: 36266 - DNA, 1107 bp, Homo sapiens
  misc_feature (50)..(50): n is a, c, g, or t
ggcacgatcggcacgagtggcagcccggactcccccgacatgtgatcggnttcccagggagggcgggaggcccgggcgttccccgagcctggggaagctggccgtcccggactgacctgctcggggagagccagcaaaggacacattcggcctggcccaagccctgacgatttcagtgttgttttctgcacgcgcaaaacacctggggaccgaggggatggcagtggcatcctatctttgacagctctgaacgagcttaaccttttttttcagacccctttgctgatgcaagtaagggtgatgacctgcttcctgctggcactgaggattatatccatataagaattcaacagagaaacggcaggaagacccttactactgtccaagggatcgctgatgattacgataaaaagaaactagtgaaggcgtttaagaaaaagtttgcctgcaatggtactgtaattgagcatccggaatatggagaagtaattcagctacagggtgaccaacgcaagaacatatgccagttcctcgtagagattggactggctaaggacgatcagctgaaggttcatgggttttaagtgcttgtggctcactgaagcttaagtgaggatttccttgcaatgagtagaatttcccttctctcccttgtcacaggtttaaaaacctcacagcttgtataatgtaaccatttggggtccgcttttaacttggactagtgtaactccttcatgcaataaactgaaaagagccatgctgtctagtcttgaagtccctcatttaaacagaggtcaagcaataggcgcctggcagtgtcaagcctgaaaccaagcaataccgtcatgtttcagccaagcccagagccctaagattacaaacaactatggccggaacctcctcagctctccctctgcagagttccctaccctagaaatgtacacatgacagactcgggatcgaacgcaagagggcagcaaacacacggcaccaaagggcctgggtaaacacagggtcacagatgtggaaaacaaagcctacgggagcaatgggccaggtgcccaccacagggacacagagcccacactgggcacgacagaggcccgg

SEQ ID NO: 36267 - DNA, 236 bp, Homo sapiens
cccgggctgccggaattcggcacctggctaaggacgatcagctgaaggttcatgggttttaagtgcttgtggctcactgaagcttaagtgaggatttccttgcaatgagtagaatttcccttctctcccttgtcacaggtttaaaaacctcacagcttgtataatgtaaccatttggggtccgcttttaacttggactagtgtaactccttcatgcaataaactgaaaagagccat

SEQ ID NO: 36268 - DNA, 1323 bp, Homo sapiens
  misc_feature (4)..(4): n is a, c, g, or t
  misc_feature (20)..(20): n is a, c, g, or t
  misc_feature (31)..(31): n is a, c, g, or t
  misc_feature (54)..(54): n is a, c, g, or t
  misc_feature (70)..(70): n is a, c, g, or t
  misc_feature (1291)..(1291): n is a, c, g, or t
  misc_feature (1302)..(1303): n is a, c, g, or t
  misc_feature (1311)..(1311): n is a, c, g, or t
tacncacaaggaacaagtgngtccaccgtgngcgttaaatagtgatcccgggtncagaatcgcagagcangtcgtccccctgccggcttctccgccgccgccgccttccgcaggccgtttccaccgaggaaaaggaatcgtatcgtatgtccgctatccagaacctccactctttcgacccctttgctgatgcaagtaagggtgatgacctgcttcctgctggcactgaggattatatccatataagaattcaacagagaaacggcaggaagacccttactactgtccaagggatcgctgatgattacgataaaaagaaactagtgaaggcgtttaagaaaaagtttgcctgcaatggtactgtaattgagcatccggaatatggagaagtaattcagctacagggtgaccaacgcaagaacatatgccagttcctcgtagagattggactggctaaggacgatcagctgaaggttcatgggttttaagtgcttgtggctcactgaagcttaagtgaggatttccttgcaatgagtagaatttcccttctctcccttgtcacaggtttaaaaacctcacagcttgtataatgtaaccatttggggtccgcttttaacttggactagtgtaactccttcatgcaataaactgaaaagagccatgctgtctagtcttgaagtccctcatttaaacagaggtcaagcaataggcgcctggcagtgtcaagcctgaaaccaagcaataccgtcatgtttcagccaagcccagagccctaagattacaaacaactatggccggaacctcctcagctctccctctgcagagttccctaccctaagagaatgttaccacctgaacagtcctcggtgaatctgagaggagaggatggggtaaggcagaagcaccagctgtactactagaagggagcttttggtggtagatcccctggtgtctccaacctgactaggtggacagagctcaaagaggccctcttaccgctagcgaggtgataggacatctggcttgccacaaaggtctgttcgaccagacatatcctagctaagggatgtccaaacatcagaatgtgaggccaaccttctatcagagttaactttgacaagggaacaaatctcaaactgatccatcagtcatgtagctagctgtagagcttgcaacttaatagcagcagctgcccaatgccatgtgaagtaacaaactggttttaggtttttttttccccttcagttttaatgtcatgtgtaatgtatttaaacccttatttacataaacntgtttcagaannagaaaaancacaccaacaag

SEQ ID NO: 36269 - DNA, 1509 bp, Homo sapiens
  misc_feature (4)..(4): n is a, c, g, or t
  misc_feature (20)..(20): n is a, c, g, or t
  misc_feature (31)..(31): n is a, c, g, or t
  misc_feature (54)..(54): n is a, c, g, or t
  misc_feature (70)..(70): n is a, c, g, or t
tacncacaaggaacaagtgngtccaccgtgngcgttaaatagtgatcccgggtncagaatcgcagagcangtcgtccccctgccggcttctccgccgccgccgccttccgcaggccgtttccaccgaggaaaaggaatcgtatcgtatgtccgctatccagaacctccactctttcgacccctttgctgatgcaagtaagggtgatgacctgcttcctgctggcactgaggattatatccatataagaattcaacagagaaacggcaggaagacccttactactgtccaagggatcgctgatgattacgataaaaagaaactagtgaaggcgtttaagaaaaagtttgcctgcaatggtactgtaattgagcatccggaatatggagaagtaattcagctacagggtgaccaacgcaagaacatatgccagttcctcgtagagattggactggctaaggacgatcagctgaaggttcatgggttttaagtgcttgtggctcactgaagcttaagtgaggatttccttgcaatgagtagaatttcccttctctcccttgtcacaggtttaaaaacctcacagcttgtataatgtaaccatttggggtccgcttttaacttggactagtgtaactccttcatgcaataaactgaaaagagccatgctgtctagtcttgaagtccctcatttaaacagaggtcaagcaataggcgcctggcagtgtcaagcctgaaaccaagcaataccgtcatgtttcagccaagcccagagccctaagattacaaacaactatggccggaacctcctcagctctccctctgcagagttccctaccctaagagaatgttaccacctgaacagtcctcggtgaatctgagaggagaggatggggtaaggcagaagcaccagctgtactactagaagggagcttttggtggtagatcccctggtgtctccaacctgactaggtggacagagctcaaagaggccctcttaccgctagcgaggtgataggacatctggcttgccacaaaggtctgttcgaccagacatatcctagctaagggatgtccaaacatcagaatgtgaggccaaccttctatcagagttaactttgacaagggaacaaatctcaaactgatccatcagtcatgtagctagctgtagagcttgcaacttaatagcagcagctgcccaatgccatgtgaagtaacaactggcttaggataaatatccccttcatttacagttatgtgtaaggatcgaaccgctcattaataaactgtttccgacattacacacaacacaggcgcgcgcaaatatccctccgggccattcagatcgcttttgtaaatcggcccctatgacgcataacggtacgggcgctacacgtgggacacgagtgagctgagaccactcggagaatgacacactaacccaacaaatgatgcacaactctgcatcagatcacatcgataacatctaaaaactgcgacaactaacatatctc

SEQ ID NO: 36270 - DNA, 1329 bp, Homo sapiens
  misc_feature (4)..(4): n is a, c, g, or t
  misc_feature (20)..(20): n is a, c, g, or t
  misc_feature (31)..(31): n is a, c, g, or t
  misc_feature (54)..(54): n is a, c, g, or t
  misc_feature (70)..(70): n is a, c, g, or t
tacncacaaggaacaagtgngtccaccgtgngcgttaaatagtgatcccgggtncagaatcgcagagcangtcgtccccctgccggcttctccgccgccgccgccttccgcaggccgtttccaccgaggaaaaggaatcgtatcgtatgtccgctatccagaacctccactctttcgacccctttgctgatgcaagtaagggtgatgacctgcttcctgctggcactgaggattatatccatataagaattcaacagagaaacggcaggaagacccttactactgtccaagggatcgctgatgattacgataaaaagaaactagtgaaggcgtttaagaaaaagtttgcctgcaatggtactgtaattgagcatccggaatatggagaagtaattcagctacagggtgaccaacgcaagaacatatgccagttcctcgtagagattggactggctaaggacgatcagctgaaggttcatgggttttaagtgcttgtggctcactgaagcttaagtgaggatttccttgcaatgagtagaatttcccttctctcccttgtcacaggtttaaaaacctcacagcttgtataatgtaaccatttggggtccgcttttaacttggactagtgtaactccttcatgcaataaactgaaaagagccatgctgtctagtcttgaagtccctcatttaaacagaggtcaagcaataggcgcctggcagtgtcaagcctgaaaccaagcaataccgtcatgtttcagccaagcccagagccctaagattacaaacaactatggccggaacctcctcagctctccctctgcagagttccctaccctaagagaatgttaccacctgaacagtcctcggtgaatctgagaggagaggatggggtaaggcagaagcaccagctgtactactagaagggagcttttggtggtagatcccctggtgtctccaacctgactaggtggacagagctcaaagaggccctcttaccgctagcgaggtgataggacatctggcttgccacaaaggtctgttcgaccagacatatcctagctaagggatgtccaaacatcagaatgtgaggccaaccttctatcagagttaactttgacaagggaccaatctcaaactgatcatcagtatgttgtaagggtgagtgggattaagagaggccatgctggaagacaatggtttgggtgttccctagtttggtttgttggttaactttataatgttggaaataaacaaaaaacaagggggggattaggggagcgtgaaggatgataaaaggcgaggatggtggtcaatatttttattaggggc

SEQ ID NO: 36271 - DNA, 1043 bp, Homo sapiens
  misc_feature (11)..(11): n is a, c, g, or t
  misc_feature (14)..(14): n is a, c, g, or t
  misc_feature (1011)..(1011): n is a, c, g, or t
  misc_feature (1022)..(1023): n is a, c, g, or t
  misc_feature (1031)..(1031): n is a, c, g, or t
tcagtctgtcnccncgggttttggatatgtcgaccacgcctcgaggcgtataagagacaaaaagtttgcctgcaatggtactgtaattgagcatccggaatatggagaagtaattcagctacagggtgaccaacgcaagaacatatgccagttcctcgtagagattggactggctaaggacgatcagctgaaggttcatgggttttaagtgcttgtggctcactgaagcttaagtgaggatttccttgcaatgagtagaatttcccttctctcccttgtcacaggtttaaaaacctcacagcttgtataatgtaaccatttggggtccgcttttaacttggactagtgtaactccttcatgcaataaactgaaaagagccatgctgtctagtcttgaagtccctcatttaaacagaggtcaagcaataggcgcctggcagtgtcaagcctgaaaccaagcaataccgtcatgtttcagccaagcccagagccctaagattacaaacaactatggccggaacctcctcagctctccctctgcagagttccctaccctaagagaatgttaccacctgaacagtcctcggtgaatctgagaggagaggatggggtaaggcagaagcaccagctgtactactagaagggagcttttggtggtagatcccctggtgtctccaacctgactaggtggacagagctcaaagaggccctcttaccgctagcgaggtgataggacatctggcttgccacaaaggtctgttcgaccagacatatcctagctaagggatgtccaaacatcagaatgtgaggccaaccttctatcagagttaactttgacaagggaacaaatctcaaactgatccatcagtcatgtagctagctgtagagcttgcaacttaatagcagcagctgcccaatgccatgtgaagtaacaaactggttttaggtttttttttccccttcagttttaatgtcatgtgtaatgtatttaaacccttatttacataaacntgtttcagaannagaaaaancacaccaacaag

SEQ ID NO: 36272 - DNA, 1152 bp, Homo sapiens
  misc_feature (86)..(86): n is a, c, g, or t
  misc_feature (1120)..(1120): n is a, c, g, or t
  misc_feature (1131)..(1132): n is a, c, g, or t
  misc_feature (1140)..(1140): n is a, c, g, or t
gactagttctagctcgcgatctagaactagcccacgcgtccgccgacgttccgttcccccctgcccgccttctcccgccaccgccnccgccgccttccgcaggccgtttccaccgaggaaaaggaatcgtatcgtatgtccgctatccagaacctccactctttcgaaaaaagtttgcctgcaatggtactgtaattgagcatccggaatatggagaagtaattcagctacagggtgaccaacgcaagaacatatgccagttcctcgtagagattggactggctaaggacgatcagctgaaggttcatgggttttaagtgcttgtggctcactgaagcttaagtgaggatttccttgcaatgagtagaatttcccttctctcccttgtcacaggtttaaaaacctcacagcttgtataatgtaaccatttggggtccgcttttaacttggactagtgtaactccttcatgcaataaactgaaaagagccatgctgtctagtcttgaagtccctcatttaaacagaggtcaagcaataggcgcctggcagtgtcaagcctgaaaccaagcaataccgtcatgtttcagccaagcccagagccctaagattacaaacaactatggccggaacctcctcagctctccctctgcagagttccctaccctaagagaatgttaccacctgaacagtcctcggtgaatctgagaggagaggatggggtaaggcagaagcaccagctgtactactagaagggagcttttggtggtagatcccctggtgtctccaacctgactaggtggacagagctcaaagaggccctcttaccgctagcgaggtgataggacatctggcttgccacaaaggtctgttcgaccagacatatcctagctaagggatgtccaaacatcagaatgtgaggccaaccttctatcagagttaactttgacaagggaacaaatctcaaactgatccatcagtcatgtagctagctgtagagcttgcaacttaatagcagcagctgcccaatgccatgtgaagtaacaaactggttttaggtttttttttccccttcagttttaatgtcatgtgtaatgtatttaaacccttatttacataaacntgtttcagaannagaaaaancacaccaacaag

SEQ ID NO: 36273 - DNA, 946 bp, Homo sapiens
  misc_feature (914)..(914): n is a, c, g, or t
  misc_feature (925)..(926): n is a, c, g, or t
  misc_feature (934)..(934): n is a, c, g, or t
tactctagaggatctcgggtcggcaaagggtgccaacgcaagaacatatgccagttcctcgtagagattggactggctaaggacgatcagctgaaggttcatgggttttaagtgcttgtggctcactgaagcttaagtgaggatttccttgcaatgagtagaatttcccttctctcccttgtcacaggtttaaaaacctcacagcttgtataatgtaaccatttggggtccgcttttaacttggactagtgtaactccttcatgcaataaactgaaaagagccatgctgtctagtcttgaagtccctcatttaaacagaggtcaagcaataggcgcctggcagtgtcaagcctgaaaccaagcaataccgtcatgtttcagccaagcccagagccctaagattacaaacaactatggccggaacctcctcagctctccctctgcagagttccctaccctaagagaatgttaccacctgaacagtcctcggtgaatctgagaggagaggatggggtaaggcagaagcaccagctgtactactagaagggagcttttggtggtagatcccctggtgtctccaacctgactaggtggacagagctcaaagaggccctcttaccgctagcgaggtgataggacatctggcttgccacaaaggtctgttcgaccagacatatcctagctaagggatgtccaaacatcagaatgtgaggccaaccttctatcagagttaactttgacaagggaacaaatctcaaactgatccatcagtcatgtagctagctgtagagcttgcaacttaatagcagcagctgcccaatgccatgtgaagtaacaaactggttttaggtttttttttccccttcagttttaatgtcatgtgtaatgtatttaaacccttatttacataaacntgtttcagaannagaaaaancacaccaacaag

SEQ ID NO: 36274 - DNA, 940 bp, Homo sapiens
  misc_feature (908)..(908): n is a, c, g, or t
  misc_feature (919)..(920): n is a, c, g, or t
  misc_feature (928)..(928): n is a, c, g, or t
gccattagaaatggaggctttaactctccctgtcccccatttaaaactttgcccttttgtcttttcctggctaaggacgatcagctgaaggttcatgggttttaagtgcttgtggctcactgaagcttaagtgaggatttccttgcaatgagtagaatttcccttctctcccttgtcacaggtttaaaaacctcacagcttgtataatgtaaccatttggggtccgcttttaacttggactagtgtaactccttcatgcaataaactgaaaagagccatgctgtctagtcttgaagtccctcatttaaacagaggtcaagcaataggcgcctggcagtgtcaagcctgaaaccaagcaataccgtcatgtttcagccaagcccagagccctaagattacaaacaactatggccggaacctcctcagctctccctctgcagagttccctaccctaagagaatgttaccacctgaacagtcctcggtgaatctgagaggagaggatggggtaaggcagaagcaccagctgtactactagaagggagcttttggtggtagatcccctggtgtctccaacctgactaggtggacagagctcaaagaggccctcttaccgctagcgaggtgataggacatctggcttgccacaaaggtctgttcgaccagacatatcctagctaagggatgtccaaacatcagaatgtgaggccaaccttctatcagagttaactttgacaagggaacaaatctcaaactgatccatcagtcatgtagctagctgtagagcttgcaacttaatagcagcagctgcccaatgccatgtgaagtaacaaactggttttaggtttttttttccccttcagttttaatgtcatgtgtaatgtatttaaacccttatttacataaacntgtttcagaannagaaaaancacaccaacaag

SEQ ID NO: 36275 - DNA, 870 bp, Homo sapiens
  misc_feature (838)..(838): n is a, c, g, or t
  misc_feature (849)..(850): n is a, c, g, or t
  misc_feature (858)..(858): n is a, c, g, or t
cggtccgtgtgtagacgtggcttgtgggttgaccgtgggttgtggctcactgaagcttaagtgaggatttccttgcaatgagtagaatttcccttctctcccttgtcacaggtttaaaaacctcacagcttgtataatgtaaccatttggggtccgcttttaacttggactagtgtaactccttcatgcaataaactgaaaagagccatgctgtctagtcttgaagtccctcatttaaacagaggtcaagcaataggcgcctggcagtgtcaagcctgaaaccaagcaataccgtcatgtttcagccaagcccagagccctaagattacaaacaactatggccggaacctcctcagctctccctctgcagagttccctaccctaagagaatgttaccacctgaacagtcctcggtgaatctgagaggagaggatggggtaaggcagaagcaccagctgtactactagaagggagcttttggtggtagatcccctggtgtctccaacctgactaggtggacagagctcaaagaggccctcttaccgctagcgaggtgataggacatctggcttgccacaaaggtctgttcgaccagacatatcctagctaagggatgtccaaacatcagaatgtgaggccaaccttctatcagagttaactttgacaagggaacaaatctcaaactgatccatcagtcatgtagctagctgtagagcttgcaacttaatagcagcagctgcccaatgccatgtgaagtaacaaactggttttaggtttttttttccccttcagttttaatgtcatgtgtaatgtatttaaacccttatttacataaacntgtttcagaannagaaaaancacaccaacaag

SEQ ID NO: 36276 - DNA, 977 bp, Homo sapiens
  misc_feature (4)..(4): n is a, c, g, or t
  misc_feature (20)..(20): n is a, c, g, or t
  misc_feature (31)..(31): n is a, c, g, or t
  misc_feature (54)..(54): n is a, c, g, or t
  misc_feature (70)..(70): n is a, c, g, or t
tacncacaaggaacaagtgngtccaccgtgngcgttaaatagtgatcccgggtncagaatcgcagagcangtcgtccccctgccggcttctccgccgccgccgccttccgcaggccgtttccaccgaggaaaaggaatcgtatcgtatgtccgctatccagaacctccactctttcgacccctttgctgatgcaagtaagggtgatgacctgcttcctgctggcactgaggattatatccatataagaattcaacagagaaacggcaggaagacccttactactgtccaagggatcgctgatgattacgataaaaagaaactagtgaaggcgtttaagaaaaagtttgcctgcaatggtactgtaattgagcatccggaatatggagaagtaattcagctacagggtgaccaacgcaagaacatatgccagttcctcgtagagattggactggctaaggacgatcagctgaaggttcatgggttttaagtgcttgtggctcactgaagcttaagtgaggatttccttgcaatgagtagaatttcccttctctcccttgtcacaggtttaaaaacctcacagcttgtataatgtaaccatttggggtccgcttttaacttggactagtgtaactccttcatgcaataaactgaaaagagccatgctgtctagtcttgaagtccctcatttaaacagaggtcaagcaataggcgcctggcagtgtcaagcctgaaaccaagcaatgacaaggtttcagccaagccaagaaccccaagatcacaggaggctatgtctgaccagaggctccttggggctccctggacagagtcccctgccctaggagagtgtcaccactttgaacagaatgggtaacactgccccagctatgtcactagagggagtctctggccctggtatctgaccagggtagaattcagaaaggggctaccttttccagaggaagtcaatgggacattt

SEQ ID NO: 36277 - DNA, 938 bp, Homo sapiens
  misc_feature (4)..(4): n is a, c, g, or t
  misc_feature (20)..(20): n is a, c, g, or t
  misc_feature (31)..(31): n is a, c, g, or t
  misc_feature (54)..(54): n is a, c, g, or t
  misc_feature (70)..(70): n is a, c, g, or t
tacncacaaggaacaagtgngtccaccgtgngcgttaaatagtgatcccgggtncagaatcgcagagcangtcgtccccctgccggcttctccgccgccgccgccttccgcaggccgtttccaccgaggaaaaggaatcgtatcgtatgtccgctatccagaacctccactctttcgacccctttgctgatgcaagtaagggtgatgacctgcttcctgctggcactgaggattatatccatataagaattcaacagagaaacggcaggaagacccttactactgtccaagggatcgctgatgattacgataaaaagaaactagtgaaggcgtttaagaaaaagtttgcctgcaatggtactgtaattgagcatccggaatatggagaagtaattcagctacagggtgaccaacgcaagaacatatgccagttcctcgtagagattggactggctaaggacgatcagctgaaggttcatgggttttaagtgcttgtggctcactgaagcttaagtgaggatttccttgcaatgagtagaatttcccttctctcccttgtcacaggtttaaaaacctcacagcttgtataatgtaaccatttggggtccgcttttaacttggactagtgtaactccttcatgcaataaactgaaaagagccatgctgtctagtcttgaagtccctcatttaaacagaggtcaagcaataggcgccgggcagtggtcaagcctggaaaccaaggcaaaacggcctgggtcaggcaggccagaggctaagattccaacactatggcggaacctctcagtctcctctgcgagatcctaactagagacggtcccccggcccggggaacggagggcggcggggagggaaacccggggacccagggcacgggggacaccgggtgcacaccagggcggagcacccccccgacagcg

SEQ ID NO: 36278 - DNA, 1272 bp, Homo sapiens
  misc_feature (4)..(4): n is a, c, g, or t
  misc_feature (20)..(20): n is a, c, g, or t
  misc_feature (31)..(31): n is a, c, g, or t
  misc_feature (54)..(54): n is a, c, g, or t
  misc_feature (70)..(70): n is a, c, g, or t
  misc_feature (1240)..(1240): n is a, c, g, or t
  misc_feature (1251)..(1252): n is a, c, g, or t
  misc_feature (1260)..(1260): n is a, c, g, or t
tacncacaaggaacaagtgngtccaccgtgngcgttaaatagtgatcccgggtncagaatcgcagagcangtcgtccccctgccggcttctccgccgccgccgccttccgcaggccgtttccaccgaggaaaaggaatcgtatcgtatgtccgctatccagaacctccactctttcgacccctttgctgatgcaagtaagggtgatgacctgcttcctgctggcactgaggattatatccatataagaattcaacagagaaacggcaggaagacccttactactgtccaagggatcgctgatgattacgataaaaagaaactagtgaaggcgtttaagaaaaagtttgcctgcaatggtactgtaattgagcatccggaatatggagaagtaattcagctacagggtgaccaacgcaagaacatatgccagttcctcgtagagattggactggctaaggacgatcagctgaaggttcatgggttttaagtgcttgtggctcactgaagcttaagtgaggatttccttgcaatgagtagaatttcccttctctcccttgtcacaggtttaaaaacctcacagcttgtataatgtaaccatttggggtccgcttttaacttggactagtgtaactccttcatgcaataaactgaaaagagccatctggcagtgtcaagcctgaaaccaagcaataccgtcatgtttcagccaagcccagagccctaagattacaaacaactatggccggaacctcctcagctctccctctgcagagttccctaccctaagagaatgttaccacctgaacagtcctcggtgaatctgagaggagaggatggggtaaggcagaagcaccagctgtactactagaagggagcttttggtggtagatcccctggtgtctccaacctgactaggtggacagagctcaaagaggccctcttaccgctagcgaggtgataggacatctggcttgccacaaaggtctgttcgaccagacatatcctagctaagggatgtccaaacatcagaatgtgaggccaaccttctatcagagttaactttgacaagggaacaaatctcaaactgatccatcagtcatgtagctagctgtagagcttgcaacttaatagcagcagctgcccaatgccatgtgaagtaacaaactggttttaggtttttttttccccttcagttttaatgtcatgtgtaatgtatttaaacccttatttacataaacntgtttcagaannagaaaaancacaccaacaag

SEQ ID NO: 36279 - DNA, 723 bp, Homo sapiens
  misc_feature (4)..(4): n is a, c, g, or t
  misc_feature (20)..(20): n is a, c, g, or t
  misc_feature (31)..(31): n is a, c, g, or t
  misc_feature (54)..(54): n is a, c, g, or t
  misc_feature (70)..(70): n is a, c, g, or t
tacncacaaggaacaagtgngtccaccgtgngcgttaaatagtgatcccgggtncagaatcgcagagcangtcgtccccctgccggcttctccgccgccgccgccttccgcaggccgtttccaccgaggaaaaggaatcgtatcgtatgtccgctatccagaacctccactctttcgacccctttgctgatgcaagtaagggtgatgacctgcttcctgctggcactgaggattatatccatataagaattcaacagagaaacggcaggaagacccttactactgtccaagggatcgctgatgattacgataaaaagaaactagtgaaggcgtttaagaaaaagtttgcctgcaatggtactgtaattgagcatccggaatatggagaagtaattcagctacagggtgaccaacgcaagaacatatgccagttcctcgtagagattggactggctaaggacgatcagctgaaggttcatgggttttaagtgcttgtggctcactgaagcttaagtgaggatttccttgcaatgagtagaatttcccttctctcccttgtcacaggtttaaaaacctcacagcttgtataatgtaaccatttggggtccgcttttaacttggactagtgtaactccttcatgcaataaactgaaaagagccatgctggatgcggccggaaccccgcctcagctctaactacgtcatccgtccaaaacaaacatt

SEQ ID NO: 36280 - DNA, 1419 bp, Homo sapiens
  misc_feature (50)..(50): n is a, c, g, or t
  misc_feature (1387)..(1387): n is a, c, g, or t
  misc_feature (1398)..(1399): n is a, c, g, or t
  misc_feature (1407)..(1407): n is a, c, g, or t
ggcacgatcggcacgagtggcagcccggactcccccgacatgtgatcggnttcccagggagggcgggaggcccgggcgttccccgagcctggggaagctggccgtcccggactgacctgctcggggagagccagcaaaggacacattcggcctggcccaagccctgacgatttcagtgttgttttctgcacgcgcaaaacacctggggaccgaggggatggcagtggcatcctatctttgacagctctgaacgagcttaaccttttttttcagacccctttgctgatgcaagtaagggtgatgacctgcttcctgctggcactgaggattatatccatataagaattcaacagagaaacggcaggaagacccttactactgtccaagggatcgctgatgattacgataaaaagaaactagtgaaggcgtttaagaaaaagtttgcctgcaatggtactgtaattgagcatccggaatatggagaagtaattcagctacagggtgaccaacgcaagaacatatgccagttcctcgtagagattggactggctaaggacgatcagctgaaggttcatgggttttaagtgcttgtggctcactgaagcttaagtgaggatttccttgcaatgagtagaatttcccttctctcccttgtcacaggtttaaaaacctcacagcttgtataatgtaaccatttggggtccgcttttaacttggactagtgtaactccttcatgcaataaactgaaaagagccatgctgtctagtcttgaagtccctcatttaaacagaggtcaagcaataggcgcctggcagtgtcaagcctgaaaccaagcaataccgtcatgtttcagccaagcccagagccctaagattacaaacaactatggccggaacctcctcagctctccctctgcagagttccctaccctaagagaatgttaccacctgaacagtcctcggtgaatctgagaggagaggatggggtaaggcagaagcaccagctgtactactagaagggagcttttggtggtagatcccctggtgtctccaacctgactaggtggacagagctcaaagaggccctcttaccgctagcgaggtgataggacatctggcttgccacaaaggtctgttcgaccagacatatcctagctaagggatgtccaaacatcagaatgtgaggccaaccttctatcagagttaactttgacaagggaacaaatctcaaactgatccatcagtcatgtagctagctgtagagcttgcaacttaatagcagcagctgcccaatgccatgtgaagtaacaaactggttttaggtttttttttccccttcagttttaatgtcatgtgtaatgtatttaaacccttatttacataaacntgtttcagaannagaaaaancacaccaacaag

SEQ ID NO: 36281 - DNA, 1269 bp, Homo sapiens
  misc_feature (4)..(4): n is a, c, g, or t
  misc_feature (20)..(20): n is a, c, g, or t
  misc_feature (31)..(31): n is a, c, g, or t
  misc_feature (54)..(54): n is a, c, g, or t
  misc_feature (70)..(70): n is a, c, g, or t
  misc_feature (1237)..(1237): n is a, c, g, or t
  misc_feature (1248)..(1249): n is a, c, g, or t
  misc_feature (1257)..(1257): n is a, c, g, or t
tacncacaaggaacaagtgngtccaccgtgngcgttaaatagtgatcccgggtncagaatcgcagagcangtcgtccccctgccggcttctccgccgccgccgccttccgcaggccgtttccaccgaggaaaaggaatcgtatcgtatgtccgctatccagaacctccactctttcgacccctttgctgatgcaagtaagggtgatgacctgcttcctgctggcactgaggattatatccatataagaattcaacagagaaacggcaggaagacccttactactgtccaagggatcgctgatgattacgataaaaagaaactagtgaaggcgtttaagaaaaagtttgcctgcaatggtactgtaattgagcatccggaatatggagaagtaattcagctacagggtgaccaacgcaagaacatatgccagttcctcgtagagattggactggctaaggacgatcagctgaaggttcatgggttttaagtgcttgtggctcactgaagcttaagtgaggatttccttgcaatgagtagaatttcccttctctcccttgtcacaggtttaaaaacctcacagcttgtataatgtaaccatttggggtccgcttttaacttggactagtgtaactccttcatgcaataaactgaaaagagccatgctgtctagtcttgaagtccctcatttaaacagaggtcaagcaataggcgcctggcagtgtcaagcctgaaaccaagcaataccgtcatgtttcagccaagcccagagccctaagattacaaacaactatggccggaacctcctcagctctccctctgcagagttccctaccctaagagaatgttaccacctgaacagtcctcggtgaatctgagaggagaggatggggtaaggctctccaacctgactaggtggacagagctcaaagaggccctcttaccgctagcgaggtgataggacatctggcttgccacaaaggtctgttcgaccagacatatcctagctaagggatgtccaaacatcagaatgtgaggccaaccttctatcagagttaactttgacaagggaacaaatctcaaactgatccatcagtcatgtagctagctgtagagcttgcaacttaatagcagcagctgcccaatgccatgtgaagtaacaaactggttttaggtttttttttccccttcagttttaatgtcatgtgtaatgtatttaaacccttatttacataaacntgtttcagaannagaaaaancacaccaacaag

SEQ ID NO: 36282 - DNA, 502 bp, Homo sapiens
  misc_feature (4)..(4): n is a, c, g, or t
  misc_feature (20)..(20): n is a, c, g, or t
  misc_feature (31)..(31): n is a, c, g, or t
  misc_feature (54)..(54): n is a, c, g, or t
  misc_feature (70)..(70): n is a, c, g, or t
tacncacaaggaacaagtgngtccaccgtgngcgttaaatagtgatcccgggtncagaatcgcagagcangtcgtccccctgccggcttctccgccgccgccgccttccgcaggccgtttccaccgaggaaaaggaatcgtatcgtatgtccgctatccagaacctccactctttcgaaaaaagtttgcctgcaatggtactgtaattgagcatccggaatatggagaagtaattcagctacagggtgaccaacgcaagaacatatgccagttcctcgtagagattggactggctaaggacgatcagctgaaggttcatgggttttaagtgcttgtggctcactgaagcttaagtgaggatttccttgcaatgagtagaatttcccttctctcccttgtcacaggtttaaaaacctcacagcttgtataatgtaaccatttggggtccgcttttaacttggactagtgtaactccttcatgcaataaactgaaaagagccat

SEQ ID NO: 36283 - DNA, 968 bp, Homo sapiens
  misc_feature (4)..(4): n is a, c, g, or t
  misc_feature (20)..(20): n is a, c, g, or t
  misc_feature (31)..(31): n is a, c, g, or t
  misc_feature (54)..(54): n is a, c, g, or t
  misc_feature (70)..(70): n is a, c, g, or t
tacncacaaggaacaagtgngtccaccgtgngcgttaaatagtgatcccgggtncagaatcgcagagcangtcgtccccctgccggcttctccgccgccgccgccttccgcaggccgtttccaccgaggaaaaggaatcgtatcgtatgtccgctatccagaacctccactctttcgacccctttgctgatgcaagtaagggtgatgacctgcttcctgctggcactgaggattatatccatataagaattcaacagagaaacggcaggaagacccttactactgtccaagggatcgctgatgattacgataaaaagaaactagtgaaggcgtttaagaaaaagtttgcctgcaatggtactgtaattgagcatccggaatatggagaagtaattcagctacagggtgaccaacgcaagaacatatgccagttcctcgtagagattggactggctaaggacgatcagctgaaggttcatgggttttaagtgcttgtggctcactgaagcttaagtgaggatttccttgcaatgagtagaatttcccttctctcccttgtcacaggtttaaaaacctcacagcttgtataatgtaaccatttggggtccgcttttaacttggactagtgtaactccttcatgcaataaactgaaaagagccataaaaaaaaaaaaaaaaaaaaaaacaccggggggacctatatagcgggggcgcgggggaaacacaggggcacgagaaggggccaggggcaaaaggggaaccgggacccaacttccgggacaaagggggaaaactcggcgggcccccaataaagaagtcgataaaatcaaaaaacccgggatacccggggaaaggaaccccgagaaaaaacacccgaccgcacccccacccacccccacccagcacacccaccccacccacccgcaccagagccaacacacaagcaacaaccacacccccaccaacac

SEQ ID NO: 36284 - DNA, 444 bp, Homo sapiens
gcggccgccttcggagcgccgccctcctcccgaaaccggccggggcgagtggctgcaagaagctgcggtttggcccgcgggagaggggggcttccccgctggggttgtctgacgcgaacgccttcctggccccagccaggcgccctgagatgatgaaggtttaagaagcagcatcatcagcgaactgtgttttgaagatttgagggaagggctgacctcaggattttatactagttgctgacctccataacagcagacaaaattggaagcaagagtgattttggaggagtcacacttagatgtttcccttacctatttctgttctggaaatttaaaaatcttacttctcgtgacagtcctacatgaaaaattaaaaatcacaaggattcatggatggaaaactgagactcagagaatgatcacattcacatcgtaataaatcag

SEQ ID NO: 36285 - DNA, 530 bp, Homo sapiens
acaaagtggagaaggaaacgctgggaaatctggaagtcagacatgagagctaatgctggcagctgttgggatgtcctcttccaggaatggtgatgagtttccctggatccagccctggcttggctgagggattattttcagacctcatgaagctgctggcttatagaacaggagtctttctgttggcagccaggagagatacaagagggggaggacagattctgcagctccatttcgtccttggaacaggagaaagggttggaaaacaaagatcacttttctctggccaaatggaatcacccaacaaagtaccttcctgatgggccagctatttcagatgatgaaggtttaagaagcagcatcatcagcgaactgtgttttgaagatttgagggaagggctgacctcaggattttatactaggtttgtgtaaacacacaggattctttttctctctgtcccaaatttaatcatcgcactcattcaaatgaaatatgaagtcataagtattaaaatatgcatgagattttg

SEQ ID NO: 36286 - DNA, 609 bp, Homo sapiens
gcggccgccttcggagcgccgccctcctcccgaaaccggccggggcgagtggctgcaagaagctgcggtttggcccgcgggagaggggggcttccccgctggggttgtctgacgcgaacgccttcctggccccagccaggcgccctgagagagctaatgctggcagctgttgggatgtcctcttccaggaatggtgatgagtttccctggatccagccctggcttggctgagatgatgaaggtttaagaagcagcatcatcagcgaactgtgttttgaagatttgagggaagggctgacctcaggattttatactaggtatttgatgcaatgcagactggaatcctccccacaaggatgccctggcctgagtggcacagagatcaatgcagcagtcatttcctgggcggggaaagcccatccacagtggccctggaatgatgctggtcttaccttctattcctaggaaggccctatctcaagtggctctggtccatgcaaacagatggaaacgggtgtggggaagcacaggcctcctactcatgttaagagagctgctcagaggcaggaatccagaaccaggaatgtccccagtggctgcccaaggtac

SEQ ID NO: 36287 - DNA, 5000 bp, Homo sapiens
  misc_feature (1124)..(1124): n is a, c, g, or t
agaagaaggggagaggaggttgtgtgggacaaggtgctcctgacagaaggatgccacagctgagcctgtcctcgctgggcctttggccaatggcagcatccccgtggctgctcctgctgctggttggggcctcctggctcctggcccgcatcctggcctggacctataccttctatgacaactgctgccgcctccggtgtttcccgcaacccccgaaacggaattggttcttgggtcacctgggcctgattcacagctcggaggaaggtctcctatacacacaaagcctggcatgcaccttcggtgatatgtgctgctggtgggtggggccctggcacgcaatcgtccgcatcttccaccccacctacatcaagcctgtgctctttgctccagctgccattgtaccaaaggacaaggtcttctacagcttcctgaagccctggctgggggatgggctcctgctgagtgctggtgaaaagtggagccgccaccgtcggatgctgacgcctgccttccatttcaacatcctgaagccctatatgaagattttcaatgagagtgtgaacatcatgcatgccaagtggcagctcctggcctcagagggtagtgcccgtctggacatgtttgagcacatcagcctcatgaccttggacagtctgcagaaatgtgtcttcagctttgacagccattgccaggagaagcccagtgaatatattgccgccatcttggagctcagtgcccttgtgacaaaaagacaccagcagatcctcctgtacatagacttcctgtattatctcacccctgatgggcagcgtttccgcagggcctgccgcctggtgcacgacttcacagatgccgtcatccaggagcggcgccgcaccctccctagccagggtgttgatgacttcctccaagccaaggccaaatccaagactttggacttcattgatgtactcctgctgagcaaggatgaagatgggaagaagttgtccgatgaggacataagagcagaagctgacacctttatgtttgagggccatgacaccacagccagtggtctctcctgggtcctgtaccaccttgcaaagcacccggaataccaggagcgctgtcggcaggaggtncaagagcttctgaaggaccgtgagcctaaagagattgaatgggacgacctggcccagctgcccttcctgaccatgtgcattaaggagagcctgaggctgcatcccccagtccctgccgtctctcgctgctgcacccaagacattgtgctcccagacggccgggtcatccccaaaggcattatctgcctcatcagtgtttttggaacccatcacaacccagccgtgtggccggaccctgaggtctatgacccctttcgctttgacccaaagaacatcaaggagaggtcacctctggcttttattcccttctcagcagggcccaggaactgcatcgggcaggcgttcgcgatggcggagatgaaggtggtcctggggctcacgctgctggccttccgcgtcctgcctgaccacaccgagccccgcaggaagccggagctggtcctgcgcgcagagggcggactttggctgcgggtggagcccctgagctgagttctgcagagacccactctgaccccactaaaatgacccctgattcatcaaaagtgaggcctagaattaccctaagaccctgttccacagtcctgtattccatcctagatatctactcaaaataattgagacaagtgttcaaacagaaagacgcttgtgcggaatgttcatggcagccctattcacagtagcccaaacgatgaaaacaccccaagctatatattaccagataaaaggataaacacaatatggtccatccatacactggagtattacacagccataaaaaggaatgaagcagtgatccccactacactgtggatgaaccttgaatgcatgatactgaatgaaagacatcagatgcaaaaggtcacatagtgtactgtccttttatatgaaatttccagaacaggccaatctgaagagatgtatagtggattggtggctttcagcagctgtggggaggtgggactgaggagcgactgctaatcaggatggggtttcctcctgggatggtgaaaatgttccggacctagatagtgatgaaggtagcacgacactgtgagtgcactaaatgctattgaattagacactttagaatggttgaaatagtgatttttatgtgaattctacctaaacatgctattacagctcatatatactttttccatctggattcttcacaaaagaatatgttgtgagcatctttccatgatattaaatcatcttaggaaacattattttgtgttcttcaaaatgtgcatgttaagtattcaaatcagtcttaaatttttaaaaatatgtaattttagaaaataatttaaaaggttttgtttcagtttgtaagatttcttttctggcactttaatggcttgaggtatcattatcagttacaaattgagttattcttcatcaaatgacttttggagtagagattttatttttatagcaatagatgcacagatattcctgtaagatacaggtgtggttagacacttttctagaacaggcatgccctgcaaactccacagacactgactgtttttgtcctatgaacaagcagaccactgagaagggagaaggtgacattttagctttcccaggtaaaagtggttttcatcctcacaccaattttatggactggacgttaactctcttgctcaaggtcactctgtgagtggaagagtggggataaatctggttcgtttggcatcagaggccatgacttttcctaccacagaagtaattttcaaagtaagtctctgccctaggcacatcagatcacctggggaccactccagagtgagtagacaagactttgacaggggtgcctaatttttttttttttttgagatggagtctcgctctgttgcccaggctggagtgcggtggcatgatctcggttcattgcaacctccgcctcctgcgttcgggtgattgacctgtctcggcctcccgggtggctgggattgcaggcacccaccaccacgtccagctaattgttgtatttttgatagaggcggggtttcgccatgttacactggctggtgttgaactcctaacctcaggtgatccacctgcctcggcctcccaaagtgctgggattacaggcctggcccagtttgatagtttgttatcatgttatacgtacacttagaataatgatccagccatctcattctaacagcaatgagaacttaggctcccctctctactaaaatacaaaagttagctggtcatggtggtgcgggcctgtggtcccagctgctcgggaggttgatgcaggagaatcacttgaaacccacaggcggaggttgcagtgggctggggtggtgccactgcgctccagcctgggggagggggacatagcgagactcggtctcaaaaacaaaacaaaacaaaacaaaacaaaaacaaaacaaaacaaaacaaaacactgccaaactgtttccaaagcatctgcatcgtgtttaatttccataagtaacgtatgagaattctaggtcctccaaataattagcagtccttcgtagtgtcagtttttgtttcagccttccttatgggtatgctgtggcatatccctgagattttaattcgcattttccagtgactaagggtgttgaaccactcgtgccttcctgtgcctatttgacactcctatattttctttggtgaagtgtctgttcaatcatctgctcattaaattttccttcggttgtttgccttcttattgttggattttgagagttctatgtacaagtcctttgtcagtcgtgtgatttgcaagtcttcttcctagtctctgaagtttctttctttcatagagcaaacgttttaaatttttatgaagtaagacttctcagttttatttttggtgaattatgtttatactgccatatataggaactctttgcttaactggaggtcatggagattttctcctacattttcttttaaaagttttatagtttcagagtttacatgtaattccataatctccatttagttaaattttgtatggggtgtgaactgtggtttgactgttttcttgtatatggatatccaattgtttcacacaatttttttgaaaagaatatccttggcagggcacggtagctcacacctgtaatcccagcactttaggaggtcaaggtgggcagatcatgaggtcaggagtttgagaccagcctggccaatatggtgaaaccacgtctctattaaaaataggcaggagaatcgcttgaacccaggagtcagaggtttcagtgagccgagattgtgccactgcactccagcctgggtgaaagagctagattctctctctcaaaaaaaaaaaaaaaaaggaaagaaagaaagaaaagaaaagaaaatcctttttgctttaacttgccttgcaggtttgtagaaaactcaattgttgaaatttgggtggatatatttctggattttctattctattccatgttggaccaataccacactgccctagtcactgttgcattatagtatatctttaaaggagtaatgggaatccttcaactacatttttttccccaataatttttggctattctgcttcttttgtgtttctatgtaaattttatcatcagtgtgtctatttctacaaatagtcctgatagggtttgaattgggatttctgtgaatctatagatcaatctgaggagacttaataatgatattgattctcccaattcatgaatatagtatacccctgtatttatttgttttcttgaatttcttttatcattgttttgtagttttcaccatgacagtcttgcacatattttgttaaatgtacagctgagaatttaattttttctggtgtacaatgctaataaaatggtgctttaaaagatgtgttcttca

SEQ ID NO: 36288 - DNA, 4628 bp, Homo sapiens
  misc_feature (1124)..(1124): n is a, c, g, or t
agaagaaggggagaggaggttgtgtgggacaaggtgctcctgacagaaggatgccacagctgagcctgtcctcgctgggcctttggccaatggcagcatccccgtggctgctcctgctgctggttggggcctcctggctcctggcccgcatcctggcctggacctataccttctatgacaactgctgccgcctccggtgtttcccgcaacccccgaaacggaattggttcttgggtcacctgggcctgattcacagctcggaggaaggtctcctatacacacaaagcctggcatgcaccttcggtgatatgtgctgctggtgggtggggccctggcacgcaatcgtccgcatcttccaccccacctacatcaagcctgtgctctttgctccagctgccattgtaccaaaggacaaggtcttctacagcttcctgaagccctggctgggggatgggctcctgctgagtgctggtgaaaagtggagccgccaccgtcggatgctgacgcctgccttccatttcaacatcctgaagccctatatgaagattttcaatgagagtgtgaacatcatgcatgccaagtggcagctcctggcctcagagggtagtgcccgtctggacatgtttgagcacatcagcctcatgaccttggacagtctgcagaaatgtgtcttcagctttgacagccattgccaggagaagcccagtgaatatattgccgccatcttggagctcagtgcccttgtgacaaaaagacaccagcagatcctcctgtacatagacttcctgtattatctcacccctgatgggcagcgtttccgcagggcctgccgcctggtgcacgacttcacagatgccgtcatccaggagcggcgccgcaccctccctagccagggtgttgatgacttcctccaagccaaggccaaatccaagactttggacttcattgatgtactcctgctgagcaaggatgaagatgggaagaagttgtccgatgaggacataagagcagaagctgacacctttatgtttgagggccatgacaccacagccagtggtctctcctgggtcctgtaccaccttgcaaagcacccggaataccaggagcgctgtcggcaggaggtncaagagcttctgaaggaccgtgagcctaaagagattgaatgggacgacctggcccagctgcccttcctgaccatgtgcattaaggagagcctgaggctgcatcccccagtccctgccgtctctcgctgctgcacccaagacattgtgctcccagacggccgggtcatccccaaaggcattatctgcctcatcagtgtttttggaacccatcacaacccagccgtgtggccggaccctgaggtctatgacccctttcgctttgacccaaagaacatcaaggagaggtcacctctggcttttattcccttctcagcagggcccaggaactgcatcgggcaggcgttcgcgatggcggagatgaaggtggtcctggggctcacgctgctggccttccgcgtcctgcctgaccacaccgagccccgcaggaagccggagctggtcctgcgcgcagagggcggactttggctgcgggtggagcccctgagctgagttctgcagagacccactctgaccccactaaaatgacccctgattcatcaaaagtgaggcctagaattaccctaagaccctgttccacagtcctgtattccatcctagatatctactcaaaataattgagacaagtgttcaaacagaaagacgcttgtgcggaatgttcatggcagccctattcacagtagcccaaacgatgaaaacaccccaagctatatattaccagataaaaggataaacacaatatggtccatccatacactggagtattacacagccataaaaaggaatgaagcagtgatccccactacactgtggatgaaccttgaatgcatgatactgaatgaaagacatcagatgcaaaaggtcacatagtgtactgtccttttatatgaaatttccagaacaggccaatctgaagagatgtatagtggattggtggctttcagcagctgtggggaggtgggactgaggagcgactgctaatcaggatggggtttcctcctgggatggtgaaaatgttccggacctagatagtgatgaaggtagcacgacactgtgagtgcactaaatgctattgaattagacactttagaatggttgaaatagtgatttttatgtgaattctacctaaacatgctattacagctcatatatactttttccatctggattcttcacaaaagaatatgttgtgagcatctttccatgatattaaatcatcttaggaaacattattttgtgttcttcaaaatgtgcatgttaagtattcaaatcagtcttaaatttttaaaaatatgtaattttagaaaataatttaaaaggttttgtttcagtttgtaagatttcttttctggcactttaatggcttgaggtatcattatcagttacaaattgagttattcttcatcaaatgacttttggagtagagattttatttttatagcaatagatgcacagatattcctgtaagatacaggtgtggttagacacttttctagaacaggcatgccctgcaaactccacagacactgactgtttttgtcctatgaacaagcagaccactgagaagggagaaggtgacattttagctttcccaggtaaaagtggttttcatcctcacaccaattttatggactggacgttaactctcttgctcaaggtcactctgtgagtggaagagtggggataaatctggttcgtttggcatcagaggccatgacttttcctaccacagaagtaattttcaaagtaagtctctgccctaggcacatcagatcacctggggaccactccagagtgagtagacaagactttgacaggggtgcctaatttttttttttttttgagatggagtctcgctctgttgcccaggctggagttgcagtgggctggggtggtgccactgcgctccagcctgggggagggggacatagcgagactcggtctcaaaaacaaaacaaaacaaaacaaaacaaaaacaaaacaaaacaaaacaaaacactgccaaactgtttccaaagcatctgcatcgtgtttaatttccataagtaacgtatgagaattctaggtcctccaaataattagcagtccttcgtagtgtcagtttttgtttcagccttccttatgggtatgctgtggcatatccctgagattttaattcgcattttccagtgactaagggtgttgaaccactcgtgccttcctgtgcctatttgacactcctatattttctttggtgaagtgtctgttcaatcatctgctcattaaattttccttcggttgtttgccttcttattgttggattttgagagttctatgtacaagtcctttgtcagtcgtgtgatttgcaagtcttcttcctagtctctgaagtttctttctttcatagagcaaacgttttaaatttttatgaagtaagacttctcagttttatttttggtgaattatgtttatactgccatatataggaactctttgcttaactggaggtcatggagattttctcctacattttcttttaaaagttttatagtttcagagtttacatgtaattccataatctccatttagttaaattttgtatggggtgtgaactgtggtttgactgttttcttgtatatggatatccaattgtttcacacaatttttttgaaaagaatatccttggcagggcacggtagctcacacctgtaatcccagcactttaggaggtcaaggtgggcagatcatgaggtcaggagtttgagaccagcctggccaatatggtgaaaccacgtctctattaaaaatagaaaaattagccaggcgtggtggtgtgtgcctgtattcacagctgcttggatggctgaggcaggagaatcgcttgaacccaggagtcagaggtttcagtgagccgagattgtgccactgcactccagcctgggtgaaagagctagattctctctctcaaaaaaaaaaaaaaaaaggaaagaaagaaagaaaagaaaagaaaatcctttttgctttaacttgccttgcaggtttgtagaaaactcaattgttgaaatttgggtggatatatttctggattttctattctattccatgttggaccaataccacactgccctagtcactgttgcattatagtatatctttaaaggagtaatgggaatccttcaactacatttttttccccaataatttttggctattctgcttcttttgtgtttctatgtaaattttatcatcagtgtgtctatttctacaaatagtcctgatagggtttgaattgggatttctgtgaatctatagatcaatctgaggagacttaataatgatattgattctcccaattcatgaatatagtatacccctgtatttatttgttttcttgaatttcttttatcattgttttgtagttttcaccatgacagtcttgcacatattttgttaaatgtacagctgagaatttaattttttctggtgtacaatgctaataaaatggtgctttaaaagatgtgttcttca

SEQ ID NO: 36289 - DNA, 3751 bp, Homo sapiens
  misc_feature (1124)..(1124): n is a, c, g, or t
agaagaaggggagaggaggttgtgtgggacaaggtgctcctgacagaaggatgccacagctgagcctgtcctcgctgggcctttggccaatggcagcatccccgtggctgctcctgctgctggttggggcctcctggctcctggcccgcatcctggcctggacctataccttctatgacaactgctgccgcctccggtgtttcccgcaacccccgaaacggaattggttcttgggtcacctgggcctgattcacagctcggaggaaggtctcctatacacacaaagcctggcatgcaccttcggtgatatgtgctgctggtgggtggggccctggcacgcaatcgtccgcatcttccaccccacctacatcaagcctgtgctctttgctccagctgccattgtaccaaaggacaaggtcttctacagcttcctgaagccctggctgggggatgggctcctgctgagtgctggtgaaaagtggagccgccaccgtcggatgctgacgcctgccttccatttcaacatcctgaagccctatatgaagattttcaatgagagtgtgaacatcatgcatgccaagtggcagctcctggcctcagagggtagtgcccgtctggacatgtttgagcacatcagcctcatgaccttggacagtctgcagaaatgtgtcttcagctttgacagccattgccaggagaagcccagtgaatatattgccgccatcttggagctcagtgcccttgtgacaaaaagacaccagcagatcctcctgtacatagacttcctgtattatctcacccctgatgggcagcgtttccgcagggcctgccgcctggtgcacgacttcacagatgccgtcatccaggagcggcgccgcaccctccctagccagggtgttgatgacttcctccaagccaaggccaaatccaagactttggacttcattgatgtactcctgctgagcaaggatgaagatgggaagaagttgtccgatgaggacataagagcagaagctgacacctttatgtttgagggccatgacaccacagccagtggtctctcctgggtcctgtaccaccttgcaaagcacccggaataccaggagcgctgtcggcaggaggtncaagagcttctgaaggaccgtgagcctaaagagattgaatgggacgacctggcccagctgcccttcctgaccatgtgcattaaggagagcctgaggctgcatcccccagtccctgccgtctctcgctgctgcacccaagacattgtgctcccagacggccgggtcatccccaaaggcattatctgcctcatcagtgtttttggaacccatcacaacccagccgtgtggccggaccctgaggtctatgacccctttcgctttgacccaaagaacatcaaggagaggtcacctctggcttttattcccttctcagcagggcccaggaactgcatcgggcaggcgttcgcgatggcggagatgaaggtggtcctggggctcacgctgctggccttccgcgtcctgcctgaccacaccgagccccgcaggaagccggagctggtcctgcgcgcagagggcggactttggctgcgggtggagcccctgagctgagttctgcagagacccactctgaccccactaaaatgacccctgattcatcaaaagtgaggcctagaattaccctaagaccctgttccacagtcctgtattccatcctagatatctactcaaaataattgagacaagtgttcaaacagaaagacgcttgtgcggaatgttcatggcagccctattcacagtagcccaaacgatgaaaacaccccaagctatatattaccagataaaaggataaacacaatatggtccatccatacactggagtattacacagccataaaaaggaatgaagcagtgatccccactacactgtggatgaaccttgaatgcatgatactgaatgaaagacatcagatgcaaaaggtcacatagtgtactgtccttttatatgaaatttccagaacaggccaatctgaagagatgtatagtggattggtggctttcagcagctgtggggaggtgggactgaggagcgactgctaatcaggatggggtttcctcctgggatggtgaaaatgttccggacctagatagtgatgaaggtagcacgacactgtgagtgcactaaatgctattgaattagacactttagaatggttgaaatagtgatttttatgtgaattctacctaaacatgctattacagctcatatatactttttccatctggattcttcacaaaagaatatgttgtgagcatctttccatgatattaaatcatcttaggaaacattattttgtgttcttcaaaatgtgcatgttaagtattcaaatcagtcttaaatttttaaaaatatgtaattttagaaaataatttaaaaggttttgtttcagtttgtaagatttcttttctggcactttaatggcttgaggtatcattatcagttacaaattgagttattcttcatcaaatgacttttggagtagagattttatttttatagcaatagatgcacagatattcctgtaagatacaggtgtggttagacacttttctagaacaggcatgccctgcaaactccacagacactgactgtttttgtcctatgaacaagcagaccactgagaagggagaaggtgacattttagctttcccaggtaaaagtggttttcatcctcacaccaattttatggactggacgttaactctcttgctcaaggtcactctgtgagtggaagagtggggataaatctggttcgtttggcatcagaggccatgacttttcctaccacagaagtaattttcaaagtaagtctctgccctaggcacatcagatcacctggggaccactccagagtgagtagacaagactttgacaggggtgcctaatttttttttttttttgagatggagtctcgctctgttgcccaggctggagtgcggtggcatgatctcggttcattgcaacctccgcctcctgcgttcgggtgattgacctgtctcggcctcccgggtggctgggattgcaggcacccaccaccacgtccagctaattgttgtatttttgatagaggcggggtttcgccatgttacactggctggtgttgaactcctaacctcaggtgatccacctgcctcggcctcccaaagtgctgggattacaggcctggcccagtttgatagtttgttatcatgttatacgtacacttagaataatgatccagccatctcattctaacagcaatgagaacttaggctcccctctctactaaaatacaaaagttagctggtcatggtggtgcgggcctgtggtcccagctgctcgggaggttgatgcaggagaatcacttgaaacccacaggcggaggttgcagtgggctggggtggtgccactgcgctccagcctgggggagggggacatagcgagactcggtctcaaaaacaaaacaaaacaaaacaaaacaaaaacaaaacaaaacaaaacaaaacactgccaaactgtttccaaagcatctgcatcgtgtttaatttccataagtaacgtatgagaattctaggtcctccaaataattagcagtccttcgtagtgtcagtttttgtttcagccttccttatgggtatgctgtggcatatccctgagattttaattcgcattttccagtgacgttcctcatcaccgggatcctctaagt

SEQ ID NO: 36290 - DNA, 1442 bp, Homo sapiens
agaagaaggggagaggaggttgtgtgggacaaggtgctcctgacagaaggatgccacagctgagcctgtcctcgctgggcctttggccaatggcagcatccccgtggctgctcctgctgctggttggggcctcctggctcctggcccgcatcctggcctggacctataccttctatgacaactgctgccgcctccggtgtttcccgcaacccccgaaacggaattggttcttgggtcacctgggcctgattcacagctcggaggaaggtctcctatacacacaaagcctggcatgcaccttcggtgatatgtgctgctggtgggtggggccctggcacgcaatcgtccgcatcttccaccccacctacatcaagcctgtgctctttgctccagctgccattgtaccaaaggacaaggtcttctacagcttcctgaagccctggctgggggatgggctcctgctgagtgctggtgaaaagtggagccgccaccgtcggatgctgacgcctgccttccatttcaacatcctgaagccctatatgaagattttcaatgagagtgtgaacatcatgcatgccaagtggcagctcctggcctcagagggtagtgcccgtctggacatgtttgagcacatcagcctcatgaccttggacagtctgcagaaatgtgtcttcagctttgacagccattgccaggagaagcccagtgaatatattgccgccatcttggagctcagtgcccttgtgacaaaaagacaccagcagatcctcctgtacatagacttcctgtattatctcacccctgatgggcagcgtttccgcagggcctgccgcctggtgcacgacttcacagatgccgtcatccaggagcggcgccgcaccctccctagccagggtgttgatgacttcctccaagccaaggccaaatccaagactttggacttcattgatgtactcctgctgagcaaggtgggcctctctgggatctgaattcaagaagtagaagggagcttcatgtgaaatgtcagatgaaagaatttgaacttgacccagagggcactggggagccatggaagtggagagagaagggagggacaggtcagagataggttttggagatagctctgtggactagcacctaccaggggactgctaaatgaaattgtgatgagtctgagatttactctatttataagttaataagctaattggccaccttttaatctatatatctacatctatacctatgtctgggtctatgtttatgtttttgcctatgtctttctgtatctttgtctctgagtttgtgtctctctctatgactatgactatgtctatgtctttgtctttttcattggccatatctgtatgtctttgtctgcatctgtgtcttcatctttgtttatgtttatgcctttctctctccactccctccctgccttc

SEQ ID NO: 36291 - DNA, 5058 bp, Homo sapiens
  misc_feature (1124)..(1124): n is a, c, g, or t
agaagaaggggagaggaggttgtgtgggacaaggtgctcctgacagaaggatgccacagctgagcctgtcctcgctgggcctttggccaatggcagcatccccgtggctgctcctgctgctggttggggcctcctggctcctggcccgcatcctggcctggacctataccttctatgacaactgctgccgcctccggtgtttcccgcaacccccgaaacggaattggttcttgggtcacctgggcctgattcacagctcggaggaaggtctcctatacacacaaagcctggcatgcaccttcggtgatatgtgctgctggtgggtggggccctggcacgcaatcgtccgcatcttccaccccacctacatcaagcctgtgctctttgctccagctgccattgtaccaaaggacaaggtcttctacagcttcctgaagccctggctgggggatgggctcctgctgagtgctggtgaaaagtggagccgccaccgtcggatgctgacgcctgccttccatttcaacatcctgaagccctatatgaagattttcaatgagagtgtgaacatcatgcatgccaagtggcagctcctggcctcagagggtagtgcccgtctggacatgtttgagcacatcagcctcatgaccttggacagtctgcagaaatgtgtcttcagctttgacagccattgccaggagaagcccagtgaatatattgccgccatcttggagctcagtgcccttgtgacaaaaagacaccagcagatcctcctgtacatagacttcctgtattatctcacccctgatgggcagcgtttccgcagggcctgccgcctggtgcacgacttcacagatgccgtcatccaggagcggcgccgcaccctccctagccagggtgttgatgacttcctccaagccaaggccaaatccaagactttggacttcattgatgtactcctgctgagcaaggatgaagatgggaagaagttgtccgatgaggacataagagcagaagctgacacctttatgtttgagggccatgacaccacagccagtggtctctcctgggtcctgtaccaccttgcaaagcacccggaataccaggagcgctgtcggcaggaggtncaagagcttctgaaggaccgtgagcctaaagagattgaatgggacgacctggcccagctgcccttcctgaccatgtgcattaaggagagcctgaggctgcatcccccagtccctgccgtctctcgctgctgcacccaagacattgtgctcccagacggccgggtcatccccaaaggcattatctgcctcatcagtgtttttggaacccatcacaacccagccgtgtggccggaccctgaggtctatgacccctttcgctttgacccaaagaacatcaaggagaggtcacctctggcttttattcccttctcagcagggcccaggaactgcatcgggcaggcgttcgcgatggcggagatgaaggtggtcctggggctcacgctgctggccttccgcgtcctgcctgaccacaccgagccccgcaggaagccggagctggtcctgcgcgcagagggcggactttggctgcgggtggagcccctgagctgagttctgcagagacccactctgaccccactaaaatgacccctgattcatcaaaagtgaggcctagaattaccctaagaccctgttccacagtcctgtattccatcctagatatctactcaaaataattgagacaagtgttcaaacagaaagacgcttgtgcggaatgttcatggcagccctattcacagtagcccaaacgatgaaaacaccccaagctatatattaccagataaaaggataaacacaatatggtccatccatacactggagtattacacagccataaaaaggaatgaagcagtgatccccactacactgtggatgaaccttgaatgcatgatactgaatgaaagacatcagatgcaaaaggtcacatagtgtactgtccttttatatgaaatttccagaacaggccaatctgaagagatgtatagtggattggtggctttcagcagctgtggggaggtgggactgaggagcgactgctaatcaggatggggtttcctcctgggatggtgaaaatgttccggacctagatagtgatgaaggtagcacgacactgtgagtgcactaaatgctattgaattagacactttagaatggttgaaatagtgatttttatgtgaattctacctaaacatgctattacagctcatatatactttttccatctggattcttcacaaaagaatatgttgtgagcatctttccatgatattaaatcatcttaggaaacattattttgtgttcttcaaaatgtgcatgttaagtattcaaatcagtcttaaatttttaaaaatatgtaattttagaaaataatttaaaaggttttgtttcagtttgtaagatttcttttctggcactttaatggcttgaggtatcattatcagttacaaattgagttattcttcatcaaatgacttttggagtagagattttatttttatagcaatagatgcacagatattcctgtaagatacaggtgtggttagacacttttctagaacaggcatgccctgcaaactccacagacactgactgtttttgtcctatgaacaagcagaccactgagaagggagaaggtgacattttagctttcccaggtaaaagtggttttcatcctcacaccaattttatggactggacgttaactctcttgctcaaggtcactctgtgagtggaagagtggggataaatctggttcgtttggcatcagaggccatgacttttcctaccacagaagtaattttcaaagtaagtctctgccctaggcacatcagatcacctggggaccactccagagtgagtagacaagactttgacaggggtgcctaatttttttttttttttgagatggagtctcgctctgttgcccaggctggagtgcggtggcatgatctcggttcattgcaacctccgcctcctgcgttcgggtgattgacctgtctcggcctcccgggtggctgggattgcaggcacccaccaccacgtccagctaattgttgtatttttgatagaggcggggtttcgccatgttacactggctggtgttgaactcctaacctcaggtgatccacctgcctcggcctcccaaagtgctgggattacaggcctggcccagtttgatagtttgttatcatgttatacgtacacttagaataatgatccagccatctcattctaacagcaatgagaacttaggctcccctctctactaaaatacaaaagttagctggtcatggtggtgcgggcctgtggtcccagctgctcgggaggttgatgcaggagaatcacttgaaacccacaggcggaggttgcagtgggctggggtggtgccactgcgctccagcctgggggagggggacatagcgagactcggtctcaaaaacaaaacaaaacaaaacaaaacaaaaacaaaacaaaacaaaacaaaacactgccaaactgtttccaaagcatctgcatcgtgtttaatttccataagtaacgtatgagaattctaggtcctccaaataattagcagtccttcgtagtgtcagtttttgtttcagccttccttatgggtatgctgtggcatatccctgagattttaattcgcattttccagtgactaagggtgttgaaccactcgtgccttcctgtgcctatttgacactcctatattttctttggtgaagtgtctgttcaatcatctgctcattaaattttccttcggttgtttgccttcttattgttggattttgagagttctatgtacaagtcctttgtcagtcgtgtgatttgcaagtcttcttcctagtctctgaagtttctttctttcatagagcaaacgttttaaatttttatgaagtaagacttctcagttttatttttggtgaattatgtttatactgccatatataggaactctttgcttaactggaggtcatggagattttctcctacattttcttttaaaagttttatagtttcagagtttacatgtaattccataatctccatttagttaaattttgtatggggtgtgaactgtggtttgactgttttcttgtatatggatatccaattgtttcacacaatttttttgaaaagaatatccttggcagggcacggtagctcacacctgtaatcccagcactttaggaggtcaaggtgggcagatcatgaggtcaggagtttgagaccagcctggccaatatggtgaaaccacgtctctattaaaaatagaaaaattagccaggcgtggtggtgtgtgcctgtattcacagctgcttggatggctgaggcaggagaatcgcttgaacccaggagtcagaggtttcagtgagccgagattgtgccactgcactccagcctgggtgaaagagctagattctctctctcaaaaaaaaaaaaaaaaaggaaagaaagaaagaaaagaaaagaaaatcctttttgctttaacttgccttgcaggtttgtagaaaactcaattgttgaaatttgggtggatatatttctggattttctattctattccatgttggaccaataccacactgccctagtcactgttgcattatagtatatctttaaaggagtaatgggaatccttcaactacatttttttccccaataatttttggctattctgcttcttttgtgtttctatgtaaattttatcatcagtgtgtctatttctacaaatagtcctgatagggtttgaattgggatttctgtgaatctatagatcaatctgaggagacttaataatgatattgattctcccaattcatgaatatagtatacccctgtatttatttgttttcttgaatttcttttatcattgttttgtagttttcaccatgacagtcttgcacatattttgttaaatgtacagctgagaatttaattttttctggtgtacaatgctaataaaatggtgctttaaaagatgtgttcttca

SEQ ID NO: 36292 - DNA, 5038 bp, Homo sapiens
  misc_feature (1104)..(1104): n is a, c, g, or t
acctcactcaccacccatctgccctgcaggatgccacagctgagcctgtcctcgctgggcctttggccaatggcagcatccccgtggctgctcctgctgctggttggggcctcctggctcctggcccgcatcctggcctggacctataccttctatgacaactgctgccgcctccggtgtttcccgcaacccccgaaacggaattggttcttgggtcacctgggcctggtcacccccacggagcagggcatgagggtcctgactcagctggtggccacctacccccagggctttaaggtctggatgggccccatcttccccgtcatccgtttttgccaccccaacatcatccggtctgtcatcaacgcctcagctgccattgtaccaaaggacaaggtcttctacagcttcctgaagccctggctgggggatgggctcctgctgagtgctggtgaaaagtggagccgccaccgtcggatgctgacgcctgccttccatttcaacatcctgaagccctatatgaagattttcaatgagagtgtgaacatcatgcatgccaagtggcagctcctggcctcagagggtagtgcccgtctggacatgtttgagcacatcagcctcatgaccttggacagtctgcagaaatgtgtcttcagctttgacagccattgccaggagaagcccagtgaatatattgccgccatcttggagctcagtgcccttgtgacaaaaagacaccagcagatcctcctgtacatagacttcctgtattatctcacccctgatgggcagcgtttccgcagggcctgccgcctggtgcacgacttcacagatgccgtcatccaggagcggcgccgcaccctccctagccagggtgttgatgacttcctccaagccaaggccaaatccaagactttggacttcattgatgtactcctgctgagcaaggatgaagatgggaagaagttgtccgatgaggacataagagcagaagctgacacctttatgtttgagggccatgacaccacagccagtggtctctcctgggtcctgtaccaccttgcaaagcacccggaataccaggagcgctgtcggcaggaggtncaagagcttctgaaggaccgtgagcctaaagagattgaatgggacgacctggcccagctgcccttcctgaccatgtgcattaaggagagcctgaggctgcatcccccagtccctgccgtctctcgctgctgcacccaagacattgtgctcccagacggccgggtcatccccaaaggcattatctgcctcatcagtgtttttggaacccatcacaacccagccgtgtggccggaccctgaggtctatgacccctttcgctttgacccaaagaacatcaaggagaggtcacctctggcttttattcccttctcagcagggcccaggaactgcatcgggcaggcgttcgcgatggcggagatgaaggtggtcctggggctcacgctgctggccttccgcgtcctgcctgaccacaccgagccccgcaggaagccggagctggtcctgcgcgcagagggcggactttggctgcgggtggagcccctgagctgagttctgcagagacccactctgaccccactaaaatgacccctgattcatcaaaagtgaggcctagaattaccctaagaccctgttccacagtcctgtattccatcctagatatctactcaaaataattgagacaagtgttcaaacagaaagacgcttgtgcggaatgttcatggcagccctattcacagtagcccaaacgatgaaaacaccccaagctatatattaccagataaaaggataaacacaatatggtccatccatacactggagtattacacagccataaaaaggaatgaagcagtgatccccactacactgtggatgaaccttgaatgcatgatactgaatgaaagacatcagatgcaaaaggtcacatagtgtactgtccttttatatgaaatttccagaacaggccaatctgaagagatgtatagtggattggtggctttcagcagctgtggggaggtgggactgaggagcgactgctaatcaggatggggtttcctcctgggatggtgaaaatgttccggacctagatagtgatgaaggtagcacgacactgtgagtgcactaaatgctattgaattagacactttagaatggttgaaatagtgatttttatgtgaattctacctaaacatgctattacagctcatatatactttttccatctggattcttcacaaaagaatatgttgtgagcatctttccatgatattaaatcatcttaggaaacattattttgtgttcttcaaaatgtgcatgttaagtattcaaatcagtcttaaatttttaaaaatatgtaattttagaaaataatttaaaaggttttgtttcagtttgtaagatttcttttctggcactttaatggcttgaggtatcattatcagttacaaattgagttattcttcatcaaatgacttttggagtagagattttatttttatagcaatagatgcacagatattcctgtaagatacaggtgtggttagacacttttctagaacaggcatgccctgcaaactccacagacactgactgtttttgtcctatgaacaagcagaccactgagaagggagaaggtgacattttagctttcccaggtaaaagtggttttcatcctcacaccaattttatggactggacgttaactctcttgctcaaggtcactctgtgagtggaagagtggggataaatctggttcgtttggcatcagaggccatgacttttcctaccacagaagtaattttcaaagtaagtctctgccctaggcacatcagatcacctggggaccactccagagtgagtagacaagactttgacaggggtgcctaatttttttttttttttgagatggagtctcgctctgttgcccaggctggagtgcggtggcatgatctcggttcattgcaacctccgcctcctgcgttcgggtgattgacctgtctcggcctcccgggtggctgggattgcaggcacccaccaccacgtccagctaattgttgtatttttgatagaggcggggtttcgccatgttacactggctggtgttgaactcctaacctcaggtgatccacctgcctcggcctcccaaagtgctgggattacaggcctggcccagtttgatagtttgttatcatgttatacgtacacttagaataatgatccagccatctcattctaacagcaatgagaacttaggctcccctctctactaaaatacaaaagttagctggtcatggtggtgcgggcctgtggtcccagctgctcgggaggttgatgcaggagaatcacttgaaacccacaggcggaggttgcagtgggctggggtggtgccactgcgctccagcctgggggagggggacatagcgagactcggtctcaaaaacaaaacaaaacaaaacaaaacaaaaacaaaacaaaacaaaacaaaacactgccaaactgtttccaaagcatctgcatcgtgtttaatttccataagtaacgtatgagaattctaggtcctccaaataattagcagtccttcgtagtgtcagtttttgtttcagccttccttatgggtatgctgtggcatatccctgagattttaattcgcattttccagtgactaagggtgttgaaccactcgtgccttcctgtgcctatttgacactcctatattttctttggtgaagtgtctgttcaatcatctgctcattaaattttccttcggttgtttgccttcttattgttggattttgagagttctatgtacaagtcctttgtcagtcgtgtgatttgcaagtcttcttcctagtctctgaagtttctttctttcatagagcaaacgttttaaatttttatgaagtaagacttctcagttttatttttggtgaattatgtttatactgccatatataggaactctttgcttaactggaggtcatggagattttctcctacattttcttttaaaagttttatagtttcagagtttacatgtaattccataatctccatttagttaaattttgtatggggtgtgaactgtggtttgactgttttcttgtatatggatatccaattgtttcacacaatttttttgaaaagaatatccttggcagggcacggtagctcacacctgtaatcccagcactttaggaggtcaaggtgggcagatcatgaggtcaggagtttgagaccagcctggccaatatggtgaaaccacgtctctattaaaaatagaaaaattagccaggcgtggtggtgtgtgcctgtattcacagctgcttggatggctgaggcaggagaatcgcttgaacccaggagtcagaggtttcagtgagccgagattgtgccactgcactccagcctgggtgaaagagctagattctctctctcaaaaaaaaaaaaaaaaaggaaagaaagaaagaaaagaaaagaaaatcctttttgctttaacttgccttgcaggtttgtagaaaactcaattgttgaaatttgggtggatatatttctggattttctattctattccatgttggaccaataccacactgccctagtcactgttgcattatagtatatctttaaaggagtaatgggaatccttcaactacatttttttccccaataatttttggctattctgcttcttttgtgtttctatgtaaattttatcatcagtgtgtctatttctacaaatagtcctgatagggtttgaattgggatttctgtgaatctatagatcaatctgaggagacttaataatgatattgattctcccaattcatgaatatagtatacccctgtatttatttgttttcttgaatttcttttatcattgttttgtagttttcaccatgacagtcttgcacatattttgttaaatgtacagctgagaatttaattttttctggtgtacaatgctaataaaatggtgctttaaaagatgtgttcttca

SEQ ID NO: 36293 - DNA, 4554 bp, Homo sapiens
  misc_feature (620)..(620): n is a, c, g, or t
gattgttggggttggagagctgctcaagggagcaagggacctgccccagctctgtccccttctctggctaggccaagtggcagctcctggcctcagagggtagtgcccgtctggacatgtttgagcacatcagcctcatgaccttggacagtctgcagaaatgtgtcttcagctttgacagccattgccaggagaagcccagtgaatatattgccgccatcttggagctcagtgcccttgtgacaaaaagacaccagcagatcctcctgtacatagacttcctgtattatctcacccctgatgggcagcgtttccgcagggcctgccgcctggtgcacgacttcacagatgccgtcatccaggagcggcgccgcaccctccctagccagggtgttgatgacttcctccaagccaaggccaaatccaagactttggacttcattgatgtactcctgctgagcaaggatgaagatgggaagaagttgtccgatgaggacataagagcagaagctgacacctttatgtttgagggccatgacaccacagccagtggtctctcctgggtcctgtaccaccttgcaaagcacccggaataccaggagcgctgtcggcaggaggtncaagagcttctgaaggaccgtgagcctaaagagattgaatgggacgacctggcccagctgcccttcctgaccatgtgcattaaggagagcctgaggctgcatcccccagtccctgccgtctctcgctgctgcacccaagacattgtgctcccagacggccgggtcatccccaaaggcattatctgcctcatcagtgtttttggaacccatcacaacccagccgtgtggccggaccctgaggtctatgacccctttcgctttgacccaaagaacatcaaggagaggtcacctctggcttttattcccttctcagcagggcccaggaactgcatcgggcaggcgttcgcgatggcggagatgaaggtggtcctggggctcacgctgctggccttccgcgtcctgcctgaccacaccgagccccgcaggaagccggagctggtcctgcgcgcagagggcggactttggctgcgggtggagcccctgagctgagttctgcagagacccactctgaccccactaaaatgacccctgattcatcaaaagtgaggcctagaattaccctaagaccctgttccacagtcctgtattccatcctagatatctactcaaaataattgagacaagtgttcaaacagaaagacgcttgtgcggaatgttcatggcagccctattcacagtagcccaaacgatgaaaacaccccaagctatatattaccagataaaaggataaacacaatatggtccatccatacactggagtattacacagccataaaaaggaatgaagcagtgatccccactacactgtggatgaaccttgaatgcatgatactgaatgaaagacatcagatgcaaaaggtcacatagtgtactgtccttttatatgaaatttccagaacaggccaatctgaagagatgtatagtggattggtggctttcagcagctgtggggaggtgggactgaggagcgactgctaatcaggatggggtttcctcctgggatggtgaaaatgttccggacctagatagtgatgaaggtagcacgacactgtgagtgcactaaatgctattgaattagacactttagaatggttgaaatagtgatttttatgtgaattctacctaaacatgctattacagctcatatatactttttccatctggattcttcacaaaagaatatgttgtgagcatctttccatgatattaaatcatcttaggaaacattattttgtgttcttcaaaatgtgcatgttaagtattcaaatcagtcttaaatttttaaaaatatgtaattttagaaaataatttaaaaggttttgtttcagtttgtaagatttcttttctggcactttaatggcttgaggtatcattatcagttacaaattgagttattcttcatcaaatgacttttggagtagagattttatttttatagcaatagatgcacagatattcctgtaagatacaggtgtggttagacacttttctagaacaggcatgccctgcaaactccacagacactgactgtttttgtcctatgaacaagcagaccactgagaagggagaaggtgacattttagctttcccaggtaaaagtggttttcatcctcacaccaattttatggactggacgttaactctcttgctcaaggtcactctgtgagtggaagagtggggataaatctggttcgtttggcatcagaggccatgacttttcctaccacagaagtaattttcaaagtaagtctctgccctaggcacatcagatcacctggggaccactccagagtgagtagacaagactttgacaggggtgcctaatttttttttttttttgagatggagtctcgctctgttgcccaggctggagtgcggtggcatgatctcggttcattgcaacctccgcctcctgcgttcgggtgattgacctgtctcggcctcccgggtggctgggattgcaggcacccaccaccacgtccagctaattgttgtatttttgatagaggcggggtttcgccatgttacactggctggtgttgaactcctaacctcaggtgatccacctgcctcggcctcccaaagtgctgggattacaggcctggcccagtttgatagtttgttatcatgttatacgtacacttagaataatgatccagccatctcattctaacagcaatgagaacttaggctcccctctctactaaaatacaaaagttagctggtcatggtggtgcgggcctgtggtcccagctgctcgggaggttgatgcaggagaatcacttgaaacccacaggcggaggttgcagtgggctggggtggtgccactgcgctccagcctgggggagggggacatagcgagactcggtctcaaaaacaaaacaaaacaaaacaaaacaaaaacaaaacaaaacaaaacaaaacactgccaaactgtttccaaagcatctgcatcgtgtttaatttccataagtaacgtatgagaattctaggtcctccaaataattagcagtccttcgtagtgtcagtttttgtttcagccttccttatgggtatgctgtggcatatccctgagattttaattcgcattttccagtgactaagggtgttgaaccactcgtgccttcctgtgcctatttgacactcctatattttctttggtgaagtgtctgttcaatcatctgctcattaaattttccttcggttgtttgccttcttattgttggattttgagagttctatgtacaagtcctttgtcagtcgtgtgatttgcaagtcttcttcctagtctctgaagtttctttctttcatagagcaaacgttttaaatttttatgaagtaagacttctcagttttatttttggtgaattatgtttatactgccatatataggaactctttgcttaactggaggtcatggagattttctcctacattttcttttaaaagttttatagtttcagagtttacatgtaattccataatctccatttagttaaattttgtatggggtgtgaactgtggtttgactgttttcttgtatatggatatccaattgtttcacacaatttttttgaaaagaatatccttggcagggcacggtagctcacacctgtaatcccagcactttaggaggtcaaggtgggcagatcatgaggtcaggagtttgagaccagcctggccaatatggtgaaaccacgtctctattaaaaatagaaaaattagccaggcgtggtggtgtgtgcctgtattcacagctgcttggatggctgaggcaggagaatcgcttgaacccaggagtcagaggtttcagtgagccgagattgtgccactgcactccagcctgggtgaaagagctagattctctctctcaaaaaaaaaaaaaaaaaggaaagaaagaaagaaaagaaaagaaaatcctttttgctttaacttgccttgcaggtttgtagaaaactcaattgttgaaatttgggtggatatatttctggattttctattctattccatgttggaccaataccacactgccctagtcactgttgcattatagtatatctttaaaggagtaatgggaatccttcaactacatttttttccccaataatttttggctattctgcttcttttgtgtttctatgtaaattttatcatcagtgtgtctatttctacaaatagtcctgatagggtttgaattgggatttctgtgaatctatagatcaatctgaggagacttaataatgatattgattctcccaattcatgaatatagtatacccctgtatttatttgttttcttgaatttcttttatcattgttttgtagttttcaccatgacagtcttgcacatattttgttaaatgtacagctgagaatttaattttttctggtgtacaatgctaataaaatggtgctttaaaagatgtgttcttca

SEQ ID NO: 36294 - DNA, 1227 bp, Homo sapiens
agaagaaggggagaggaggttgtgtgggacaaggtgctcctgacagaaggatgccacagctgagcctgtcctcgctgggcctttggccaatggcagcatccccgtggctgctcctgctgctggttggggcctcctggctcctggcccgcatcctggcctggacctataccttctatgacaactgctgccgcctccggtgtttcccgcaacccccgaaacggaattggttcttgggtcacctgggcctgattcacagctcggaggaaggtctcctatacacacaaagcctggcatgcaccttcggtgatatgtgctgctggtgggtggggccctggcacgcaatcgtccgcatcttccaccccacctacatcaagcctgtgctctttgctccagctgccattgtaccaaaggacaaggtcttctacagcttcctgaagccctggctgggggatgggctcctgctgagtgctggtgaaaagtggagccgccaccgtcggatgctgacgcctgccttccatttcaacatcctgaagccctatatgaagattttcaatgagagtgtgaacatcatgcatgccaagtggcagctcctggcctcagagggtagtgcccgtctggacatgtttgagcacatcagcctcatgaccttggacagtctgcagaaatgtgtcttcagctttgacagccattgccaggagaagcccagtgaatatattgccgccatcttggagctcagtgcccttgtgacaaaaagacaccagcagatcctcctgtacatagacttcctgtattatctcacccctgatgggcagcgtttccgcagggcctgccgcctggtgcacgacttcacagatgccgtcatccaggagcggcgccgcaccctccctagccagggtgttgatgacttcctccaagccaaggccaaatccaagactttggacttcattgatgtactcctgctgagcaaggtgggcctctctgggatctgaattcaagaagtagaagggagcttcatgtgaaatgtcagatgaaagaatttgaacttgacccagagggcactggggagccatggaagtggagagagaagggagggacaggtcagagataggttttggagatagctctgtggactagcacctaccaggggactgctaaatgaaattgtgatgagtctgagatttactctatttataagttaataagcacagcccatagtccggcccaggt

SEQ ID NO: 36295 - DNA, 408 bp, Homo sapiens
agtatcataatcgtcgacagcattcagaggttcaattaagtactttaacaagcataagaaactgcataagttaatcagcttaattgtattccttttgcccattgcatgttagtctttgaagctttgcttttattaacacgggtttgtgcagcaaacatgcctattctgtaatacacatgcaacccacccttcaacaatgtccattgagtgccaagagactcatttctactttaggtgaaaataaacctttactatgtttaggaaacatgactaataacatagaaagtattcaggtttttttgctttttcagttctaaataggacttgctaagcaagaaggttctagggaggagaacttgtgaagagaaagctggaggtcagaagggcaacttgggaatctgtattaca

SEQ ID NO: 36296 - DNA, 560 bp, Homo sapiens
aaagtagagagctactgttgattctcaagagaactagaacatgaagacaatagtatttagagattattctggcaattaagccagctagcatagcattttggaagagaacatactgcactctagttcctcttatggcatatacgtatatgcttccaaaatgctacttccttcaacatgaaaaactaaaagtggtagagacagctcactcttgcaagtacaaaagtataagatgatgggatcttgtccaaagcagctgtacatttaagaagacttttgccggccaggtggggtggctgatgcctgtaatcccagccctttgggaggccaaggtgggtggatcctgaggtcaggagttcaagaccagcctgacttgaacatggtgaaaccctgtctttactaaaaatataaaaattagctgggtgtggtggcatgcctctgtaatcccagctactcaggaggctgaggcaggagaatcacttgaacctggggagtagagggtgcagtgagccgagatcacgccattgcacttcagcctgggtgacagagtaagactccatctc

SEQ ID NO: 36297 - DNA, 322 bp, Homo sapiens
tccatctagaatctgtgaatgtgaacttatttggaaaaagtgtctttgcagttgtaattaagttaaggatcttgagataaaatcatctttgattagggtgaccctaaatccaagtgtcctcagaagattaggtagaagactcaaaagagaggtgatgtagagatgaaaacatatcagagtgatgcatctacaaggcaaggaacactaaggatttccaacagctaccagaagctaggagataggcagctatcggattctcctcagggcctctagaaggaaccaaccctgtcaacaccttgattttggacttctggcctccaca

SEQ ID NO: 36298 - DNA, 409 bp, Homo sapiens
tttggcaggaatgcgtcgacttttttttttacatctggtagaattcagctctgaatccatctggtcctgagctttttttggttgatagtctttatatgatgattcagttttggaactcattattagtctgttctgggattcaatttcttcctggttcagtcttggaaggttataggagtccaggaatttattaatttcttctagattttctagtttgcgtgcatagagatgttcatagtagtctctagggagtatttgtctttctatgggatcagtggtaacatcccctttgtcatttctacttatgtttatttggatcttctctattttttctccattggcattgatgctatctttctggcattttgttggaattagaagtcgacgtgtattttaaatttttattgta

SEQ ID NO: 36299 - DNA, 519 bp, Homo sapiens
atttctgtgaagacgtcgacctgtcctcagtggcatactgggatgctttgtctcacctagaagatgcagcttgtgtcacaaagccaagtcacatgttcctgggattgtcagtgtatttcccaagaaaaaacaagagtagtgatctcttggaatgaaaacaagatagatgattaaggaaattaggaatgtgttcaaaagtaaggattttgaggaattctactaattgctcattttaaagactaaattggccttcatcctaccagaaagattcttaaggttgggcacagtggctcatacctgaggcaggtggatcgctagagttcaggagttggagaccagcctgggcaatatggcgaaaccccatctctagggcatggtggcatgtgctgtggtcccagctacctgggaggctgaaatgggaggatcgcttgagcctaagaggtagaggtttgggctgagatcatgccactgcactctagcctgggcaacagagtgagatctggtctcaaaaaaaaaaaa

SEQ ID NO: 36300 - DNA, 266 bp, Homo sapiens
ttccccagccatgctgaactgtagtcaatttaacctctttcctttataaattacccagttttgggtagttctttatagcagtgtgaaaacgaactaatacagccctatactctgatatcatttcaataattttattctctgccctaagtaaccaattggtttctcctgcctataattaagtactttaataatatattaagtgttacaagatatgcttaaaaataaataaatataacattgaatatatttgttatctatgctactgc

SEQ ID NO: 36301 - DNA, 238 bp, Homo sapiens
aaacctaaacaacctaggaaaagaaaggaactgtctcaataaggacaaagagcacctacaaaaagcctactaacattatacttaatgatgatagactaaatgctttctcatcatcaggaacaagacattccagtacattcacattgtactggaagttctgtccagtacaatcaggcaagaaaaataacactcatccaaattggacatgaagcaaaaatgcatgtgttcacagacacgt

SEQ ID NO: 36302 - DNA, 289 bp, Homo sapiens
ctaatgggctattgtggttaggttccagaaccttcagactttctctagggataattcactgatgaaaacaagcactgccagccccaagcttaccctaacctttgcagggacgtggggcagaagtacaaagggatgcccacataccatctgtataaatatttaaaagttattcctcaagctaacaaaccattaaatagcatgtcctcgctaaatacaacttcatcctgacacagagagcaggttccaactgagaattccctgtcccatctgcagcctgccccccaactcc

SEQ ID NO: 36303 - DNA, 542 bp, Homo sapiens
gtatatagttagttgaattcaataagcacatttttgtttcaatattattaataacaggctatttcagttttgtattaaactttaaatttagttatttcttcaagattttggcaagttggatactacaggtaaggactaactagttgaccaagaaatggaaaatcatttggaaattgtattatgacccttgaaacataacttataatctgtaataatatgaatgccaatttaagatttttaaaagttttttgttttggaaatcctttttcaagttgtaaacagaggctatttatataagaatatgaattgtgtccttaataaacaatatttctgagatgcatattatattttggaccaacacttaatttctcaatagcttgataacatttctttacagaaaatgaagcacttaaaaataaataggctgggcatggtggctcatgcctgtataaccccagtaccttgggaggctgaggcaggcagatcacctgaggttgggagtcgagaccaagcctgggcaacatggtgaaacccgtctctac

SEQ ID NO: 36304 - DNA, 283 bp, Homo sapiens
cccacagcccgagtggctgccacgtgatggctgatagagcagaggacttcagaaaagcagatggccctttggtcctacctttagggtagaagaactgatgtgccatttgcgggagcgagtgaggttggtggctggagaaccggtgcctggcacaccgtggcagagttgactggttgctctttgagccagcttggccttgctcggcctgcacaagcctcagtgcaacaactgtgctatgaatggagccacagagaggaaacaagcagcaagatcaggagcaggg

SEQ ID NO: 36305 - DNA, 454 bp, Homo sapiens
cattttcatgctgataagactgagataaagcaaaatggatggcttatgcaatcccagttgcatattgccactttttgaattaccaagagacatttgattaaatagcatcacacagtcacagtggtcattcttacaacagcagctgtactcacatctgggtgtagtggcattctcaaaaggcattctgaccttggtatcatgtctgacctctcctttgagacttctctgctagcccctgtggatctcccctcttgtgctgctttcaggcatgcccagaatagagctgaaatggagtcctgccataaatcaaaatctgtgaatggatactataaaattcctaatttatatgctatgtggtgtgtgttcctttgagatacttaaagatatgcaaatagagtaaccagaaaggactgatgtaaaagtactattttgctaagaaaagaagcaacagaaa

SEQ ID NO: 36306 - DNA, 362 bp, Homo sapiens
cacttaattagctacaacccgggactgttgccatttgaacaagttgttaagaaaatctgccatgttttgctcttttttaaaaggaatgactttaataaccatagcaacacttactcagttttgtgatccactccaagattatgggagcaagaacagatactcctgaaagcaaccctcacctcctcccccgccccctgccctcagcaagtcctggcctgtgtgaactgaagggtttggaagctctggtttctaggagtgcccagaagctagaaagactagggtgtactagttattgaggggcagttgtcagtggcagtgtgggggcaccccagttgttattcgaggcactgcattgctttttt

SEQ ID NO: 36307 - DNA, 564 bp, Homo sapiens
cagatgtacagaatgaggactggcagggattttagaccttccagttcagcccctactgatgaagtcactgaggtccagagagtgggaggagtttgtcccaggccatggggtgggtgtcaggtcacagcttgagcccagatgtcctgactcctgggctctgagctcttgttcttattttgtccagaatgtctctctggccccctcttttcctccagatgtcattctgttctctcagatttctctcgtcatactctttgactgggtcattttctgcatctccttttgcccgtttctcttctccttcctctcctcacgcccctgccatgtgtgaatgcctactgtgtggaacagaggcacacagctgaggatgtggtggggctgaaatccattgtgtttgcccggaggggtgccttttcctaatgcacccagagaagtggccctcagagcagaagcctggccctcaatgactcagagcactcagattgcagctctccctggggtgggataaggtcaagggaagggagagaaaatggtgtcagcttgaaactagtataggaaatgtta

SEQ ID NO: 36308 - DNA, 3224 bp, Homo sapiens
  misc_feature (1910)..(1910): n is a, c, g, or t
  misc_feature (2010)..(2010): n is a, c, g, or t
aaatccttattttcctgaaaggagtaaagccaaaggaaactttttttacatttaaaaaaaaaggtttttttcaaatgtaaaatttgaaaaaattgtggccgtaaaatacagccacaggcacgtatctcgttttctgagtgactgcatcccacctttcaactgcttaagctttattatcattactagttttggaaaatttaaatttgcttgtaatgtaactgctacagttacctgttagtttatttctcatcttatattctaaacatacagtatgtctcatactgcaaaacaaaggaatctgaagaagaggaaaactaaaaagctcagaaactgttatgaagttttgctgccacgttgtatgaggaatttgatttgcaagtttttaaactaacacacttaaaagctctttattcttcacatatatatacataggtttccatagttggaatctcatatataagttattatgtatccattttttatatataacataagcattttttgagtcactgagtaacgcagttgtccttctgctaactcctggctgaagttactaatgggctgggattttcatttattcttctagtaattcaacaaatacttgttcagagcctgtcgagtgtcaagcattgtttcagtcactgttcatgtgcaaagagtagagcaggggacaagtcaggccaactcccagctctcatggaggtataatagagactgagggaagatgttaaacaagtaaacataagcaagaaaatttcaggtagcaacaagtgctgtggagataacacatggatatggatcaacaggtactcttacatactactggtgacatataaattattaagtaaaatgaaaagcaaatatatcctatgaccctgaagttttaccctatttcatgtacatataagccagatgcacctaaaagaacattcatagcagtgttattttcaatagttcaaaactggaaacaacaaaatgtccatcaacagtagaatggctcaatactttgtagtatagtcatacaatacagcaacaaaagccagtgtactacactcaatgtgaatgactcgtaaaaacatattgttgagggaaggaaagcagacacagaagaataccttctatgtatgtaaaatccaaaactaaggtatgtagtttaggactatgtgcgtagtaaaattacttttaaaaaacaaaaaacaggccaggcacagtggcttatgcctgtaatcccagcactttgggaggccaaggtgggtggatcacctgaggttgggagttcgagaccagcctgaccaacgtggagaaaccaaatctctactaaaacattagccaggcatggtggcgcatgcctgtaatcccagctacttgagaggctaagggaggagaatcacttgaacccaggaggcggaggttgcaatgagccgagatgatgccattgcgccctagcctgggcaacaagagcaagaaaaaaaaaaagacaaagaagcaactaccataaaatcagaataggactccctgtgggggcgagagggaggaagttgtgattagaaagggaagtatgggggaggtgcttctggagttctggtaattttttatttcttgaccttcatggtggttatgtaggtatttataataattcactaaactgcacatttatgttttagacactttcatttgtgttttatatttcaaacaaaagcagtgtgatgatagcattaagtatagttttagtgcatgtgcgcgcacatgagtgtatgtgtatattttacagctttattgaggtatgattgacatacaataaactatgcatttaaagtactcagcttggccgggcatggtggctcatgcctgtaatcccagcattttgggaggccaaggtgggtggatctcctcaggtcaggagtttgagnccagcctgaccaatatagtgaaaccgcatctctactaaaaatacaaaattagctaggtgtggtggcgcatgcctgtaatcccagctacttgggaggctgnagcaggagaatcgcttgaacccaggaggcagaggttgcagtgagctgagattgcaccattgcactccagcctgggcaacaagagtgaaactcctttctaaataaataaataaataaaataaagtattcaacttgaacacttatggcatatgtattaacccatgaagccatcaccacaatcaagacagtgaatgtgtccaccacccctaagtttcctcaatgtccctttttcatctttccctcctgcctgctccttcttatcccctcacccccgggcaaccactgatctgttttctgtcactacagctgtacatagattagcttgtatattctagaatttaatagaaatagaatcacataatgtatattcttaattttgtctggtttctttcactcagcataacttttcgagattcatccatggtgatgcttgtatctgtgattcattcctttttattgctgagttgttgtctcttgtgtgcatttgccacaatttgtttatccattcacctgttgatgaatattttggtagttttcagtttctggctattacaaataaagttgctgtaaatattcacatacaaatccatttataaacatatgatttcttttctcttggttgaatacttgggaataaaatggctggatcatatgatagatacatgtttaactactttaaaaatataagtatagttttgtaaccctgtatcttcagttaatatgaaaatattttcaagtcaataaatacattcctataaaattattttttaactgttatagtagtccatcaattaaacatgccataatgtatttaaccaattctttgttgatggacatttagattacttccagttttttcactattataaacagcattaccatgaatatccttgaaactaaatctttgaacatgttcttaattatttctttaagataaattactagaaatgagattgcctggccaaagttttattacagatttccctccagacatatgacagattaaatcatcaatcagatttttttatttgagtactagatttagatacagttagccaaaataccccttttttccagactgggcaacatggcgaaatcccacatctacaaaaaatacaaaaaatacgccaggcatgttggcattgagactgcagtggccatagtcacatcactgcactctagcctgggtggcagagggagaccccatctcgaaaa

SEQ ID NO: 36309 - DNA, 3269 bp, Homo sapiens
  misc_feature (1910)..(1910): n is a, c, g, or t
  misc_feature (2010)..(2010): n is a, c, g, or t
aaatccttattttcctgaaaggagtaaagccaaaggaaactttttttacatttaaaaaaaaaggtttttttcaaatgtaaaatttgaaaaaattgtggccgtaaaatacagccacaggcacgtatctcgttttctgagtgactgcatcccacctttcaactgcttaagctttattatcattactagttttggaaaatttaaatttgcttgtaatgtaactgctacagttacctgttagtttatttctcatcttatattctaaacatacagtatgtctcatactgcaaaacaaaggaatctgaagaagaggaaaactaaaaagctcagaaactgttatgaagttttgctgccacgttgtatgaggaatttgatttgcaagtttttaaactaacacacttaaaagctctttattcttcacatatatatacataggtttccatagttggaatctcatatataagttattatgtatccattttttatatataacataagcattttttgagtcactgagtaacgcagttgtccttctgctaactcctggctgaagttactaatgggctgggattttcatttattcttctagtaattcaacaaatacttgttcagagcctgtcgagtgtcaagcattgtttcagtcactgttcatgtgcaaagagtagagcaggggacaagtcaggccaactcccagctctcatggaggtataatagagactgagggaagatgttaaacaagtaaacataagcaagaaaatttcaggtagcaacaagtgctgtggagataacacatggatatggatcaacaggtactcttacatactactggtgacatataaattattaagtaaaatgaaaagcaaatatatcctatgaccctgaagttttaccctatttcatgtacatataagccagatgcacctaaaagaacattcatagcagtgttattttcaatagttcaaaactggaaacaacaaaatgtccatcaacagtagaatggctcaatactttgtagtatagtcatacaatacagcaacaaaagccagtgtactacactcaatgtgaatgactcgtaaaaacatattgttgagggaaggaaagcagacacagaagaataccttctatgtatgtaaaatccaaaactaaggtatgtagtttaggactatgtgcgtagtaaaattacttttaaaaaacaaaaaacaggccaggcacagtggcttatgcctgtaatcccagcactttgggaggccaaggtgggtggatcacctgaggttgggagttcgagaccagcctgaccaacgtggagaaaccaaatctctactaaaacattagccaggcatggtggcgcatgcctgtaatcccagctacttgagaggctaagggaggagaatcacttgaacccaggaggcggaggttgcaatgagccgagatgatgccattgcgccctagcctgggcaacaagagcaagaaaaaaaaaaagacaaagaagcaactaccataaaatcagaataggactccctgtgggggcgagagggaggaagttgtgattagaaagggaagtatgggggaggtgcttctggagttctggtaattttttatttcttgaccttcatggtggttatgtaggtatttataataattcactaaactgcacatttatgttttagacactttcatttgtgttttatatttcaaacaaaagcagtgtgatgatagcattaagtatagttttagtgcatgtgcgcgcacatgagtgtatgtgtatattttacagctttattgaggtatgattgacatacaataaactatgcatttaaagtactcagcttggccgggcatggtggctcatgcctgtaatcccagcattttgggaggccaaggtgggtggatctcctcaggtcaggagtttgagnccagcctgaccaatatagtgaaaccgcatctctactaaaaatacaaaattagctaggtgtggtggcgcatgcctgtaatcccagctacttgggaggctgnagcaggagaatcgcttgaacccaggaggcagaggttgcagtgagctgagattgcaccattgcactccagcctgggcaacaagagtgaaactcctttctaaataaataaataaataaaataaagtattcaacttgaacacttatggcatatgtattaacccatgaagccatcaccacaatcaagacagtgaatgtgtccaccacccctaagtttcctcaatgtccctttttcatctttccctcctgcctgctccttcttatcccctcacccccgggcaaccactgatctgttttctgtcactacagctgtacatagattagcttgtatattctagaatttaatagaaatagaatcacataatgtatattcttaattttgtctggtttctttcactcagcataacttttcgagattcatccatggtgatgcttgtatctgtgattcattcctttttattgctgagttgttgtctcttgtgtgcatttgccacaatttgtttatccattcacctgttgatgaatattttggtagttttcagtttctggctattacaaataaagttgctgtaaatattcacatacaaatccatttataaacatatgatttcttttctcttggttgaatacttgggaataaaatggctggatcatatgatagatacatgtttaactactttaaaaatataagtatagttttgtaaccctgtatcttcagttaatatgaaaatattttcaagtcaataaatacattcctataaaattattttttaactgttatagtagtccatcaattaaacatgccataatgtatttaaccaattctttgttgatggacatttagattacttccagttttttcactattataaacagcattaccatgaatatccttgaaactaaatctttgaacatgttcttaattatttctttaagataaattactagaaatgagattgcctggccaaagttttattacagatttcctccagcctgggtgacagtgcgagactctgtctcaaaaaaaaagaaaaagaaaaacctccttttttgtcatgaagatggtttttttactttttttctatttatagatgaaaataagtctgcagtctcaaaaatggagtattccatttttatcatatagtaaatgaaatttctctttctaaatcaaatgcagctggaaaaagaattacccttggaattagggaatctgtaatgttaaaaaataagttgtttaaggatgagcttgcagtcaaaaaaaga

SEQ ID NO: 36310 - DNA, 369 bp, Homo sapiens
tcaccttggctgcctatttccagattcctctttgcataaggcccataaactcattaatgatttaagccactattgtgttttgtattacttgcagccaaacgtgcaaaattactttgcttgctgtaatattcactagttgtgcatcctgggcatgtggcaactgttgggcctcactttacacatctacaaaatggtaaggtaggccgagcatggtggcttccgcctgtaatcacagcactttgggaggccaaggcgggaggatcacttgagcacaggtgtttgaggctgcagcgagctaggatcatgccactgcactccagcctgggtgagagagcaagaccctgtctccaaaaaaaaaaaaaagacaaa

SEQ ID NO: 36311 - DNA, 477 bp, Homo sapiens
gtgcctgcagagggcagggaaagagtggagggctcacaggtagcagctgggtatgtgccttcacagccacagttccttaacctttctctcaacagcaaactgttaccttccttcctaaggtggctttgagggttacaaaaagattaagtccccttgaaagcctatgtttctaaatggaaaaaatatatagcttacaatacagtggatccctgcccccctagccatagtttgtaacccatggtcaactgagaccccaaaatacgtgagtacagtataagatattctgaggtgacagaagcccccattcgtacgttttcttaatgaaatcagcaataagcccttccagtacaaaaactgggcggactaaacttccagtcatggagccttccttgttctttatcgcaactcttccctcttcccagttgtcccaacagtaactcaaaggatagaacagcaaggtcttttaaaaaaaaaaaa

SEQ ID NO: 36312 - DNA, 394 bp, Homo sapiens
agtatctaaaaattttagtttgttaatatcatctgtttatgaactattttctttttaaataatgacaaaatccaagctaaacttgaagactgttctccatatggatagagatgtgctcaaggagtacaaataatataatttttatcacaaaggagattaatgtattgctgctgaaaacattaatgccagaatccagtggcatttagcttacctgctaatttgaaatatttgttacttctttgcccctgcctaaaatttgtatgcctatattaaagttttgtcttttgaaaattgaatgttaagaattttggcttggcgtgctggctcatgcttttaatctcagcatttctggaggccaaggtgggaggactgcctgagcccaggagttcaagac

SEQ ID NO: 36313 - DNA, 3258 bp, Homo sapiens
agctccgcgccccctgctcgtcccctttcacttccaggcgccttcggcttggggtgcccagaagggcaagtccagcagacgccagggctgcaggttcaagatgctccgcctcctcctgccacttagagccacaaacgctagcgggaacctttccactcagtcttagatctgcggtcactgctgaggttttcagaactttccaggcaaaggccagccaggtcctttgcctccaacccactccgcgcctacctcccgcctggggacacccctaggcccaggagatcctactctcccccgagcaccgacgttccaactcgtctgcgcccccgactgctgtccggctcctgtgccaaggggcgcgcgcatcttcccggggccagcaacgctcccaacttctcgactcgccctcctcctccccagagcgagagtggggcgggctgagcccggatccggggtgcactcgagcgttcccagcgctcggcattcaccccgcctcagagccgactttcgaagggggattgagcctcggaggtccaggcgtcttactccaaagctcaagtcggcccccgtcttttctttccacacccctgtgcccgtcgcatgctggccgggtgagcggccgggccgaggattcgggtgcccggggccgcgtcgccccgtcgggtactgagctgagcgcaccatggccggctgctgctgcctgtccgcggaggagaaggagtcgcagcgcatcagcgcggagatcgagcgacagcttcgtcgggacaagaaggacgcgcgccgtgagcttaagctgctgctgctgggaactggtgaaagtgggaaaagcacctttatcaagcagatgagaattatccatgggtctggttacagcgacgaagacagaaaggggttcacgaagctggtttaccaaaacatattcaccgccatgcaagccatgatcagagcgatggacacgctaaggatacagtatgtgtgtgaacagaataaggaaaatgcccagataatcagagaagtggaagtggacaaggtctccatgctctccagggagcaggtggaggccatcaagcagctctggcaagatccaggcatccaggagtgttacgacaggaggagggagtaccagctgtcggactctgccaaatattacctgactgacattgaccgcatcgccacaccatcattcgtgcctacccaacaagatgtgcttcgcgtccgagtgcccaccaccggcatcattgagtatccatttgacttggaaaacatcatctttcggatggtggatgttggtggccaacgatcggaaagacggaagtggattcactgctttgagagtgtcacctccattattttcttggttgctctgagtgaatatgaccaggtcctggctgagtgtgacaacgagaatcgcatggaagagagcaaagccttatttaaaaccatcatcacctacccctggtttctgaattcgtctgtgattttattcttgaacaagaaggatcttttggaagagaaaatcatgtactctcatctaattagctatttcccagaatacacaggaccgaaacaggatgtcagagctgccagagactttatcctgaagctttaccaagatcagaatcctgacaaagagaaagtcatctactctcacttcacatgtgctacagatacagacaatattcgctttgtgtttgctgctgtcaaagacacaattctacagctaaacctaagggaattcaaccttgtctaaaagctgctgcccactcctcccctataacagaagatgtgatttgcaaactccttgttttatttgcaagtgcttctgacatcaccagagccagtcccatgccaggaactaaggatgtcatgtagatcgtggggacagagatgggtgatggaacttggaagatatttgagtttaccaacatactttaaaagtccttacatcccaaattgtgtttataattattttcttgacttttggctataagattttgtgtaatttttgaatttggtgttttctagaatttttaaaagccactttgatttagttttaaatatgtttaaaaatagcgattaaaattatgtaagcaaggagcctgttagtttatagatcatgccttcaaacctctagagttaatttgggtgacttttttaaaaataagaatgttaatgggtttgaagctttttattaaaccttgtaatttagagacatttttaattgtgtttctcacctcatgctgaagggtgactcctttaacatgccaccaaagattttttttaaacacttggttctttttgtgtgttaactttctaagccaaattaatggatatataagtatatctaatttagctttgccacagtttgatcaccaagaagccaaagctgacatagagtaaatgggctctagatagcatatatgttttattggtgaaaaatgtgtgtgtgtgcgcgtgtgtgtgtgtgtacatttttacccccaatgtatatgaccagatcttaaaaatgtatgaaatggctagaagtccacattgtttgacaaatgttacgtaaccctgccaaagttctgatggccaccacagatttgctgtttgaattatgtatgctgtgcctttctgaggaggctaagaatataccattctgctattagcactgggttatgttgtgtttcttagagctcatggttgactgatggttctgctcctaaacagaaaaatgctgtggccttaatagtaactcggaaactttcctaagattcctcctttcaaggcaagtctgcgcatcatcgtgtcatgctgcagttccctcagtagctggctgggtcaagcagaaggagaatcctctgggaattaagagtgctccacactaaaggccaagatggttttgtgcatgtgtgcacacatgtgtgtgcacacacacatacaccatttggggacgtaaggtatgaaatatctgtctcaaatcagtctataaaatgcacctcggttggctacatatgttatggaaccatgtgtccccattctgtgggaacaattccaattgctgaaaaagactgaaattattctgatatgcagcaattctacaatagcaacatctagctttaaaaatatgaatcctcactcaagagataaatgcaatagcaacagcttttgtggaagttcacaaattgatgttaaaatttatctagaacagtaaagtccagaaatagccgagacagttttgcgtgagaacagagagaggggaatggagctctttag

SEQ ID NO: 36314 - DNA, 2351 bp, Homo sapiens
ggagtgctctgcagatgtcccagaaggcgcatggaagtccttctgacccatattgtcttcaaaacagtcgtaggaaggatggagaagcctggcctggcactggctctcaggaaagtcattgatggaattcgtgtgtctgtgtggggctcactgtgagtggggggtgacttcctttgagtaggatggacatttccccctgctctaaaaggagagtcagttcctcgttctctaatatacagttacctgactgacattgaccgcatcgccacaccatcattcgtgcctacccaacaagatgtgcttcgcgtccgagtgcccaccaccggcatcattgagtatccatttgacttggaaaacatcatctttcggatggtggatgttggtggccaacgatcggaaagacggaagtggattcactgctttgagagtgtcacctccattattttcttggttgctctgagtgaatatgaccaggtcctggctgagtgtgacaacgagaatcgcatggaagagagcaaagccttatttaaaaccatcatcacctacccctggtttctgaattcgtctgtgattttattcttgaacaagaaggatcttttggaagagaaaatcatgtactctcatctaattagctatttcccagaatacacaggaccgaaacaggatgtcagagctgccagagactttatcctgaagctttaccaagatcagaatcctgacaaagagaaagtcatctactctcacttcacatgtgctacagatacagacaatattcgctttgtgtttgctgctgtcaaagacacaattctacagctaaacctaagggaattcaaccttgtctaaaagctgctgcccactcctcccctataacagaagatgtgatttgcaaactccttgttttatttgcaagtgcttctgacatcaccagagccagtcccatgccaggaactaaggatgtcatgtagatcgtggggacagagatgggtgatggaacttggaagatatttgagtttaccaacatactttaaaagtccttacatcccaaattgtgtttataattattttcttgacttttggctataagattttgtgtaatttttgaatttggtgttttctagaatttttaaaagccactttgatttagttttaaatatgtttaaaaatagcgattaaaattatgtaagcaaggagcctgttagtttatagatcatgccttcaaacctctagagttaatttgggtgacttttttaaaaataagaatgttaatgggtttgaagctttttattaaaccttgtaatttagagacatttttaattgtgtttctcacctcatgctgaagggtgactcctttaacatgccaccaaagattttttttaaacacttggttctttttgtgtgttaactttctaagccaaattaatggatatataagtatatctaatttagctttgccacagtttgatcaccaagaagccaaagctgacatagagtaaatgggctctagatagcatatatgttttattggtgaaaaatgtgtgtgtgtgcgcgtgtgtgtgtgtgtacatttttacccccaatgtatatgaccagatcttaaaaatgtatgaaatggctagaagtccacattgtttgacaaatgttacgtaaccctgccaaagttctgatggccaccacagatttgctgtttgaattatgtatgctgtgcctttctgaggaggctaagaatataccattctgctattagcactgggttatgttgtgtttcttagagctcatggttgactgatggttctgctcctaaacagaaaaatgctgtggccttaatagtaactcggaaactttcctaagattcctcctttcaaggcaagtctgcgcatcatcgtgtcatgctgcagttccctcagtagctggctgggtcaagcagaaggagaatcctctgggaattaagagtgctccacactaaaggccaagatggttttgtgcatgtgtgcacacatgtgtgtgcacacacacatacaccatttggggacgtaaggtatgaaatatctgtctcaaatcagtctataaaatgcacctcggttggctacatatgttatggaaccatgtgtccccattctgtgggaacaattccaattgctgaaaaagactgaaattattctgatatgcagcaattctacaatagcaacatctagctttaaaaatatgaatcctcactcaagagataaatgcaatagcaacagcttttgtggaagttcacaaattgatgttaaaatttatctagaacagtaaagtccagaaatagccgagacagttttgcgtgagaacagagagaggggaatggagctctttag

SEQ ID NO: 36315 - DNA, 299 bp, Homo sapiens
ggcaaacagaagcaggaggcctgtagcctggggccccacatgctcaccagcttcagcagacagtggcccagagactgcggcggggcaagggaagagatggatggactggcaatgcgccatgttgtttccaaaatatttcctttctacttcatcccaagtcccttgtttttcacttagaatcgcatggaagagagcaaagccttatttaaaaccatcatcacctacccctggtttctgaattcgtctgtgattttattcttgaacaagaaggatcttttggaagagaaaatcatgtactc

SEQ ID NO: 36316 - DNA, 229 bp, Homo sapiens
gaggaatgagggcaagcagggcttcctctggcccttcccacagtagttggcagcagttaggctaggatgtgtgggctcctcagagccttttgtttggtttctatggctctaacctcaattagctgctctgcatggagaggagggacaatgcagcttttaacccaagtccaacggcttcaacataggtctctttttcctctccctctatccatggctggatttaggcctg

SEQ ID NO: 36317 - DNA, 451 bp, Homo sapiens
aattctctggattaccaggcagagactgttgttctctgttcatcctttccctcacacaaatggagtctctctctctgtctctgttatgaattacttggactggggggtggaatgacacaagcacccctgtgtccaccttcactagtactgcactgagtcacacctgaagccagcatagcactgggttttgcttaaggcctgttgtaaccactccctggctactgcctatgtttgttttaaggccctgggtctctacaatcagccagtagtgaagccagccaggcctgtgtctttcctttcagggctagaagttctcccaggcggctccagcagtgctttgcaagagccaggggctagaataaaaaatcttagcagtctacctagtcttctattgtactatggctaagctgacactcaaataaaaggttaatttttaagtttggtacttaaa

SEQ ID NO: 36318 - DNA, 187 bp, Homo sapiens
taagctagctttatttttttctgattccagaattcattaaccaaagagtcaatgataattcaatgtatatcaaaagatgaaacactgactggttaataaagataatttggaaacacattattaatatagtttaatatgtatttgaatatttgtattatatttgaatagtttaatgtgaattgaatat

SEQ ID NO: 36319 - DNA, 879 bp, Homo sapiens
tttcaatttgatgattagatatatgtatatgttgtgagatgatttctgcacccaagttagttaccattctgtcacctcactcagttaacatatttttgtgtgtgtggtatgaacatttaaggactactttcttagcacatttcaagggtacagtacaatattgttaagtatagtcaccatactgtacatttgatctccagaatttattcatcttatatctaaaagtgtgtgccctttgaccgacatctcccaatttccctcacacccagcccctagtaatcaccgttctacactgtttctctgagttccattattttagattccaaatataagtgagatcatacctcatttgtctttccctgtctgacatctctcaccttgcataatgccctcgagactcatccatgttgtcacaaatggcaggatttcattcttgtttatggctgattaatatcccattttgtatatatagccaaaacatggaaacaatctaaatgtctgttgacagatgaatggataagtaattgtaacaattactgtcaacagacacaggttgtttccttgtcttggctattgtgaataatgctgcaataaacatgggaatgcagatatccctttgagctactgattttgtccaataaatatatacccagaagtgggattgctggataatatggtggttctattttcattttttttaggaagctccgtactgttttccttaatggttgtgccagtttatgttccaatcaaccatgcacaagaattccattttattcagattttgccaaaaatagttatatcttgtctttttaataaaaaccatcctgacaggtgtgaggcaatagctcattatggttttgatttgcattttcctga

SEQ ID NO: 36320 - DNA, 496 bp, Homo sapiens
caccaaaatgctcattcgatgagatggaaatttcttcttaaatgtctatttctcattttgcagcaaaggcatgattatacttctataaatttttgccttacatagtcagatagaagcatgcaaagtaggcagagcctaggcatctacctgaaagaaatgccctcctgcattttcttgaacatattaactcttcctgagctccagtggcactatctctggagtccttttccggcagataattttaaagcaggcgtcacttgttattttctctctcaaattgccgtgttctttgtcttcacagtacttttgaaaatacttaaatatacatgtgtttcttatgaaactcgtttgcctcactggactttaagatctgtgaggccaattccatgcctgttttattttctactttattgcccctgttccccaggcacaaagcaataagtgcctgacatacatttggctctcaataaatacttgtcatatttgagtgcttgtt

SEQ ID NO: 36321 - DNA, 701 bp, Homo sapiens
gggagtagatctccaaggcttttaaagcatgccacggaggtagacattacctgtagaccaacacttcttaaattttaatgctcatatgactcatttggggaccatgttaaaatatagatgctagctgggcacagtcgcttgcacctgtagtcccagctactcaggaggctggtcgctccctctgcctagatctgctggggcaggtgaagcttggcttttaaattgagagttgaacgataaataagagttcaaaagggcaggtaaagagaattaattctaggctaagaaccacctgtgcaaaggcactagggtagcgagtacagtgccttcaggtgttagatactttactatcattgggtcggaaagaggcagttaccaaagatgaggctggaaaaataggtagggagtagatctccaaggccttttaaagcatgccacggaggtagacattacctgtagaccaacacttcttaaattttaatgctcatatgactcatttggggaccatgttaaaatatagatgctagctgggcacagtcgcttgcacctgtagtcccagctactcaggaggctgaggcaggaggagtgcttgagcccaggagttcaaggctgtattacactatgatcatgcctgtgaatagccactgcactccagcctgggcagcatagataggtctcaggtggggcctgagcgtcagctt

SEQ ID NO: 36322 - DNA, 689 bp, Homo sapiens
taaaaaatgggtaaatcaaagatactgacaccaagagctcagagactgcttgggaaaatagagaataaacagaattatggtacaatgtggtaagtaccataataaaggcacatagtcagaactaggaagcaagaggaaggaaggctttataataggctggtcgctccctctgcctagatctgctggggcaggtgaagcttggcttttaaattgagagttgaacgataaataagagttcaaaagggcaggtaaagagaattaattctaggctaagaaccacctgtgcaaaggcactagggtagcgagtacagtgccttcaggtgttagatactttactatcattgggtcggaaagaggcagttaccaaagatgaggctggaaaaataggtagggagtagatctccaaggccttttaaagcatgccacggaggtagacattacctgtagaccaacacttcttaaattttaatgctcatatgactcatttggggaccatgttaaaatatagatgctagctgggcacagtcgcttgcacctgtagtcccagctactcaggaggctgaggcaggaggagtgcttgagcccaggagttcaaggctgtattacactatgatcatgcctgtgaatagccactgcactccagcctgggcagcatagataggtctcaggtggggcctgagcgtcagctt

SEQ ID NO: 36323 - DNA, 1821 bp, Homo sapiens
ggcacgagcatccttacatttccaaggatgcagctgtcccaaagaattcttacccatgggctgaagaatttgcattaatctaaagccaagctctcagggaagctgtgtgcatttaggaaacagcagaggattaatggaacctcctagcctgttgcctcccaacttggccttgttccctgcagcacaaattaaaatcaattgcttgcttaatatgagtctcacccttctccatcttttctctcttagatcgtaccatgaggggttttacttactgttaacttttctctcttagattgcaccatgaggggttttacttactgttaaagaatgcttgtaaagtgtgggttaactgtgctaagaaagtaatctttattcttgggtttggaaaatgaaccacttttgggcagatctttgatgttttcagagatgctagggttagaatttctagatccttattttccaggctaacaattaaattaataagttaaaacattttagtagtttataaacgcataggaaaaggactggatagacactaatgtcaaaagggagacatagaaaagagaatgattgtgttttactctcataggtctataatctttacaatgagaatgtgttttatattaaatagttgtgtaataaaaattcaaacaaattttattctggtcacaagcatgctttctgctctgtcccagacaacaaaaatgacccacattctctctactatgttcacttagctcatcacactctgcctttttaaaaacaccttttgatagaaaactttttgcaaatttaattttttaaaaataacctgctgactcactggtttgtaatggaggacagagtcctttctagatcctcgaatttcgtgcctgtctcccaaggcacatcccccacatcccgtcacagtgctgcaggattagggaggattgcttccagctgaaagagatgggaggccataaaggctctttcttctggatgacgttggaaaggaagaaacatggagttagaaatgcttatgtctccacacgtagcctcttcctgggcaaccctggacagtctctgtctgccaaggtgatcattgtacttgcaaatttacctaacctgttgactgcctgtgttacatttactattgaaccagctagagttcaaaattaacttttgatcactgactttcagtttgaaccaaaaaaataaaaagaggaaagagccacgtaaaaggaaatacagcttgatttcatttttttcttgttttatttgatgaactaaattgtccattcttcaggggctcagaatagatatttccttttgttttgtatcaaatattaaagagagtttgaccttctttgcaggtcagaaaattaattagttaactctggatattgaatatgccacaaagtagactaaaatacttcagatcatttctagaatgaggcaaggcctaaagaaataaatcctctaaatcgagtgaggttggccagagatacctagcattttatggttggctgaagatacccagcattttattaactctttatgacttctttatcacgagatttgagtcacctgctactaagacacataaatagattgtttggtcaacacacaacatgtggattaaagtataactttcagaggcagagaatccaaggggtaaaaataccacatttgctcagtattctaccccagtgcggtggccaaggtggccctgtacctggattggtcttatttctgtttcctagtgttgggggtaactctggactgcattatgctggtgggcctatagtttgtcttcaagttttttaaaaatctcagtcccta

SEQ ID NO: 36324 - DNA, 576 bp, Homo sapiens
ttgcaagtacccacctgcaagtacccacctgcaagtacccacctgctaattggatatttccttttgttttgtatcaaatattaaagagagtttgaccttctttgcaggtcagaaaattaattagttaactctggatattgaatatgccacaaagtagactaaaatacttcagatcatttctagaatgaggcaaggcctaaagaaataaatcctctaaatcgagtgaggttggccagagatacctagcattttatggttggctgaagatacccagcattttattaactctttatgacttctttatcacgagatttgagtcacctgctactaagacacataaatagattgtttggtcaacacacaacatgtggattaaagtataactttcagaggcagagaatccaaggggtaaaaataccacatttgctcagtattctaccccagtgcggtggccaaggtggccctgtacctggattggtcttatttctgtttcctagtgttgggggtaactctggactgcattatgctggtgggcctatagtttgtcttcaagttttttaaaaatctcagtcccta

SEQ ID NO: 36325 - DNA, 888 bp, Homo sapiens
  misc_feature (773)..(773): n is a, c, g, or t
  misc_feature (776)..(776): n is a, c, g, or t
  misc_feature (780)..(781): n is a, c, g, or t
  misc_feature (783)..(783): n is a, c, g, or t
  misc_feature (795)..(795): n is a, c, g, or t
  misc_feature (799)..(799): n is a, c, g, or t
  misc_feature (802)..(803): n is a, c, g, or t
  misc_feature (811)..(811): n is a, c, g, or t
  misc_feature (822)..(822): n is a, c, g, or t
  misc_feature (826)..(826): n is a, c, g, or t
cccgtgcaatccctgcttaagagaccccgcagtggggcgctcgtccgaagccaggccgcgtccgccatagtgcctggcttggaggtgtcgccgccgctcggtgagagcccccgagcggcagggggccaacacaaaaagggagccggagaagccctagccgctgcccagcagcttgcgggcgtgttctcgcggttccgggcctcaaggcgacggaaacgaaaggcgagcgaagcgcggaggatccggcgagaagaagcgtcagggagcctcggcggtgtccccggggtccgccgaagccacccggccgccggctggggcccggggtggtgaggaagtgctccgaggcctcgccgaggcctagcgccggctttgtgtccgaggcggcggcggcggcggggggaggcggagccgggggcggcctgcgggaaggcctctcctccgccgaccgcgcgttttcggcctaggccgtggggccgctcgtggcctccggggagcaggcgccaggggtttgtgtgcggtgggggcctgggcctgggcctggggaagctgacgccggtcgtccggaagccaggaggaggcgtgaggccgctcgtggactccgggcctaggccctctcccctcaaccttctcccggggcctgggtcaccccaatccacggagagagagacccgccgggaggtgcggccgcgctatggacccctgaccccgtggggtcgctcggactcttaacgtgtggactgaccgtatggtgccgcaatccccgtttgcggccnttnttgnngngggcccccgggnttgnccnnggggtctngttccctccgntgtnctctccagagttggtcgcgccttttgcgcacccgggggggtaaccgccgcgccgtgtgcaag

SEQ ID NO: 36326 - DNA, 1690 bp, Homo sapiens
tagagatggggtttcaccgtgttagccaggatggtcttaatctcctgacctcgtgatccgcccccctcagcctcccaaaatgctggtattacaggcgtgaaccaccgcgcctggccagtagtctttttttctttaacaaaaagcaaataatcactttgcttaaaatccttcagtgtcttcctgttgcacttcaaaacaaaatataaatcagtgtatggtctatacctttctgtcattcttttcttttattttcttaggctcttcaagccgtttcgtatcatttttctacatgctttttttatcctttgcctgaaatagtcctcaaccagtttttttcctgtatctggctgggttctcagtctttaagtatccagtagaagttcctccaaggggctttcttggaatcaacattctatctgaagttgtattccactattcattccttattagaaaaccattttctctttattcataacgtcataatttaatttttagtctatcttcctcagtaataatttctgtgaatgcagggattgtaatactcaactaacgtttagggactaggagagacagaatatcttcattccgaataacggctttttcaccattcacatgttcagcatttcagactaaactaaagaatgacggtgttactgagatttggagttccacaaaagtagaagtgctagagccaagaacctgctgatgatattggttgtcctttgaaaagaagccctcttagggctttggatgtttgttctgacaatatcagtaatctagttgcaaggaacttgtagttattatatttaaagtcatttcccatgaaatttatatttgaagttttctaattcttggttacgcactcaaatccccaaatggaaattcaattctgtctttttatttacagaatatactgatgataatgctctgattcctaagaattcttctgtaattgttagaagaattcctattggaggtgttaaatctacaagcaagacatatgttataagtcgaactgaaccagcgatggcaactacaaaagcagtatgtaaaaacacaatctcacactttttctacacattgcttttacctttataatgtagcagtgaagtaaatcattttagaacttaatatccaactgatcatagtacatattgtaaataaaatgtattttgatgacagctcagttgaatatggataatatgtggcatcacttgcacacttattttgtagaaatgggtaatttgtgcccgtaacactgtttcatattaaatatgatagcattatccctgtatgacactgtgttgtacagttaatgtatgatcctttttagatcgtttaggttttacactaaggaacatgatgacatgttctacatttgtctgtctatagttagtattttgtatgtatgtacaggctgttgtgtgctttttgtttcttgcaataaaaaatgtttggagtgtaaaaaaaaaaaccacactaccaaacaaacactttgtggggcgcgcctgggccccttgagagaaagtttttaaaacaccattgcttttgggggcgcgggggccccagtgttgggtttcgtgacacgtgtgctccaggcgtgtccacaaggaaacactctggtcagacacgacgtgctgggattctcccccatataaaagcgcgcgggtgacaccagcgttttttaacc

SEQ ID NO: 36327 - DNA, 1180 bp, Homo sapiens
gtgaaaaatgaaaatagctatcagcctggccctccagatttgaaaattagttttgggagcacagcaatttctcagggattcaaattacaaatgttaacaacagcagtcttcctgatgtgtgaaaatttacgcattcagaaactgggaaattatataatttaaaaattttcagtttattaagaataaactacgtttctaaacataaaatccctatactacctttcagaaaacatttgttttaagtggcagggtacacctatttttgaattccctagtatggaatttttttccaaaccacaaatctatcttaaaactgctcaaaggtggtaaagattaatcagagtaatttattcattcagaaattggctgttaaatatttataccaaaggaaaattaggttcctaaaaatgtattattgaagataatgtgttaaaatttattagcacaaaaattcataaatagctaatgttaatttttgtttttattttgtgttttagaagtcgaactgaaccagcgatggcaactacaaaagcagtatgtaaaaacacaatctcacactttttctacacattgcttttacctttataatgtagcagtgaagtaaatcattttagaacttaatatccaactgatcatagtacatattgtaaataaaatgtattttgatgacagctcagttgaatatggataatatgtggcatcacttgcacacttattttgtagaaatgggtaatttgtgcccgtaacactgtttcatattaaatatgatagcattatccctgtatgacactgtgttgtacagttaatgtatgatcctttttagatcgtttaggttttacactaaggaacatgatgacatgttctacatttgtctgtctatagttagtattttgtatgtatgtacaggctgttgtgtgctttttgtttcttgcaataaaaaatgtttggagtgtaaaaaaaaaaaccacactaccaaacaaacactttgtggggcgcgcctgggccccttgagagaaagtttttaaaacaccattgcttttgggggcgcgggggccccagtgttgggtttcgtgacacgtgtgctccaggcgtgtccacaaggaaacactctggtcagacacgacgtgctgggattctcccccatataaaagcgcgcgggtgacaccagcgttttttaacc

SEQ ID NO: 36328 - DNA, 2038 bp, Homo sapiens
cccgtgcaatccctgcttaagagaccccgcagtggggcgctcgtccgaagccaggccgcgtccgccatagtgcctggcttggaggtgtcgccgccgctcggtgagagcccccgagcggcagggggccaacacaaaaagggagccggagaagccctagccgctgcccagcagcttgcgggcgtgttctcgcggttccgggcctcaaggcgacggaaacgaaaggcgagcgaagcgcggaggatccggcgagaagaagcgtcagggagcctcggcggtgtccccggggtccgccgaagccacccggccgccggctggggcccggggtggtgaggaagtgctccgaggcctcgccgaggcctagcgccggctttgtgtccgaggcggcggcggcggcggggggaggcggagccgggggcggcctgcgggaaggcctctcctccgccgaccgcgcgttttcggcctaggccgtggggccgctcgtggcctccggggagcaggcgccaggggtttgtgtgcggtgggggcctgggcctgggcctggggaagctgacgccggtcgtccggaagccaggaggaggcgtgaggccgctcgtggactccgggcctaggccctctcccctcaaccttctcccggggcctgggtcaccccaatccacggagagagagacccgccgggaggtgcggccgcgctatggacccctgaccccgtggggtcgctcggactcttaacgtgtggactgaccgctactgactgcaccgccaatccccccgtctctgccggccccttagcatgagcgagggggacccagccgggtgacattgtgcccgttggcggattctcgatttcccctcttccccgtcctcgtcctcctcctcccccatgaagtgattctgagtatcggggggtctctggattattgttctgacgaacccctgcttgtggttggggggtatttaatctgaggccttagggtccttcggtgtctttgagtgttttgtgtgtacatattttgctcttaaagtttataaatatacgtatattgagagtgtccacgtctcctcgctgaaccttaggaatcccttggcaccatgtcctgtgtgcattataaattttcctctaaactcaactatgataccgtcacctttgatgggctccacatctccctctgcgacttaaagaagcagattatggggagagagaagctgaaagctgccgactgcgacctgcagatcaccaatgcgcagacgaaagaagaatatactgatgataatgctctgattcctaagaattcttctgtaattgttagaagaattcctattggaggtgttaaatctacaagcaagacatatgttataagtcgaactgaaccagcgatggcaactacaaaagcagtatgtaaaaacacaatctcacactttttctacacattgcttttacctttataatgtagcagtgaagtaaatcattttagaacttaatatccaactgatcatagtacatattgtaaataaaatgtattttgatgacagctcagttgaatatggataatatgtggcatcacttgcacacttattttgtagaaatgggtaatttgtgcccgtaacactgtttcatattaaatatgatagcattatccctgtatgacactgtgttgtacagttaatgtatgatcctttttagatcgtttaggttttacactaaggaacatgatgacatgttctacatttgtctgtctatagttagtattttgtatgtatgtacaggctgttgtgtgctttttgtttcttgcaataaaaaatgtttggagtgtaaaaaaaaaaaccacactaccaaacaaacactttgtggggcgcgcctgggccccttgagagaaagtttttaaaacaccattgcttttgggggcgcgggggccccagtgttgggtttcgtgacacgtgtgctccaggcgtgtccacaaggaaacactctggtcagacacgacgtgctgggattctcccccatataaaagcgcgcgggtgacaccagcgttttttaacc

SEQ ID NO: 36329 - DNA, 1653 bp, Homo sapiens
cccgtgcaatccctgcttaagagaccccgcagtggggcgctcgtccgaagccaggccgcgtccgccatagtgcctggcttggaggtgtcgccgccgctcggtgagagcccccgagcggcagggggccaacacaaaaagggagccggagaagccctagccgctgcccagcagcttgcgggcgtgttctcgcggttccgggcctcaaggcgacggaaacgaaaggcgagcgaagcgcggaggatccggcgagaagaagcgtcagggagcctcggcggtgtccccggggtccgccgaagccacccggccgccggctggggcccggggtggtgaggaagtgctccgaggcctcgccgaggcctagcgccggctttgtgtccgaggcggcggcggcggcggggggaggcggagccgggggcggcctgcgggaaggcctctcctccgccgaccgcgcgttttcggcctaggccgtggggccgctcgtggcctccggggagcaggcgccaggggtttgtgtgcggtgggggcctgggcctgggcctggggaagctgacgccggtcgtccggaagccaggaggaggcgtgaggccgctcgtggactccgggcctaggccctctcccctcaaccttctcccggggcctgggtcaccccaatccacggagagagagacccgccgggaggtgcggccgcgctatggacccctgaccccgtggggtcgctcggactcttaacgtgtggactgaccgctactgactgcaccgccaatccccccgtctctgccggccccttagcatgagcgagggggacccagccgggtgacattgtgcccgttggcggattctcgatttcccctcttccccgtcctcgtcctcctcctcccccatgaagtgattctgagtatcggggggtctctggattattgttctgacgaacccctgcttgtggttggggggtatttaatctgaggccttagggtccttcggtgtctttgagtgttttgtgtgtacatattttgctcttaaagtttataaatatacgtatattgagagtgtccacgtctcctcgctgaaccttaggaatcccttggcaccatgtcctgtgtgcattataaattttcctctaaactcaactatgataccgtcacctttgatgggctccacatctccctctgcgacttaaagaagcagattatggggagagagaagctgaaagctgccgactgcgacctgcagatcaccaatgcgcagacgaaagaaggtaagggccgcttggtcttaagatatttggtggctggagagagatactagctagaaggtgcctggcaggaagctaaccgccattatgtctctagtggggactgttcgttctagtactttggatacaactttcattgatagccaaggtttgcagcagttggccttggagtttcactggtttattttatttctgcatacttgggtcatctgtaacaggctaacccaaaacgtggaagcctgattattcttctcgctgttttttaaaatgagggagggaggagagggggatagctatctagactctttgagtgcttgtcttagggcgttttctaacttattttccatcaggagggcaggagagcctgtgcaaagcttgtttgttcaatcagcaaaaaaaaa

SEQ ID NO: 36330 - DNA, 1278 bp, Homo sapiens
cccgtgcaatccctgcttaagagaccccgcagtggggcgctcgtccgaagccaggccgcgtccgccatagtgcctggcttggaggtgtcgccgccgctcggtgagagcccccgagcggcagggggccaacacaaaaagggagccggagaagccctagccgctgcccagcagcttgcgggcgtgttctcgcggttccgggcctcaaggcgacggaaacgaaaggcgagcgaagcgcggaggatccggcgagaagaagcgtcagggagcctcggcggtgtccccggggtccgccgaagccacccggccgccggctggggcccggggtggtgaggaagtgctccgaggcctcgccgaggcctagcgccggctttgtgtccgaggcggcggcggcggcggggggaggcggagccgggggcggcctgcgggaaggcctctcctccgccgaccgcgcgttttcggcctaggccgtggggccgctcgtggcctccggggagcaggcgccaggggtttgtgtgcggtgggggcctgggcctgggcctggggaagctgacgccggtcgtccggaagccaggaggaggcgtgaggccgctcgtggactccgggcctaggccctctcccctcaaccttctcccggggcctgggtcaccccaatccacggagagagagacccgccgggaggtgcggccgcgctatggacccctgaccccgtggggtcgctcggactcttaacgtgtggactgaccgctactgactgcaccgccaatccccccgtctctgccggccccttagcatgagcgagggggacccagccgggtgacattgtgcccgttggcggattctcgatttcccctcttccccgtcctcgtcctcctcctcccccatgaagtgattctgagtatcggggggtctctggattattgttctgacgaacccctgcttgtggttggggggtatttaatctgaggccttagggtccttcggtgtctttgagtgttttgtgtgtacatattttgctcttaaagtttataaatatacgtatattgagagtgtccacgtctcctcgctgaaccttaggaatcccttggcaccatgtcctgtgtgcattataaattttcctctaaactcaactatgataccgtcacctttgatgggctccacatctccctctgcgacttaaagaagcagattatggggagagagaagctgaaagctgccgactgcgactggagttaccaagggcgcacatgcagattttctgtgggggcgatctgtctccgg

SEQ ID NO: 36331 - DNA, 1832 bp, Homo sapiens
  misc_feature (122)..(122): n is a, c, g, or t
  misc_feature (149)..(150): n is a, c, g, or t
  misc_feature (205)..(205): n is a, c, g, or t
attaaaaagattcgcggcccccaaacctccacgggccccagagcgggaggtgatcccaaaaaaaggagtgtccccaaattcccgggccctcctttccgggacggggaacccagggtcacagnccaccggccagtggccaaattggtttnnacgtcccacatgttggctacccccggccactttggacagatggaggtgcctgaanactgatttcgccctcctccagattcacagacaagaagggtgggctacctggggggccatgcttctattggatgagaggcacgatccccacctgctcattaccaacagcatcaagaatggcctgggcctggggaagctgacgccggtcgtccggaagccaggaggaggcgtgaggccgctcgtggactccgggcctaggccctctcccctcaaccttctcccggggcctgggtcaccccaatccacggagagagagacccgccgggaggtgcggccgcgctatggacccctgaccccgtggggtcgctcggactcttaacgtgtggactgaccgctactgactgcaccgccaatccccccgtctctgccggccccttagcatgagcgagggggacccagccgggtgacattgtgcccgttggcggattctcgatttcccctcttccccgtcctcgtcctcctcctcccccatgaagtgattctgagtatcggggggtctctggattattgttctgacgaacccctgcttgtggttggggggtatttaatctgaggccttagggtccttcggtgtctttgagtgttttgtgtgtacatattttgctcttaaagtttataaatatacgtatattgagagtgtccacgtctcctcgctgaaccttaggaatcccttggcaccatgtcctgtgtgcattataaattttcctctaaactcaactatgataccgtcacctttgatgggctccacatctccctctgcgacttaaagaagcagattatggggagagagaagctgaaagctgccgactgcgacctgcagatcaccaatgcgcagacgaaagaagaatatactgatgataatgctctgattcctaagaattcttctgtaattgttagaagaattcctattggaggtgttaaatctacaagcaagacatatgttataagtcgaactgaaccagcgatggcaactacaaaagcagtatgtaaaaacacaatctcacactttttctacacattgcttttacctttataatgtagcagtgaagtaaatcattttagaacttaatatccaactgatcatagtacatattgtaaataaaatgtattttgatgacagctcagttgaatatggataatatgtggcatcacttgcacacttattttgtagaaatgggtaatttgtgcccgtaacactgtttcatattaaatatgatagcattatccctgtatgacactgtgttgtacagttaatgtatgatcctttttagatcgtttaggttttacactaaggaacatgatgacatgttctacatttgtctgtctatagttagtattttgtatgtatgtacaggctgttgtgtgctttttgtttcttgcaataaaaaatgtttggagtgtaaaaaaaaaaaccacactaccaaacaaacactttgtggggcgcgcctgggccccttgagagaaagtttttaaaacaccattgcttttgggggcgcgggggccccagtgttgggtttcgtgacacgtgtgctccaggcgtgtccacaaggaaacactctggtcagacacgacgtgctgggattctcccccatataaaagcgcgcgggtgacaccagcgttttttaacc

SEQ ID NO: 36332 - DNA, 1146 bp, Homo sapiens
cccgtgcaatccctgcttaagagaccccgcagtggggcgctcgtccgaagccaggccgcgtccgccatagtgcctggcttggaggtgtcgccgccgctcggtgagagcccccgagcggcagggggccaacacaaaaagggagccggagaagccctagccgctgcccagcagcttgcgggcgtgttctcgcggttccgggcctcaaggcgacggaaacgaaaggcgagcgaagcgcggaggatccggcgagaagaagcgtcagggagcctcggcggtgtccccggggtccgccgaagccacccggccgccggctggggcccggggtggtgaggaagtgctccgaggcctcgccgaggcctagcgccggctttgtgtccgaggcggcggcggcggcggggggaggcggagccgggggcggcctgcgggaaggcctctcctccgccgaccgcgcgttttcggcctaggccgtggggccgctcgtggcctccggggagcaggcgccaggggtttgtgtgcggtgggggcctgggcctgggcctggggaagctgacgccggtcgtccggaagccaggaggaggcgtgaggccgctcgtggactccgggcctaggccctctcccctcaaccttctcccggggcctgggtcaccccaatccacggagagagagacccgccgggaggtgcggccgcgctatggacccctgaccccgtggggtcgctcggactcttaacgtgtggactgaccgctactgactgcaccgccaatccccccgtctctgccggccccttagcatgagcgagggggacccagccgggtgacattgtgcccgttggcggattctcgatttcccctcttccccgtcctcgtcctcctcctcccccatgaagtgattctgagtatcggggggtctctggattattgttctgacgaacccctgcttgtggttggggggtatttaatctgaggccttagggtcctcacggaaacattgaaaagatcagtgaaaaaacaaataaaatcttaaaaaacatatgaagaaaaaaacacgctgtaatcgaaaaaaagattaccacataataagatataagatctaaacacatataacggaaaaacacattcttaggaaacctaaatcaatccattatat

SEQ ID NO: 36333 - DNA, 1072 bp, Homo sapiens
cactagagatagccctcgccctttcattcacacagaggcttttaagaaaaaagcaaccaacctgaagaggacctggcagcaataagtttttggtgaaataacaaagaggaatcccttggcaccatgtcctgtgtgcattataaattttcctctaaactcaactatgataccgtcacctttgatgggctccacatctccctctgcgacttaaagaagcagattatggggagagagaagctgaaagctgccgactgcgacctgcagatcaccaatgcgcagacgaaagaagaatatactgatgataatgctctgattcctaagaattcttctgtaattgttagaagaattcctattggaggtgttaaatctacaagcaagacatatgttataagtcgaactgaaccagcgatggcaactacaaaagcagtatgtaaaaacacaatctcacactttttctacacattgcttttacctttataatgtagcagtgaagtaaatcattttagaacttaatatccaactgatcatagtacatattgtaaataaaatgtattttgatgacagctcagttgaatatggataatatgtggcatcacttgcacacttattttgtagaaatgggtaatttgtgcccgtaacactgtttcatattaaatatgatagcattatccctgtatgacactgtgttgtacagttaatgtatgatcctttttagatcgtttaggttttacactaaggaacatgatgacatgttctacatttgtctgtctatagttagtattttgtatgtatgtacaggctgttgtgtgctttttgtttcttgcaataaaaaatgtttggagtgtaaaaaaaaaaaccacactaccaaacaaacactttgtggggcgcgcctgggccccttgagagaaagtttttaaaacaccattgcttttgggggcgcgggggccccagtgttgggtttcgtgacacgtgtgctccaggcgtgtccacaaggaaacactctggtcagacacgacgtgctgggattctcccccatataaaagcgcgcgggtgacaccagcgttttttaacc

SEQ ID NO: 36334 - DNA, 668 bp, Homo sapiens
gccctttttctatcagtctctgatccctcatgggttctgcctgcccttgtatctcttgtacaatgctcccaaagggctttgctgatctctgcacttctttcctgggacactccccccaccaccaccctttgcacacaccagtgaccaaagtgtatgcagtgatctcacagaagacatcaaaaatggtgcatgcaccgtgaatgtgctcacagagacacgtgcacaagattctgcacccttggccttaatctcagtatgacttaaggtgcaggaacatttttaacaggttttaaaaaaacaaaaaacccttctgggaggaaaaaaataaaaagcagatacaacagctcaactgttcccactcctaactctccactatgtgcttataacttcacattctatgccctccccgccacccacctcatccctgttctgcgtaaccaaaaaacagacaacaaaagcaacctgaggagaggtttctggactattttatctgtctccatttagatggagatataaatgctgctttgggttccataatcctagggggctatgtttacatagtaaaatacatcctaccaaatcaggaaacagtgaataatgggagtcacttcacagagacgcaggaggacctgggggcgtagcagaggaggatagtagagaagtaccat

SEQ ID NO: 36335 - DNA, 528 bp, Homo sapiens
tggtaataccttgcagagctgggacaaggttctttattacagaaggctgtatattatgtggattagtgtccaatatatgataatatttctctgatgggcaggattcatggctccaggaaccaaggtataaaaatgggagtggtaccgctcactcttaccctcagtgtcctcctagcaaagtgtttattttctcttcttatgacctcatgctctgctggcttagagttctttgttcctaatggagtaatgcttccaacaagagatacaacaggccgggcgtggtggctcacgcctgtaatcccagcactttgggaggccgaggcgggtcgatcacaaggtcaggagatcgagaccatcctggctaacatggtgaaacaccgtctgtgttaaaaatacaaaaaaaaaaattagccgggcaaggtggcgggtgcctgtagtcccagctactcgggaggctgaggcaggagaatggcgtgaaccctgggggccggagcctgcagtgagccgagatcgtgctactgcattcca

SEQ ID NO: 36336 - DNA, 1567 bp, Homo sapiens
  misc_feature (1275)..(1275): n is a, c, g, or t
taggctagtacgaggccgggtggtgatcggccgctggctcttctcggcgtgctgcggcggaacggctgttggtttctgctggttgtaggtccttggctggtcgggcctccggtgttctgcttctccccgctgagctgctgcctggtgaagaggaagccatggcgctccgagtcaccaggaactcgaaaattaatgctgaaaataaggcgaagatcaacatggcaggcgcaaagcgcgttcctacggcccctgctgcaacctccaagcccggactgaggccaagaacagctcttggggacattggtaacaaagtcagtgaacaactgcaggccaaaatgcctatgaagaaggaagcaaaaccttcagctactggaaaagtcattgataaaaaactaccaaaacctcttgaaaaggtacctatgctggtgccagtgccagtgtctgagccagtgccagagccagaacctgagccagaacctgagcctgttaaagaagaaaaactttcgcctgagcctattttggttgatactgcctctccaagcccaatggaaacatctggatgtgcccctgcagaagaagacctgtgtcaggctttctctgatgtaattcttgcagtaaatgatgtggatgcagaagatggagctgatccaaacctttgtagtgaatatgtgaaagatatttatgcttatctgagacaacttgaggaagagcaagcagtcagaccaaaatacctactgggtcgggaagtcactggaaacatgagagccatcctaattgactggctagtacaggttcaaatgaaattcaggttgttgcaggagaccatgtacatgactgtctccattattgatcggttcatgcagaataattgtgtgcccaagaagatgctgcagctggttggtgtcactgccatgtttattgcaagcaaatatgaagaaatgtaccctccagaaattggtgactttgcttttgtgactgacaacacttatactaagcaccaaatcagacagatggaaatgaagattttaagagctttaaactttggtctgggtcggcctctacctttgcacttccttcggagagcatctaagattggagaggttgatgtcgagcaacatactttggccaaatacctgatggaactaactatgttggactatgacatggtgcactttcctccttctcaaattgcagcaggagctttttgcttagcactgaaaattctggataatggtgaatggacaccaatctacaaattacctgtcatatactgangaatctcttcttccagttatgcagcacctggctaagaatgtagtcatggtaaatcaaggacttacaaagcacatgactgtcaagaacaagtatgccacatcgaagcatgctaagatcagcactctaccacagctgaattctgcactagttcaagatttagccaaggctgtggcaaaggtgtaacttgtaaacttgagttggagtactatatttacaaataaaattggcaccatgtgccatctgtacatattactgttgcatttacttttaataaagcttgtggcccctttta

SEQ ID NO: 36337 - DNA, 1662 bp, Homo sapiens
  misc_feature (1370)..(1370): n is a, c, g, or t
cgaacgccttcgcgcgatcgccctggaaacgcattctctgcgaccggcagccgccaatgggaagggagtgagtgccacgaacaggccaataaggagggagcagtgcggggtttaaatctgaggctaggctggctcttctcggcgtgctgcggcggaacggctgttggtttctgctggttgtaggtccttggctggtcgggcctccggtgttctgcttctccccgctgagctgctgcctggtgaagaggaagccatggcgctccgagtcaccaggaactcgaaaattaatgctgaaaataaggcgaagatcaacatggcaggcgcaaagcgcgttcctacggcccctgctgcaacctccaagcccggactgaggccaagaacagctcttggggacattggtaacaaagtcagtgaacaactgcaggccaaaatgcctatgaagaaggaagcaaaaccttcagctactggaaaagtcattgataaaaaactaccaaaacctcttgaaaaggtacctatgctggtgccagtgccagtgtctgagccagtgccagagccagaacctgagccagaacctgagcctgttaaagaagaaaaactttcgcctgagcctattttggttgatactgcctctccaagcccaatggaaacatctggatgtgcccctgcagaagaagacctgtgtcaggctttctctgatgtaattcttgcagtaaatgatgtggatgcagaagatggagctgatccaaacctttgtagtgaatatgtgaaagatatttatgcttatctgagacaacttgaggaagagcaagcagtcagaccaaaatacctactgggtcgggaagtcactggaaacatgagagccatcctaattgactggctagtacaggttcaaatgaaattcaggttgttgcaggagaccatgtacatgactgtctccattattgatcggttcatgcagaataattgtgtgcccaagaagatgctgcagctggttggtgtcactgccatgtttattgcaagcaaatatgaagaaatgtaccctccagaaattggtgactttgcttttgtgactgacaacacttatactaagcaccaaatcagacagatggaaatgaagattttaagagctttaaactttggtctgggtcggcctctacctttgcacttccttcggagagcatctaagattggagaggttgatgtcgagcaacatactttggccaaatacctgatggaactaactatgttggactatgacatggtgcactttcctccttctcaaattgcagcaggagctttttgcttagcactgaaaattctggataatggtgaatggacaccaatctacaaattacctgtcatatactgangaatctcttcttccagttatgcagcacctggctaagaatgtagtcatggtaaatcaaggacttacaaagcacatgactgtcaagaacaagtatgccacatcgaagcatgctaagatcagcactctaccacagctgaattctgcactagttcaagatttagccaaggctgtggcaaaggtgtaacttgtaaacttgagttggagtactatatttacaaataaaattggcaccatgtgccatctgtacatattactgttgcatttacttttaataaagcttgtggcccctttta

SEQ ID NO: 36338 - DNA, 996 bp, Homo sapiens
  misc_feature (883)..(883): n is a, c, g, or t
taggctagtacgaggccgggtggtgatcggccgctggctcttctcggcgtgctgcggcggaacggctgttggtttctgctggttgtaggtccttggctggtcgggcctccggtgttctgcttctccccgctgagctgctgcctggtgaagaggaagccatggcgctccgagtcaccaggaactcgaaaattaatgctgaaaataaggcgaagatcaacatggcaggcgcaaagcgcgttcctacggcccctgctgcaacctccaagcccggactgaggccaagaacagctcttggggacattggtaacaaagtcagtgaacaactgcaggccaaaatgcctatgaagaaggaagcaaaaccttcagctactggaaaagtcattgataaaaaactaccaaaacctcttgaaaaggtacctatgctggtgccagtgccagtgtctgagccagtgccagagccagaacctgagccagaacctgagcctgttaaagaagaaaaactttcgcctgagcctattttggttgatactgcctctccaagcccaatggaaacatctggatgtgcccctgcagaagaagacctgtgtcaggctttctctgatgtaattcttgcagtaaatgatgtggatgcagaagatggagctgatccaaacctttgtagtgaatatgtgaaagatatttatgcttatctgagacaacttgaggaagagcaagcagtcagaccaaaatacctactgggtcgggaagtcactggaaacatgagagccatcctaattgactggctagtacaggttcaaatgaaattcaggttgttgcaggagaccatgtacatgactgtctccattattgatcggttcatgcagaataatgtgtgccaaagatntgctggtgggtcctgccgttttgcggcattagaagtccccaatgggttgtttgggacactttatatcctacgggaggtcacagtactggggggcccaggctgagaaaggaggg

SEQ ID NO: 36339 - DNA, 1544 bp, Homo sapiens
  misc_feature (1252)..(1252): n is a, c, g, or t
gaactatactgccgtaggtcgaggctgggttagggggaacggctgttggtttctgctggttgtaggtccttggctggtcgggcctccggtgttctgcttctccccgctgagctgctgcctggtgaagaggaagccatggcgctccgagtcaccaggaactcgaaaattaatgctgaaaataaggcgaagatcaacatggcaggcgcaaagcgcgttcctacggcccctgctgcaacctccaagcccggactgaggccaagaacagctcttggggacattggtaacaaagtcagtgaacaactgcaggccaaaatgcctatgaagaaggaagcaaaaccttcagctactggaaaagtcattgataaaaaactaccaaaacctcttgaaaaggtacctatgctggtgccagtgccagtgtctgagccagtgccagagccagaacctgagccagaacctgagcctgttaaagaagaaaaactttcgcctgagcctattttggttgatactgcctctccaagcccaatggaaacatctggatgtgcccctgcagaagaagacctgtgtcaggctttctctgatgtaattcttgcagtaaatgatgtggatgcagaagatggagctgatccaaacctttgtagtgaatatgtgaaagatatttatgcttatctgagacaacttgaggaagagcaagcagtcagaccaaaatacctactgggtcgggaagtcactggaaacatgagagccatcctaattgactggctagtacaggttcaaatgaaattcaggttgttgcaggagaccatgtacatgactgtctccattattgatcggttcatgcagaataattgtgtgcccaagaagatgctgcagctggttggtgtcactgccatgtttattgcaagcaaatatgaagaaatgtaccctccagaaattggtgactttgcttttgtgactgacaacacttatactaagcaccaaatcagacagatggaaatgaagattttaagagctttaaactttggtctgggtcggcctctacctttgcacttccttcggagagcatctaagattggagaggttgatgtcgagcaacatactttggccaaatacctgatggaactaactatgttggactatgacatggtgcactttcctccttctcaaattgcagcaggagctttttgcttagcactgaaaattctggataatggtgaatggacaccaatctacaaattacctgtcatatactgangaatctcttcttccagttatgcagcacctggctaagaatgtagtcatggtaaatcaaggacttacaaagcacatgactgtcaagaacaagtatgccacatcgaagcatgctaagatcagcactctaccacagctgaattctgcactagttcaagatttagccaaggctgtggcaaaggtgtaacttgtaaacttgagttggagtactatatttacaaataaaattggcaccatgtgccatctgtacatattactgttgcatttacttttaataaagcttgtggcccctttta

SEQ ID NO: 36340 - DNA, 928 bp, Homo sapiens
taggctagtacgaggccgggtggtgatcggccgctggctcttctcggcgtgctgcggcggaacggctgttggtttctgctggttgtaggtccttggctggtcgggcctccggtgttctgcttctccccgctgagctgctgcctggtgaagaggaagccatggcgctccgagtcaccaggaactcgaaaattaatgctgaaaataaggcgaagatcaacatggcaggcgcaaagcgcgttcctacggcccctgctgcaacctccaagcccggactgaggccaagaacagctcttggggacattggtaacaaagtcagtgaacaactgcaggccaaaatgcctatgaagaaggaagcaaaaccttcagctactggaaaagtcattgataaaaaactaccaaaacctcttgaaaaggtacctatgctggtgccagtgccagtgtctgagccagtgccagagccagaacctgagccagaacctgagcctgttaaagaagaaaaactttcgcctgagcctattttggttgatactgcctctccaagcccaatggaaacatctggatgtgcccctgcagaagaagacctgtgtcaggctttctctgatgtaattcttgcagtaaatgatgtggatgcagaagatggagctgatccaaacctttgtagtgaatatgtgaaagatatttatgcttatctgagacaacttgaggaagagcaagcagtcagaccaaaatacctactgggtcgggaagtcactggaaacatgagagccatcctaattgactggctagtacaggttcaaatgaaatccgtgtgtgcgggacctgtctgcggtcctattgacgggccggcaaaattgggtgcccaaattgctggggggccggccgtttggcccttgaaaggccccagggggcgttgggggaccttagcaga

SEQ ID NO: 36341 - DNA, 1476 bp, Homo sapiens
  misc_feature (217)..(217): n is a, c, g, or t
  misc_feature (223)..(223): n is a, c, g, or t
  misc_feature (231)..(233): n is a, c, g, or t
  misc_feature (235)..(235): n is a, c, g, or t
  misc_feature (239)..(240): n is a, c, g, or t
  misc_feature (348)..(348): n is a, c, g, or t
  misc_feature (352)..(352): n is a, c, g, or t
tttgtgtttggtttatttgtttagctttacaaggtacacataagttaggttgaggggttgttaacccttccgtggtctgctttcattccgtgtgcttcctgtcacaggtaatggaaaacataagtagaataggtgacctcttagttttgaacttatttaagtgtggggatgaatttttcatcagaagtgcttacagggttactacctcagtttacantctacntggtcatnnntntatnncatccagtctaagaactgcctccactgttatatattcataattaaacacattgagaatgcacactataaaagctggtcaaatttttgcagagcccttatctgtgtgtntttngtttttttcttttttttttgagacagagtctcgttcggtcccccagcttggagtgcagtggcgcgatctcggctcactgcaacctccgcctcctgggttcacgcgattctcctgcctcagcctcccgagtagctgggattacaggcacacaccaccacgcccggctaattttttgtgtctttttagtagagacggggtttcgctatgttggccagactggtcttgaactgctgacctcgtgatccgcccgcctcggcctctcaaagtgctgggattctgtgtgttttgtgcacctccactttaggtaatcatagggagcacatttacaggatggtctaataacatgaaaacaggctagtttcaagcaacagcaatgtcggttggaaagcaggcgtcatttgccttgaaaaaagccttttgacaacatacaggcattcttttaaaaccaggctgaaacattttatttccgagacttaacgttgtgtttcctgtttcttaaacctagcacctctgtgtatttgaaaataatgagacatctttcattggattttggaaaattgttccccatgggattctaacctcactaccaaatgagtgaaagcttgattaagagttcttccatatactagcctccttggaagaagtgatcagaaggtgataagaaggacagaaaggactattttaaagttggactgaaggagaaaaaagcaaaattcttgtttcatcccaattctagttagaacaaagttaaacccccgtaatcttaaagagaaaatctttggaggttttaattaaacattttatacatttaaagtcttgttaatggtgctttaagtgtcaatgtagcatgtaaaaggctttgtacagacaggtaaaagttccatttctgagtgatgaaatgtaacacttcttcatctttaacttgaaatcaaaactatcagattttatttttgtataatttaaggaaggtaaagttaggggactagaagactctaaattggcttctacagatcaataatttaaatgtaactagttgggattttatagttaaaattatatttgtgtatataacataactaatctgtaaattgtaataaatatatttgcaattattgtcgacgcgg

SEQ ID NO: 36342 - DNA, 1012 bp, Homo sapiens
tgccatccctacaaagactgtatttccattgcaccctccttttattactcggctaattttttgtgtctttttagtagagacggggtttcgctatgttggccagactggtcttgaactgctgacctcgtgatccgcccgcctcggcctctcaaagtgctgggattctgtgtgttttgtgcacctccactttaggtaatcatagggagcacatttacaggatggtctaataacatgaaaacaggctagtttcaagcaacagcaatgtcggttggaaagcaggcgtcatttgccttgaaaaaagccttttgacaacatacaggcattcttttaaaaccaggctgaaacattttatttccgagacttaacgttgtgtttcctgtttcttaaacctagcacctctgtgtatttgaaaataatgagacatctttcattggattttggaaaattgttccccatgggattctaacctcactaccaaatgagtgaaagcttgattaagagttcttccatatactagcctccttggaagaagtgatcagaaggtgataagaaggacagaaaggactattttaaagttggactgaaggagaaaaaagcaaaattcttgtttcatcccaattctagttagaacaaagttaaacccccgtaatcttaaagagaaaatctttggaggttttaattaaacattttatacatttaaagtcttgttaatggtgctttaagtgtcaatgtagcatgtaaaaggctttgtacagacaggtaaaagttccatttctgagtgatgaaatgtaacacttcttcatctttaacttgaaatcaaaactatcagattttatttttgtataatttaaggaaggtaaagttaggggactagaagactctaaattggcttctacagatcaataatttaaatgtaactagttgggattttatagttaaaattatatttgtgtatataacataactaatctgtaaattgtaataaatatatttgcaattattgtcgacgcgg

SEQ ID NO: 36343 - DNA, 385 bp, Homo sapiens
gcacgtgacccagagtaggcgttcagtgaataaatgggcatagaactgttgtatttaagtttgcttctatcccatagactcctacagttggaccagatttggatagaatgcgagcaaattatgccagtgggttggagttcattttacttttcctttaatctacctttttctaaggttagactttatttggctatcatccctgcagcttttatttattcataagcttgaatagccagttataaatgtcatatgttttattatgcagcaatagtgttcgatttggtaccttgaactgttgtaacaatctgacatgaaatacaattaatgcactaacaggagttcatttaaggtatttattcttatgcgttatcttgtgaggaagtga

SEQ ID NO: 36344 - DNA, 355 bp, Homo sapiens
gcacgtgacccagagtaggcgttcagtgaataaatgggcatagaactgttgtatttaagtttgcttctatcccatagactcctacagttggaccagatttggatagaatgcgagcaaattatgccagtgggttggagttcattttacttttcctttaatctacctttttctaaggttagactttatttggctatcatccctgcagcttttatttattcataagcttgaatagccagttataaatgtcatatgttttattatgcagctcgcccctgagttagcagctcgcccctgagttagcagctcgccccttagttagcagctcgcccctgagatagcagctcgcccctgagtt

SEQ ID NO: 36345 - DNA, 405 bp, Homo sapiens
tgtagacggggtctgactctgttgcctaggctgaagtgcagtggcatgacctcggctcactgcagcctgcctctgctttctgggttcaagtgattctcatgcctcagccactacagtagctgggattatgggcatgtaccagctacttgggaggctgaggcagtagaattgcttgaacctaggaggcaaaggttgcagtgagccgagatcgtgccactgcgctccagcctaggcaaccaaatgagactgtcaaataaaaaaaaaaaaaaaaaagccatgtgatgctcatctcatctctgtgtgagtagttcctctccagtaaattacttgctgcagtaaaaagtgatctcttctgaggtcgggagttcaataacagcttgaccaacatggagaaaccctgtctct

SEQ ID NO: 36346 - DNA, 370 bp, Homo sapiens
ggtttacgaatcaccctactaatggtccttgtattttacagaaactctgttaatgcatcctgagtaaaattatcatgtattgtataacagaactgtacattttattatctcctgatttatctttatacaagattagatttggggatattattttttaagctaatattttggtggacaagttttagtcattcatgctcagcaaaacaacgttttaggatggtgagagaagacaaagtaattgatagaagaatgtggacactacttcaaaataactgggaaattatgaggctgggcacagtagctcaaacttgtaatcccagcactttgggaggcagaggtgggaggactgtttgaactcaggagttcggga

SEQ ID NO: 36347 - DNA, 495 bp, Homo sapiens
tctcttgaccttgtgatccacctgcctcggcctcccaaagtgctgggattacaggcataacccaccatgtccagcctctcctggtctttttaaagggaaatgtggacaggccattaacactaaatacatgagttcctactggtgaaatctttgctactctggtagactggtgggggcagtacaactgcaggtggaccaaatgccatgcgactggcaaggtgttctcactccgagcctcagtttcctcaaagtaaaacaatgggattacattagcttgatgatgttcaaagatcattagcattgggacccttttgcaaatgaaatcttatatggcaaaaagcagacgtgggatggatagacttctgagtttaacagctatgcaggatgtctgtgaagacatccaggagaacctcccctaggtgcctgcagagatagagaggtttactacaggcaaggacaggtttagggaccccaggaattcctgaggccttgatt

SEQ ID NO: 36348 - DNA, 346 bp, Homo sapiens
taggccaagaagtctcacagggaaagaaatatcagtttctttttttattaaaaaaatttttttttggctagatgtgtggctcacacctgtaatcccagcactttggaaggctaaggtgggcagattgcttgagctcaggagttcaagaccagcctgggcaacatggtaaaacctcgtctctacaaaaaaatagaaaaaattagccaggcatggtggcatgagcctataatcccagctattcaggtgactgaggtgggaagatgacttgagcccctgaagcagaagttgcagtgagccaagatcacgccactgtactccagcctgggtgagagagccagacgctgtc

SEQ ID NO: 36349 - DNA, 300 bp, Homo sapiens
cagccagtgccactgatgaccaggcctgaggttaaaagattaacccccgactctaaccgcatgtgctctcaatctatcacgaccctttcacatggaaccccttagagttgtaaggccttaaaactctggcttcctggagctcggttcttgagacgcgagtctgccaaaactccccgccgttgagacgcgagtctgccgaggctcacagcccaataaagccaaatccttcgtagccgggtgtctgaggggttttgtccgcggctgtcctgcttcatttcttggttccctgaccaggaagag

SEQ ID NO: 36350 - DNA, 980 bp, Homo sapiens
tgggttgtcctgatgttactgtgtctaggatgtcattgccactggtctcctcagatcaatcattctgcctaataaacagaaaaataacatgggcagcctcacatgcaagcctttacacacactgctaaagagacctcgcttcctctgagaagtgaggatgtgagaatgaaggattgattttacagaactggatgacaggttaaattgggcatctggaggtttatattcccatctccactcaccaagtttcatcctccatttatgaccaaggataggtataacatctgatcttgatggttactgtttcaaaaaacaatctgatcttttttataaagttaaacatttacttaatcatgcagcatactaattcccactcctgggtatttatccgagtgacataaaaacaagttcacacaaaacctgtaaacacatatatgtctttattcatataatagaaaaaacacaaaccctaaaatggaaaaaacataatgtccttcacctggtgatatggtttggttctgtgtccccacccaaatctcatctcaaattgtaatacccacgtgttgaaggaaggacctataaccttcacgtgtcaagggagggaagtgattggatgatgggggcggtttcccccatgctgttcttgtgatagtgcatgaattctcaccagagatgatggttttaaaagtgtttggcagttcttccttcattcacacacactcactgtctctcccctgtgccacataagatgagcttgcttcccttctaccataactgtaagtttctgaagtcctccccagccatgcagaactataagtaaattaaacctcttttctttataaattacctagtctcaggtatgtctttatagcagtgtgaaaataggctaatacatctggtgaatcaataattaaaatgtagcatagctataaatggaatactactcagtaataaaagaataactcgatacatacaaaaaa

SEQ ID NO: 36351 - DNA, 263 bp, Homo sapiens
tgtcagatggttttaatttttctttttcttttttttttctttctttctttttttttttttttttttgagacagaattacaggcgtgagctgctgtgcccggccttatccttctactcttgatggacatttgtcttgtaatttttggctactacaggcagtgtgactatgatcattttgtgcgcatattttggtacacatttgcttgcatttctttagaatatatacctagtgattaaattgctgatagtggctggatgcagtg

SEQ ID NO: 36352 - DNA, 582 bp, Homo sapiens
tgtgcctcagcctcccgagtagctgggattacaggcacccgccatcacgccttgctgatttttgtgtttttagtagagacggggtttcaccatgtaggccaggctggtctcaaacttctgacctcaagtgatccacctgccttggcctcccaaagtgctgggattacaggtgtgagccgctgcgtccagcctaattcagtagaagatttaaacaatttgtggagaattttgaagataatcggtgttgcatacataaaaaacaaaactgaaacaattagtcactcagggtgcagtttgggtggaaagatgagttgttcaagaaaaggaaaatatgcttttcagagtaggggattaaaagaaaaattaaaaaaggaaaatagtataccacatggctcagtggtaagcagcatttatatagtaatgatgtaaacactgaatatagaaccgtacaaaatgatggaacaactagcaggagggtaggaggtatggatgtggacgggggtgggggtagcttccatagtaaaaagtcaaaaaataatacatctttattactcaaaaatcgagagttgcaatacaacactg

SEQ ID NO: 36353 - DNA, 1793 bp, Homo sapiens
  misc_feature (857)..(858): n is a, c, g, or t
  misc_feature (876)..(876): n is a, c, g, or t
  misc_feature (1020)..(1020): n is a, c, g, or t
  misc_feature (1099)..(1099): n is a, c, g, or t
aaaggaatatggaaccagtatgaattaaaatttgtgttttcttcaacattccataacatcactaagaaataaaaaattataaaagctacatggttaaaaagtaccatgctggccaagcgtggtggctcatgactgtggtcccagcactttgggaggctgaggtgggaggaaggctggagcccgggagtttgaggttgcagtgagctgtgatcacaattgcactacagcctggacgacagagtgagaccctgtctcaacaaaaagtacaattgtttgaaagaatgtatacatgttttttactttttagtgaaatatattgtttttaaacattccttggtagagagaatttttttgttggataaaagggaggtatttttgttaaggatatctgggcaccctaaaaatttcatactttatgtccactcattaccgtatgggagaaaagttgctaccattaaagtatgtggtttgtaggagctcctaaaataaaactcttcagttttccaccctgaagtcagcttttggtcataccagattatgtacatatgtagtgggttcatgccatacttttagaaggccagcagagggagcactactcaatgtacagtgtttactgtactgctgagaagactagtattttctatggctcagtacaaaatgaaaacaaaattaaatttcacaactcctcaaaacaaaaccaaaacaaaatttttcattttattcgtgggttcaggtttcagacatgctatttattagtgactgagcagattattttatttctgtgtacttttttgcctatatatgaagactactcaattaccctattttagagggttggtttgtttgtttgttttgcnncagggtctcactttgtcntccaggctggagtgcagtggcatgattgcagcttgctgcagcctcaacgtcccgggttcgacggattctcccacctcagcctcccgagtagttcggactacaggtgtgcgccaccacacccagctaatttttgtatgttttgtngaaatgtggtttcactatgttgcccaggctggtcttgaacccctgggctcaagtagtcctcctgctttgtcctcccaangggctggaattacagatgtgagccaccataccccgttagagttgtgtttttagatttttaagttattatggatacatcctagttgcacatatttttgaggtagatgtgatattttgatacaagcatataatatgtaatgatcaaatcagggtaattggagtatccattgcctaaagcatttatcatttctttgtgttgggaacattccaattccactgtcataattgttttgaaatatatagtaaatgattgttaactataattgccctatagagttacgttgtcagtctacttagtggcctagcaaagaggaagaaacatagtaatttacgcaaattccaggtggaaaatagagaaagtttagagaactaaattagtgtaaaacttaaaagtatttctgactataaattctaccattaaaaacaaaaaagcacccgtgaacccacaaggataaaataatgtgtttgtccctgcccttccttgcatatcctgggtgaggctggttgatggtacattgttgtagaataattgcggaattttatttacctggaagtttgctgagaaaacaatgtctgaggtggtgtaagtttttggaaagcaaacatttgacagagttctcataattgattttcattttccaccctttattctgttaaagttctgaaatattgcataaggccatctgaaaagaaaa

SEQ ID NO: 36354 - DNA, 422 bp, Homo sapiens
ggtcgacatctcattaccaagaactcaggtgtgatcctagggacccaccttgagtaacaaacacatttctttcacttggtaaattccaaggatgtataggatgtataggttacttcccaggaaccaggagcaaaggccagttaaattctttattatacagaagcaattttaaaatgttactgaaaaaccaatcatctactggtaagcagggaattccagacaaaagccctcgacatacccctatgaatcagtaacctggctgtgaaatctgatgatgagaaggaagacatacaggaaatgacagcttgccttgaggtgaggagctgggggatcaccaacaatgctgcccttgttggcatgtaaggatttggaaattggacttttttctatggtttttcagtaacattttaaaattgcttctg

SEQ ID NO: 36355 - DNA, 373 bp, Homo sapiens
aaaatggaatcttctaaatcaaggattggaaaactttttcaataaagggccagagagtgaatatcttagactctgagggccattatagactctgttgcaactactccactctgcgctagtatttaatgatacaaaagcagtcatagggaattaataaactaataaggatggctgtattccaataaaactttatttatggacattgacatttgcatttcttataattttcatgtgtcacaaaatattttcccaaccatttaaaaatgtaaaacctgttctcagctcataggtcatacaaaaataagtggattcgactgatgtgccttagtttgcaaattcagcatattttcaaatggtcattacatgtcacatc

SEQ ID NO: 36356 - DNA, 900 bp, Homo sapiens
ctggagagatacttgagaattttggacactgtaatattgaatttggttctaattgtgatctagagaccctcagactctttcaggtgatgcacgaagtcaaaattctgttcatagtaacgttaacacagtgttgctttttcactctcattccctcaccagtatacagtggcattttccagaggctaaatgatgtgtggtaacatcacattcttctggctaatgaaatgtgtaattctgtattcttgtgttttctataatttttaaggtagtactttaaggtaaaaatatggaagttttcattgatggactcagtttgttcttagtacttctgtgctcttactaggtttcttcagttataactgctatcatctttttgtacacttcattactgtctaataaatccttattttgaaatcccagcattttcctggaacctttgagaaaatataagaagtaagtactacttgtaaaacttgcttgtaaaaacttttgggaaaactcctaattttaaaaattttattgacaacttattttagcactttattctaaaatagaaaaaaatttatattatttctcttatatgtaagggtggattgttggcttaaaaaagggagattagaagacttgctttttcaacccatagctgcaacttgtatgttaaaaatactgaagtggacataccaacaagtataaaggaggactttaaagaatctgggcagaactgtaaataagaactaaaaaaaaaaaaaaagaaaagaaatgaaagtgtaatgaaagctaccttctcagtttcataaatgttcataatgtaccttactgcgtcttatgcgacagaacattttcgtgtagtattatggtaccagttaagttgtggcattctttcaagatcatttagagttt

SEQ ID NO: 36357 - DNA, 931 bp, Homo sapiens
aggagatctgtggctttcttttgttgtgggaatctggcttatggatgaatctacgacacaggattgtgaaattacagctctttgggaacaaaaggaaggcagtattgcatgacttagtttcccagcttcactttccctttggcatggtgagtttggggtcttgagagtctattttctttcacacccatcagcactgttaagtaagcaggaagacaacctgaggttgtctctttactttgagttcctacataataaattgcagcctaatttagtacataaacccaaacctaatttaggagtaaattttttgtagcagatagccagatttcagccaatcacaggcttccagctaacaagactatgcccaaataaggcaaatgcctcatcacatgatgctcaaataaggcagccacctaggcgaggccaatcaggtaacttttctactttgcttaattgttcagcctgtacaaatttgctgcttatgactgctgagcagagctgtctaaacctcttctggtttggagtgctgccttatatatgaattgttctttggtcacataaaattggttaaatttaacttctctaaagttttgtattaaattgtatgtaaaacattggtagcacaatttggattcagatacccaaatattgactatgataatgtaaataatccttaagcagactgatttacaaaggcctgaacaagtttgatattctgaatattcacttcttctgatgaaaaaattgccaagaccttacaattggcaggaaaaaaaatgtgtgttggttaaataagttatgttaacaacaagaacattaccacaattagaaaactcttactatgccaggcactattataaacacacctttgtaccttttttaatcctgaaaaatttctaataaatatgcatttaatattatttgtatttaa

SEQ ID NO: 36358 - DNA, 328 bp, Homo sapiens
tattttttttttcaattcagcatatgaaggatgatgagttttctaacaccaaattttaggattaaaacaacagagtcattatattttcctcaaatattttcacagagatataactttaaatatacttacatttagctacacagaaaccccttttctacacacataggcttagttggattctggaacttcaaaagtacactttgctgtaatcaccattgccttctattggtggctgttatttgtgtcagggttacctgaggctacagctttactggtattcaccaaaagtttaatagttgaaaatctgtagaggattactatgtatacc

SEQ ID NO: 36359 - DNA, 418 bp, Homo sapiens
ggctttgccacatcagctgcttccttactgggccaactttcccactgtccctgctgctctcagtttttctctcctcctgagctgggcttcaagggctgtagccctgggtctcctgtccagtttctgccctactccaccatctggtctgggctttctgagttttatcatgagcacccttctccactcagcagttttcaacctctggtctctgaccccagttctcagactgggaacttccatattgaaaacttgacaaaatgcctgctaacagcttgttacagcaggttttgagttatccgggggagctgtcaggaagccaggttaggatgaagcaagacaagaaacgacattatttctagggctggggaagccccagtcaagacagtcagccacagcctgataactctccctgcatgcg

SEQ ID NO: 36360 - DNA, 383 bp, Homo sapiens
aaaaacaaacagttgaaaaactaccccacttaattaaaacaaaacaaaacgaaacaagaaaacttctcatgccagctgatcccccattgtccacggctaagatggcagcagaatgctgtcattatatacagaaacaagacaacctgaagctaaatggatgccactgcagagtcaacaggcccagcctcacagtgcaggttctgagctatcgcccctccaaaaggcatcttctccacagcctcgatgccaagcaaggagcatccgagttcgtctcgtttgttttgttctttttacaaatatatatatatatatacacacacacacacacacaattgataacttagaatttctagccaataaccatatagttaataccaccttac

SEQ ID NO: 36361 - DNA, 413 bp, Homo sapiens
gctcagtacctcacctttagtattatgtttaatgtctaaaataacattctgtgtaagtcagatggttttattatcatcatttcacagaagagggttgatccatggagagattaagtaatttgcccaaggttgcatagataaaagtaataaagatggaacatagggtcaagattttaagtcaagcatcccaacttttatctgtttcactcactcttaacctcctcactcttgtatatgacatgattttaaaaaaaatatttatctcacatcgtccaggcaagtacgcccaatgacatggtgctttcttgactcaaattcaagaaaaatctatgttggaggccaagacaggaggattacttgagcccaggagtttaagaccagcctgggcaacatagcaagaccctgtctctacc

SEQ ID NO: 36362 - DNA, 349 bp, Homo sapiens
gagcttatgttcagtggaattttataggaattatttgaggtctggatagaagaatattccaccaaagagaatataattttaatccttctaagtgatttatctctgttgactaataaccgctttaaataattggcttgaggtttttttggatatcagaggaagtaagtctttttattctacctagcatctagtttttgatagacaagtttccttattatacccctcttctggttggtttggcttctcattgttgctattgttgttcacttttcactgaagatataaggctttctggtttatgtgtaggtctcctctcagcctctgcatgttgggcagtctcttttgtctc

SEQ ID NO: 36363 - DNA, 299 bp, Homo sapiens
tattttaaaaattgttccgatcaactgtattgaagtataattgacataaaataattttaagtttgtaattcaatgagttttagcaaatatttctttaaataccatcacaatcatgatgcagagtagttccatcatccccaaagtttgctcctgctcctttctaatcagttcttgctcccacctccttgccacttctgatctgctttctatcactagttagcatttcatttaagtggaatcatacagcatgtacttcttgtaggcttcttttgtgaaacttgggcactgtttggactctg

SEQ ID NO: 36364 - DNA, 577 bp, Homo sapiens
gttgcatactggaaacttccaggatctattgaaggtgtcatcagaggcaaatttgtagccttaaattgatttatataaaaccaaaaaaattgaaaatacctgaattaagaactcaatgcaggtgacagcagaaagaatatagagaaagagaggaccttttctgtctagatcatggtgtttgaggagcactagggcagggaggagagagcctggaaagttagcaggggccgaagtaatctggggcctccaaggctaggccctgaagcatgtcagcagtggacagtctcttctacagtacatgttggctttggcccacagcagagcccaggtgttctctgtgctgtcctctgagtgccctgggctgctaggcagaagaacaggagccttcgtggaaggtacctggagcaggggctgcgtggtcctcttggtaaacaggcactgttagggaggactgcagatccacacagcttatcactcgcttcatccctggaacttcctggggtttggtctcgtaaaggagcgctagcacttcttatctgcagggctcccagtgcctgcgctctggtcctgacccctg

SEQ ID NO: 36365 - DNA, 137 bp, Homo sapiens
tagaagtgacatgtaggggaattagaccagggagagatgttggcacagtatcctggaaagctattacaaataatccatgcatgaagtgacaagagctgtagggttatagactgaatgtgtaatctcttaggtttata

SEQ ID NO: 36366 - DNA, 445 bp, Homo sapiens
tgatttaaagtaatacacctaaaagttcttttgatttaaaagtttagcttgcctgatattaatttaaacacaaaagaatacaaactcaagaaattaaaatcctgaaaatagttgcagatactcaacaggggaaaatgatacatgtataatgtatatacagagtacacacattaatatataatacaaattatggtagaaagtaattttctatttagcaatattgaaaaaagctaatactaactgctgaagaaataacacagttcagggaaacaaaacataaaaaacaaaagtatgaaagatacagctacgtggtattttatactctttaatattttattttcatgagctctgaaatcatgtattaaaaatacacaaaatgcgatgacaattcctcaataccattcatttggtggatgtttttactacatttaagaaaaaaaaaaaa

SEQ ID NO: 36367 - DNA, 535 bp, Homo sapiens
attaaaattcaatgggaaagttaggaattaaagttgacacactcaaagaaagtggaggcaacaaagacaaacatggaaaacagagaagagaaaataggaggactggtctggaaagtcagtagccgaataacctgagaaaacaggagggaagaagtcatcaaaataattcagaattttccagaactgattgattgatagaatttccagagtcaaaaggtcactgcacaatggatgaaaatagaccaactccggagcatgttacttgtgagatatgagaacacccaagcacacgaagattctgcaggcgtgtaggggggacggaggggcggattgttacatataaaggatcaagaatcaaaatgtcttcacgcttctcaacaacatctttggaagctagaaagaagataatgtagaagtgcctttggaattcttacaaaaaattatttccaacctagaactctttacatagccaaattataagccaagggttatggtagaataaagacacttggagatatatgagatctcaaaagca

SEQ ID NO: 36368 - DNA, 320 bp, Homo sapiens
aatgaggaaggagcccttaatagtttagtgatgttagaagtgtgtagtttataataatagtttattaaaataatttatggaaaattattgtggaagcaaaattttctgtaaatactgacagaccttggaataggtcagcaaactcttagaggctaatggagttatgacatttatataactacttaggatttggcttattgcgatgattgaataaagcataaagcaaatagataagaaccaagaaccttctaggaggaaaataagaattgttcttccgaatttgaatagaaacacttctctttgttttgagacagagattg

SEQ ID NO: 36369 - DNA, 390 bp, Homo sapiens
taacacaacaagagtatgtataaatatataattaaacataatctttaacatagctgtcacagttacttcataatttaagcaatgctaaatatgtgcccctcctatgacatgacacacaaatattcttccacgatcttggtaacatagcactgttggagttaaatagcagccatgatctgttacctcatctcaaagcctcaaggtaggaaccacgttgtgtggcatctgaccatatgactaatccatttttaaaagcgttcgctttattttgaatcaacagaaaaatcaagaacaaggccagaaattcaatagacagatgggctaaagatatgaaccgttcacagaaagataagcattgaaatatgaaaggatactcaacctcacaaaaaa

SEQ ID NO: 36370 - DNA, 389 bp, Homo sapiens
gccaagcatatggcttacaaaaaatgaagatgtggcttcttctcttcccccatccccagggggagggagctctcttcctacctggtggacagacatggcaccagatgagtcactatgcaggatgcaatagttgctgtgctaagagacattatgggagaataaaggtcctgcctgcatgctgaaatgttcatcaccattttcaaattttaaatgcatagcagttctaaaactgttgcttttaaggaattgggtacttgtaaaggaaacagcgggtcatcctagaaagaaacagatgattactaggggaggtctcaaggccaatgtagggattatactcacagatcagaaacacagtaattgaaaaactagaggacctacaactcagaaat

SEQ ID NO: 36371 - DNA, 402 bp, Homo sapiens
  misc_feature (345)..(345): n is a, c, g, or t
  misc_feature (385)..(385): n is a, c, g, or t
  misc_feature (394)..(394): n is a, c, g, or t
gctgctgggccctcttcctccaggaagccctcacaggctgctgggccctcttcctccaggaggccctcacacactgttgggccctcttcttccaggaagccctcacacgctactgggccctcttcctccaagaagccctcatatgctgctgggccctcttcctccaggaagccctcatatgctgctgggccctcttcctccaggaagccctcacgctgctgggccttctctccggccacctcatggcagctgggtccttggcccatctggtccctccggaaggaaggggtgttctgggagattgggggtgcacaggggtgtaacaaggccagctttccccacatntgggcgtggctgatgagagcaattttgctgctgctttttnggggcagantccatcct

SEQ ID NO: 36372 - DNA, 388 bp, Homo sapiens
tcctagagctctatgttttcacatatgtaatgagtactcactacatataaggctctgagttaggcaatgagcaccgatttgggggaaaatatcaggaaatgatgctgtttgtagtatcagaagagatgattatgtgattgagacctacataacaataatgtggttagtgctgcaaaaacatcagtcttttgcagattgatttatgggcttaacacatttatgtcaaaattctagagttgttaaaagacaaaatgtttttaaatttaatcgtgagtagtaaacaaataggagtagaggagcaaaagcaagatatttaaattgatttatcttatgcaataatgtactatatagctaagaaattaagagtatggaatctacaccaaactgg

SEQ ID NO: 36373 - DNA, 342 bp, Homo sapiens
gactttgggcaagtcactcaagcaccttcagtgctttcggttataaagtgtaggagtcaggctgtatcctctactaggccacagctctgtcaaggtaggtctatatcttattaatatttgaggtttcagtcataagcacacaataatatttttggtgaattgaacatatgtagtggatggatgactgtatttatagttgaacaggagactgactcatttttctcaatggaagcactatttgcattttaggtaggatagttctttttggttctgtagcgtgtgtcacttttggggcccctaggcactaaaggccagcagtaatcccatgtggtttctacaaaa

SEQ ID NO: 36374 - DNA, 461 bp, Homo sapiens
cttggaaatgtctggagaagttttccagtgcggtagcaagcagccttccactgtgctgagacactgatggagggcaggtggaaacagagaggaagagaaagagagacgactgcttaaaggaaaagagttcccatgattgggactgacctgccaaccggtcaggagacctagagagacaggaaagggaagggtggtgcagatacaaggaaatgcaaaccaaaggaatattcttaaaagttgcatgactctggccatgtgaatgaatctttctgtgctggagttttctcatctgtaaaatgggttcattgcaacaccgacctcacagggttgttgggaggagtaaatgcttcggacagtgcatgacaattagtaagctctttctattgttattattcgtatgatttaggatggaaggttgaggaaaaataataaaataattgtcttagtgtttagaattaatt

SEQ ID NO: 36375 - DNA, 1826 bp, Homo sapiens
  misc_feature (1071)..(1071): n is a, c, g, or t
  misc_feature (1131)..(1131): n is a, c, g, or t
  misc_feature (1139)..(1139): n is a, c, g, or t
  misc_feature (1190)..(1190): n is a, c, g, or t
ctgttgttctttttccaaatatcctagagtactttgatatagttgagtatattcatctatgcaatgtccttgtgatgttggtagggagaacttctaaccttttgtgcaatgacgagaaggttatataatggcccagccaggtttcatccttgatatcctggcaactgtagtttatattaatgacatctccattgataaagggtctctgaggtttccagaagaaagttttttagatattcatgagtgtactaatatcatcaatttacctgtaactttgattaagcaaagaaagcaaacccatacacacacacaaacaaacaaaaaaaaccacttttctcaggactttccatttgttcccagcttagtttgaggtcctgcttcattggcttagatctggccaggtctgtttgtcatctggcatctgtctcttctttctcatgctccagatccagagccagagagcagccactgctttgctctgaggttggctctattttctccctttggcatatgggatggcagtagccctgtgcccttttggtactgcagaagagatggattccacttggcccatcccacccccatctctggttcacctgggcatgaaggtttccttggcttctgcctgcagccatatttgggctgcttccaggagaagagaagaatgtagtgacactgcagcagaggcagcttagccgacaaacccccaaccccaacaccagaagagcagggagtgctgctgctgattagtgagggagcagcagaaatgcctaggatgggaatgttctgtccaactactatgaggcttccattaagagctctgtctaaactgctcacagcggcactccccagcctcctcccaatagttccaatgaaaacgagttggtgaaatctctttagaggtttttgacaagtgcctctgccaaagaataaaaatgatacccttcaggaaatatattttagagtccaagatgtatattgttttaatattaagtacaatagcaactaattaaaagattttttcaagaggcactgtctctgtcacccaggctggagttcagtggcatgatnatagctcactgtaacctcaagctccctagctcaaaggatcctgccacctcagcttcccangtagcttngactacaggcacacaccaccattcccagctaatgttgttttttatttttcntttttgtagaaatgggatcttactatgttgcccaggctgatcttgaattcatgacctcagtgacgctctggccttggcctctcaaagcactgttattacaggtgtaagccaccgtgcctgacctatttctaatttgacttacccaagtaattttaaaagatttaaagcaccatccataaggtatagttttctgctaggtaggatttttgatgttatctcctttgtttccagcaacattggtaacctagaactgagtcaatgatgagcattgactacactatgaagcctctctgtttaagatacaggagaaacttagctcctttaaaaaaaaaaaaaaaaaaaaagggtgtggtggctcatgcctgtaatcccagcactttgggagggaggctgagactggcagatcacgaggtccggagttcaagaccagcctggtcaatatggtgaaactccatctctactaaaaacacataaattagctgggtgtggtggcaggcacctgtaatcccagttactcaggaagctcaggcaggagaaccgcttgaaaccagaaggtggagcttgcagtaagctgagatcatgccactacactccagcctgggcaacaagagtgaaactccatctcaaaaaaaaaaa

SEQ ID NO: 36376 - DNA, 1364 bp, Homo sapiens
taaaagaaaaaaaaagataagttccgtaagacaagagatactctcagaaaaaagtcattggctttagaaactgtacaaaacgacctaagccaaacacagcagcaaataaaggaaatgaaagagatgtatcaaagtgcagaagctaaagtcagtaaatccactggaaagtggaactgtgtggaagagaggatatgtcaactccaacgtgaaaatccgtggcttgaacagcaactagttgatgttcatcagaaagaggatcataaagagatagtaattaatatccaaagaggctttattgagagtagaaagaaagacctcatgctagaagagaaaaataagaagctaatgaatgaatatgatcatttaaaagaaagtctctttcaatatgagagacagaaagcagaaacagtagtaagtatcaaggaagataaatattttcaaacttctagaaagaaagtttaaacatttggttctggatacatgttgaacctagttgaatataaaaatcagtagataaaaagtgtgtttactatactgtataattccatttacatgaagcatccagaaaagagaaaggtataggtacaaaaagtagaataatgtttgtgaagggctggggctggaagctggtagtgactgctaatgggcgtgagggatcttgcagtgatggaaatgctctaaagttggattgtagagatggctgcacagctcagaaaatgtactaaaaatcttttaactttatgttaaaacagatacattctatagtatgtaaattatatttcaacaaagctttttggtttaaaaaaaaaggaaaaatgtgttcactacatcagcttagaaacataacttgtttccatagaggtgagagatgatttactttgagagaagacattgtgtcacctatgacattttattaggcacagagtcatattttaaggtagatagtcctgtagtgctgaaataataattttaatgtctttatattgccacatgttaagaccatggtgaaggtataaatggaaatgtttacacctgaaatgagtattttcaaattaaaatttaattaagtgatttgcttcaacacttaattctagatttcccagatgaactgaagtgtattgctgtatcttgtaatatcttgctttaagtagttttttatatattttagttggtatagctttattattattcatattaatttaacttaaatctgaaaatgtcagtctcaaattacatattttaatgaccacgtaatgttttaaaggcacctacttgttataaaattataatttagggtaaatgtggtaaattttagcaaaactatatttgatttagtcttcccactcggtattcataatttactt

SEQ ID NO: 36377 - DNA, 713 bp, Homo sapiens
aaatgtcatttggagcatggcaaccagaaaaaatagattattcttgatatttgtgattcttatagaatatgaatacaaatacttagaaatatttgatgaaccctggagggtaaagtcttttgtttcaccttggtcaaaagtgaattggaaagtttagctcagtctttgtattacaattcaaggttatatgcttgcaacatgaaagtcaaaaggccgctgtcgttacaacccttggaagtccagccagaaatgtccttgttgcctaaaattaaataagcttgtgccatagaatgaaaaattgcttacattagtcaagggaatgaccctgtttcaaaaaaaatttcaagtttgggtgtgtaactgtaaagggaaacgtgaaatatttgggaaaatgtagggatttattggggaattattgtaattgcccttaacctaatcctagacctaaattaacccagagagtaagtcccagttagtgagagaataatgaatatgtgattacttttaaagtaaatatgttaaatcgattgcctctgttctttttcctctctgttgttcccctttttattttatcttttgtgtttgtagtttgagataggcagtgtctttgtttttctctggacaattttaattgaaataattcagacttagataccattcagaaaagatatatattaaaatatctttattagcatcaaacaaagcagtagtga

SEQ ID NO: 36378 - DNA, 742 bp, Homo sapiens
aaacttcagttgtacacagatgatgatgtcatggtatcgagtattctttatattcagttcctatttaagtcatttttgtcatgtccgcctaattgatgtagtatgaaaccctgcatctttaaggaaaagattaaaatagtaaaataaaagtatttaaactttcctgatatttatgtacatattaagataaatgtcatgtgtaagataactgataaatattggaactttgctagaacaagaccctgtagtaatagtaataatagttgaagtttggccaactcttaataaagttattttggtaactaatgttttatggcacttaagaataattagcagcgttaaattttgtttgtattaagcacttttaattttatccttcctaaaaatagtttattgtatctgacaagaaacttacttaaccattgtgtccttcccatcttttttgtcatctttgttttcttcaaatgccctcctcccatctgccttgagattcccttgtcttcacttaaaagccagagtgcaagtcatgatttgcgggagggctcttgaaccacttctggctgcaccacaattctgtacttgagtatcacagtcatttgttttgagacaaacatttttataattctaatttgggttaataaagattttaaaatatttcttggttaacttttgtaattatatacacaacaaatgtgtaaataactaccttgttaaacaccttttaatagcacaaggtttttat

SEQ ID NO: 36379 - DNA, 806 bp, Homo sapiens
  misc_feature (171)..(171): n is a, c, g, or t
aaacttcagttgtacacagatgatgatgtcatggtatcgagtattctttatattcagttcctatttaagtcatttttgtcatgtccgcctaattgatgtagtatgaaaccctgcatctttaaggaaaagattaaaatagtaaaataaaagtatttaaacactttccttgantaatttaatggtagcattatttaaggattaaaattgtccattggtgcttaaagaataaagcttgacttaaaagtaagtttggcggaaaacctttttggggccttaaggaaaaaaccaaaaaggaaaacccccttgggtaagtaatagtaataatagttgaagtttggccaactcttaataaagttattttggtaactaatgttttatggcacttaagaataattagcagcgttaaattttgtttgtattaagcacttttaattttatccttcctaaaaatagtttattgtatctgacaagaaacttacttaaccattgtgtccttcccatcttttttgtcatctttgttttcttcaaatgccctcctcccatctgccttgagattcccttgtcttcacttaaaagccagagtgcaagtcatgatttgcgggagggctcttgaaccacttctggctgcaccacaattctgtacttgagtatcacagtcatttgttttgagacaaacatttttataattctaatttgggttaataaagattttaaaatatttcttggttaacttttgtaattatatacacaacaaatgtgtaaataactaccttgttaaacaccttttaatagcacaaggtttttat

SEQ ID NO: 36380 - DNA, 1042 bp, Homo sapiens
ctagtttttagtttttttcccctagtttttatatagtatgtaattatctttgatttctttcctttcctgtttcttctgtctgctccaattaattcagagtagattgatccttttaagatcaagggcatatctaaattggttctttgaagatgtttctctgttaccttcagtatggtttaatgaagaaagaacttaaagagctggactggatattaacctgttctctgaactttattttccaatatgtagtgctttattttaattatatatatatatatttcttcaaattatgagaataattcttgctcaatacagaacagctgggcaataaaaataaaggaaaattgtatataattaatacttagaagtgaccactgatatagtttcagtgtgtgtttttgtgattctttatgtgattagcttttaaagtcaagtagtatattgtgaacattaaaaaaagtaaatgcatttcagacataataatagctaatatgtatcgagtgctttatttttctcttatgtgaatttcttatggtagattctctaagtctagtgtaatgactattccacaaaatcatcagagaccccaactttttctttttgtcagtactacctccagttccaagacggctatttgagtttcagttgtcctacccatattccagccaggagaattgctcaaaagctccacaaaaaaaaaaaaaaaaaaaaaaaaaaagaaaaggaaagaggaaagacctaatattaaatgacaagccaggtgtggtggctcatgcctataatcccagcactttgggagaccgaggcagacggatcacctgaggtcaggagttggagaccagcctggccaatatggtgaaacctcatctctacttaaaaaaaacaaaaatattagctgggtgtgtggtggtgcatacctgtaatcccggctattagggagcctgaggcaagagaattgcttgaacctgagaggcagaggttgcagtgagccaaggtagcgccactgcagtccagcctggccaacagagcgagactccatctc

SEQ ID NO: 36381 - DNA, 270 bp, Homo sapiens
tgagatggagtctcactctgtcacccaggctagagtgcagtggtgcagtctcagctcactgcaacctccacctctggagctcaagcagtcctccctcctcagcctcctgagtagttgtgatacctttttttaaaggctataactttgaaacaattcatgagctttagtgtaacatataaactattatttccagtatcactgtagtgctccctaccattttaatacctcagtcctctcaaggccatcaaccgtggttgatagggcctagtt

SEQ ID NO: 36382 - DNA, 925 bp, Homo sapiens
gttaaccaagcttttaccgcggggaatggaaatattataagccacttatatatcataaccacaataggcacctcatacaaggtcttcaagctggtacaagtgcttactggataaggagtattctttgtaagttcctttttatgtttgatctcctgatgatacattctacagtatctaatattcactttgaccagagcacagttactgtggaagtcatggtttatgtgctcattgacagcacatagctttccagacaagaaatcacacaggtttccctgttattaacaatctaacctccctgggagaatgacagagtaagtgactggtgtgaataacagaattttttaaagttcttttctaaggtatgacaactaatcaagttagattttgatgccagatgtaaggttgtttactttactggaccttggatattgagaaatggataaagctggataagtttacatctaggtagcttctgagcggtaaaaattagcttagttccttggggaatataaggaaagtcttcccagataagaaagttggcctgctgtcttttgttttgtttggagatggggtcttgctctgtcacccaggctggagtgcagtggcgcgatcttggctcactgcaacctccacctccgggattcaagcgattgtcctgcctcagcctcctgagtagctgggatttaggcgcccaccaccacgcctggctgattgttttgtatttttagtagagacagggtttcaccatgttgtccaggctggtcctgaactcctggcctcaggtgatccccccggcccccctgccgcctcggcctcccaaagtgctgagattacaggcgtgaaccactgcgcccagccagcctgccgtattttgaaagttgaccagggacttgccaagaagataaatacaggataagatact

SEQ ID NO: 36383 - DNA, 399 bp, Homo sapiens
ttaatggatatttaaatgtttacaattttgtttttttttttctatctcaaataaagcttgcgctcatatgtctaagcatgtgtgtggattaaagataaaccactaggtcaggcatggtggctcaaacctgtaatcccagtactttgagaggctgaggtgggcggatcatgaggtcaggagatcgagaccatcctggccaacatggtgaaaccccatctctactaaaaaaaaaaaaattagctgggtgcggtgacacgtgcctgtaatcccactgtaatcccagctactcgggaggctcaagcctgagaatctcttgaacccaggagacagaggttgcagtgagctgagaaggtgccactgcactccagcctggtgacacagcgagactccatctcaaaa

SEQ ID NO: 36384 - DNA, 372 bp, Homo sapiens
gtctgtctcttctgccctgaaattagctctgctagggtagaaactatattgttaacgcctcattcccagtttttggtacataatagctgcccagtaagttattgaatgaatgaactccagggggtaagcatgatatccatttcacagactaaaaaactgaggctcagcagttaactaacctgcccaagtgcacatttactccctagtcatggccgggtttgagacaagggaccatgtttgcctattactggccacacaggaactcaattgaggagcatggcctccaggcccagctgatggtctttaagctcaatgagaaggagcagctggaggtgaaagagaaatgccccagctgggtctcatatagtgggg

SEQ ID NO: 36385 - DNA, 399 bp, Homo sapiens
gacagaagctccacaattgcactgttaaatagatactgaaatatagatatttccttgtgcattaaggtcctaaaaattattctggaaatgtagtgtgagctaagaaactatatccactgcaaatttgtttgggaatggagatctcacttcttgttttaacttttgatagcatgtaaagtgtataaagcagctcaacgttgcttatgattcaaaagttagttgtctaaataacaacagtttaagtttcatatataagtgttgttctgtcctgtaattttaagttgaatttactattataaaattagcaaaagctaattctcaaagccatttattgtttgatcatagtgtctgaaagcagtcttattgttgtgaaaaatttcaatctcagttccaagctga

SEQ ID NO: 36386 - DNA, 386 bp, Homo sapiens
gtaaaatttcaatctaagtaaaacaaaacacatggaatctattctgttagtatggcaaaaaggcaagatttttttctttatcctgttaagtccttttcttaaatgacttaatggactgaatagtgagcactctgccatgtaatttagtagtaaagtgaactgcccttttcttctttccctaaaaatttgcttgtatattataaagcaaaacacctttgaggcgagattcttgccagaccttaaaaataaaaagaataaacaaaacccattttgatctttctctgtacatcctgtcttatggaaagggcatcaggtgcttctatagaacttaccaacagagctccctctgaggggttttctgtctgaggatcaccagaaaagctatg

SEQ ID NO: 36387 - DNA, 505 bp, Homo sapiens
attttctttatgtgtcgacgctgcagctgctgtggggggcagggtatggttcttaggcttgctaacggagttatgttcccagggggattatggctgcctctgctgcatcatacaggttaccacagaagtggggaaaagccagtagtgacaggcctcaccgcagagcctgaagggccagtcttactcccaccgtgccccaccaacagcactgagtttatttacaggcagctggtgagcagggctgagaacttgccccaggctacaagcctccctgctgagaaagcaagcagggctttcaggtttcctgcctccccacatgccacagtttctgtgcttgtatctgtactcctaggttgccccctcccttggattcggtccaggaaacttcgccttcagtcaaaagtgttacaaagtttgtctggaaatttccttctccctttggtctttctgtaattccactggcagccctcctcaaggactcctgcgagagaaagtcaggaatggc

SEQ ID NO: 36388 - DNA, 798 bp, Homo sapiens
aagagacaattgtgctgtcaggctacagcttggtttcatgcatttttacattttaggggaatgtaagacatcaatacatgtaagatttacattggttcgatggagaaaggcaggacaacttgaagctggtggggaagggacagggacagagggagggccttctgggttataggtggattcaaagattttctgattggcagtgggtttatccaaagacctggaatcaatagaagggaatgtctgggttaagataaggtgttgtggagaccaaggttcttactgtgagatgaagccagaaggtagcaggcttcagagagaatagattgtaaatgtttcttatcagacttaagagaaatttattttggggtaaaatacttagatttctctcagggcctgttatctgtcatgttatcttgttgctacaaagagcctgtttttgtcggtcttaaggtctctgttttaatgttaatgctggtccactgtgcctgaattccaaagagaggaaggtataatgaggtatgtctgaccacccattcccatcatggcctgagctagtgtttcaggtttactttagaatgctcttggccaagtggaagggtcgattcagttggttgtgtgcttagaattttatttttgacttacatagactatcagctgcttcatgtcacatctcatgcttctcttatgttgcccagttttctcagtgcttccgactgcatgtttttgtactatatgaaaagccttctttctagaagactaccaattaaatatttctttagaaaaatgtaaaattgctta

SEQ ID NO: 36389 - DNA, 361 bp, Homo sapiens
gagacgggggtcactcggttgtccagcctgggtgacaggaaaaaaaaatcattagaaattaactattcacctgtttaatagtttctccaattaagagtacaagttgctgaagagaatagattgatcaaaataacttatttattgctaagaccaaacttgtctgaggtttgaaggaattttgttattcaataaattcctctgccaagattttaaaactagataattcaagttattaagttaaaggatctttaaacagggaagctcaaaaagactaaactgaaataggagatagagatgatggtcagaagccataatcagatatactattgtcagaagaaaaatagatgctctataagctgta

SEQ ID NO: 36390 - DNA, 468 bp, Homo sapiens
gcaagcgtgctttctccttcactaacccatcccgccatctgtttcttataagccacagatgtgccctctgaccatccaattaaggcctgtggagtgaaaatgggcctgtcacattcttctctgacagccaggctgaaagcccccttcccgtgatcctcctggaacccagggtgggggcttcatggcctcgtctgtaaatgagtccagtgcttggtgctggccgagaagggtggcacagaggtgcctttcaacccttcagacaacgacaggctcctggggaagaggggcttctggtgctggctcccttcccccaggcctgacaaaactccgactctctctctgcaaaagggctgctgatttatatccagggccaaggagaggcctccccaaactcagggccctcatgggccgtgagttattccagcctgcgtgcagccttctggccatgggccctttctgccttcagaa

SEQ ID NO: 36391 - DNA, 300 bp, Homo sapiens
caaatcagtaggggatttgtaaaatttctatacttaaaatgttgctagtcatatctcagaggctctccccaccttttcatcttccttcaccctgaattcactgatacaattatgtatgcacacaaattaagaggtggaaatattcagtaaagtcagtttaataagaaagtagaatttttaacactacagaacatgtctattatgtagataaagctaaacaggagagaaacaccgttacattaaatacaacgtaacgactctgttaaaaatatgattcctcctagattgattctaaaagct

SEQ ID NO: 36392 - DNA, 308 bp, Homo sapiens
aaacaaacccaagtatctagatagaagaatgcacggggctggagagcaaatgggacatattttcctcccccaacccccaacaagtctttataatgtgtcttgcattcatatctctcctgagctcagtggccaactcaaaatcacttctcatgttataagatttttaagttcttagggaaacacactgagttcagagtcaaaaagtatttaagcctccagaagtccccaacagctatctcattgtgtataaaagtgcatctgagctgggtgcagtggctcgcacctgtaatcccagtactttgagaggc

SEQ ID NO: 36393 - DNA, 1518 bp, Homo sapiens
cttttttcaccctgatttctaattattttattgaaacaactataaaatgtatggtttctccaggaagatatctgctttttaaaacaacaaacaagaacaacaacacaaaactggtaatgatttggagtaatcatgcgggcatattgagtctgggtagtgtttcgctggtggtagagtggttgagacttcctgggaggactttttccgccttcactcctacagatttaagattctttatttttaggccgggcatggtgactcacctgaggtgaggagttcgagactagcctggccaacatggcaaaaccctgtctctactaaaagtacaaaaattagccaggcgtggtggtgcatgcctataatcccagctactcgggaggctgaggcaggagaatcgcttgaacccaggaggcagaggttgcagtaagccaaggtcacaccactgcactccagcctaggtgacagggcgagactctgtctctcaaaaaaaaaaaaaaaaaaatttctttgagacagggtctctaatatgttgcccaagctgatctcaaactcgtggctcaactggattctcccgtttcaaccttgagtagctggggacgacagatacttgctactggcacccagctaggttaaggttctgtatactctgtctttctaaagcaattccctggaaattttctcaacattggttataactgaatgcttgggaagggaggggcagcccttcaacaggaaaaggggactgcccaaatcttaaatgcacagtcaagattctcttggagctagcaatggttctcaggttagtgagcatttagcttgcctgctgcagaatttgacccagatgggggtgttttttaggtctctcacaaatgagacaagcgaaacaattgtctccttttattctctttggtgcattggtgctggggaaacatgaactagcggcagtgtaactgcagaacatagacccagttctaccaggccaggccagcgttgggaaccaccagacagggctgctttgggctttgcttacagtatttccatgtgtagcctggcgtgtgagaaagtattaggtgaaatgccagtttcatggttcaggtgaaagtctgtgatcattcccctcgtggctcgtccttcacatcacttttgcccttcaaggagttgccgcgtccccgctcagtgccgcctgagccctcagagctcccctgtgcttttctggatggggactggcggggtcacctagcctcaccgtggagccaccgtgcaatgcccatctctgagaggcccacgcggtattcctcgtgccctgtgttagtgctttctgtataagggacagacagaactgggtttttttcctctgtctggttttagagtaaatgtaactaacttttattttccctttatgaaagatagaaattatttttatgtagtttccagactttatacaaaatttttgtaaaatgttctctggaaagttaactacaagaatgtaaatatgcttctaataaaataacaaggtta

SEQ ID NO: 36394 - DNA, 253 bp, Homo sapiens
ttacgaggaccccaccctcatgaccccactgaacctaattgccttccaaagacccttttccaaataacatccctttgggggttaggactctgacatatgaattttggggatgagggacacacttcagtccatagtaggcacatttactcttcaaagctctttactaacttaggctgtttgggatgttttagagaccccacccctgcattacaaattctaggtcatactttaattggtaaatgagtttttttcc

SEQ ID NO: 36395 - DNA, 1320 bp, Homo sapiens
attcaaaggcataagaattacaaattggactttggggacaccggagaaatgggggaagggtggttaaggataaaaaactacgtattgggcacaacgtacactgctcggatgatgtgtgcaccaaaatctcagatatcaccactaaagaacttatctatgtaacaaaaaccaccagttcccccaaaactactgaatttcttttttaaaaaaggtaattaagataccttgtagacaaggacctttgattacacactggtagaaatttcactttaccatttcagccaccatatgcctgctgtctgcccggggcttgggattcaaagacaaatgtttccagttcccttcctcccacaggtgcttgtggcctggtgggaagcaggcaacatgtgcacatagatcaaaggaagcaccaagtagctgttttcacgaagggtgtggtgagcacagaaaggaagccacctgttggcctggagaagttgaggaagggctctcaggggatgttagaactgagtggtaacagtcagaggagaggggtgaagtgccatgcctggcatgcctgccgagaaactgtggccacatgcagttctcattgcaggccagcctccagctaggacacaattctggtgttgcaatgcaggtcagtgtcctgtattagttttctatgctgcataacacattgccacatggattctctgctcggtgtctcacaaggtgggaataaaggtgtcagcaaattgtgttcctttctgcaaggccctggggaagaattcactttcgagctcattcaaattgtcagcagaactttagttccttgcagttcccttcatcctcgaggcaacagcgtcccatccaggcacactgagtctttcataagcttcaaatgtctcctctcccctgtcttgctctttagggtttaagggtgattccaccaggccaacccagataaatccaggataacctccctattttaaagtcaactgattagaaacctgtccacaaggctcttttgccttgtaaagtaacagattcatagtcccagaaattagggtttgaattctcttagaggactataatgctgcctgccagtctcccacctggaacttgccagaaatcagcacctagcactaagtctttatttaattttttatgtttagagagcagtattgctgttgcccaggctggattacagtggtgcaatcaccactcactgcagcctcaacctcctaagctcaagccatccttcatctctgcctagactagccaactataggtttgccaccatgcccagctctttttttttttaaagagatctggtctgga

SEQ ID NO: 36396 - DNA, 524 bp, Homo sapiens
ctactagtaatctttcttgtctgtgaccagtttatccttaacatgggagactttttctttggataccttcaatattttcagagtggtattttcagagtggtgcctttcacttagttaatatgcatttatgttccttctgtcatttaatggcttgattgctcatttcttttaagcactgaataatattctattgtctgaatgtactacagtttatctattcatttacctacccaccctgacactttgaatctaatcctgctcttccatgacactccctctttccccatagtgcttcctaggaacttgccacgatgtagtgcttacttagtactgcttttctaattacttaatttgtccctcatagtcaaccagcagttttgcctggttcataagagatggcctatttattgaaatgcctggatcagagaaataagatatgactagctggtgccaagaatggagcctggaagttgtctccatgctgtttaccataaagcactaactaaagtcactatttaaaaaaa

SEQ ID NO: 36397 - DNA, 411 bp, Homo sapiens
ctcattttcctcatctatgaaatgggaataaagatagtacctatctcagagggatgttttgagaattaaatgaattaacagtacctggcatacgctaagcattaatgtgtgttaaaaaaaaacacaacaaaaccaaaaggaaacaaacaaatacaagttttagaattcaatgagaacacgacagtttaaaaaaaatgaaatttgattagaaatataagctagagattgctctcaagccagtatagtaatagtacttttaaaaagttattaatgaaaaatatgaaagtaaagtctttaaatcttttagttaagtgtttcaaatttttaaaaacttgcagttctttaaatcttatgtcctcctttaattccatttgaaatttgaggtaaatagtccgacttggaaaaaaaagt

SEQ ID NO: 36398 - DNA, 210 bp, Homo sapiens
ccgcggatgaactaataaatgactgtcccataggacccaatatggcccccgctgtcacttcaaagctgtccttcaggactgtcacttttctggtgggtaagcttagcaaactgcccaccatccacacacacagcaactttgctgtctttgtttacgtttaacatacatggaatctctcagaaatagcactttagaaacatgtttcttggc

SEQ ID NO: 36399 - DNA, 583 bp, Homo sapiens
cccctaacctttagggatttcttgctcttccaaaccctagcaactcctagcgaagcctaatgtattattagttacctattgctgtgtaacagattactccacactgtaaaacaacaaatacatattatctcccatagtttccgagggtcaggaatctgggagtggcttagcaggtggctctggctcagagttgctcataaggttgtgttcaagctatcggccagagcccagcctttggaacacttgactgggctggagtatccacttccaagctcgcctgtgaggctcttggcaggagatctcacttcttcttcactttgtcctccccatagcgctactcaacatcatgtcagatggcttttctaaagtgagtgatgagagaaagacagacagacaaaagactaagattgaagctgcaatgccttttataacccaatcttgggatgtaaaaaccatcacgcttatttgttacactgactgctacctttggatacaaggtgagaggtgactacttaagggtgtgaattacccgaaggtgggggttgtttagggggccacctgggaggctggcttgttacacctg

SEQ ID NO: 36400 - DNA, 385 bp, Homo sapiens
ctggcgacagagcaagactgtctaaaaaaaaaaaaaaagaagtgtcaggagcacaggcttgaggtcagatccgagctgggttctggtcccagttccaccacctgttagccgtgtaacttcactaagtttccgtcttcccatctttaaaatgggaataagggttggttggggtttctatgaagtaatctgtgtaaggtgcatcacagaagtgtctggcatatggcaaactttccatcagtgttatacaccctttgcatatgcgaatgctcccaggcttggatgtttaggttaacattccaaattataaagagtttggaaaatttgagcatctcggatgttgtttggaccgagtcagggtttacgctttatcagtagtttcctattt
